United States Patent Application Publication US 2018/0126003 A1 - sequence listing, part 53

SEQ ID NO: 92571 - DNA, 966 bp, Artificial Sequence
  derived and/or modified sequence
atgagtggtaacggaaatgctgcagctactgcggaggagaactcgcctaagatgcgcgtgattcgcgtgggtaccaggaaatcccaattggcaagaatccagacagattcagtggtcgccacgcttaaggcatcgtatccagggctgcagttcgagattatagccatgagtacaacaggcgacaagatactggacactgccttatccaaaatcggagagaagagtctgttcacaaaggagctggagcacgctctggagaaaaatgaggtcgacctggtcgttcacagtctgaaagatctcccaactgtgttaccaccaggcttcaccatcggtgcgatttgtaagagagagaatccacatgatgccgtggttttccacccaaagtttgtgggtaagacactcgaaacgctccccgagaaatcagtggtcggcacctcttcgctcagacgcgccgcccagctacagagaaagttcccgcatctggaatttcggagcatccgcggtaatctgaacacaagacttagaaaactcgacgagcagcaggagttttcggcaataatcttagcaaccgccggattgcagcggatgggttggcacaaccgagtgggacagattttgcacccggaggagtgtatgtacgcagtggggcaggaagggggctgctcagtgcccgtggctgtgcacaccgctatgaaagacggccaactgtatctcaccggcggggtgtggagccttgacggctctgattcaattcaggaaacaatgcaagccacgatccatgtccccgctcagcacgaagatggtcccgaagacgacccgcagctggtgggcattaccgccaggaatattccacggggccctcagttagcagcccagaacctgggaatatctttggctaatcttctcctgagcaagggcgcaaagaatattttggacgttgcccggcagcttaacgacgcccattag

SEQ ID NO: 92572 - DNA, 966 bp, Artificial Sequence
  derived and/or modified sequence
atgtctggaaatggaaatgctgctgccacagctgaggagaacagccccaagatgagggtcatccgggtgggcaccaggaagagccagctggcccgcatccagacagattctgtggtggccaccctgaaggccagctacccaggcctgcagtttgagatcatcgccatgagcaccactggagacaagatcctggacacagccctgagcaagattggagagaagagcctcttcaccaaggagctggagcacgccctggagaagaatgaggtggacctggtggtgcacagcctgaaggacctgcccaccgtgctgcccccaggcttcaccatcggggccatctgcaagcgggagaacccccatgatgctgtggtgttccaccccaagtttgtgggcaagaccctggagaccctgcctgagaagtctgtggtgggcaccagcagcctgcggcgggccgcccagctgcagaggaagttcccccacctggagttccgcagcatccggggcaacctgaacacccggctgaggaagctggatgagcagcaggagttcagcgccatcatcctggccacagctggcctgcagaggatgggctggcacaacagagtgggccagatcctgcaccctgaggagtgcatgtatgctgtgggccaggagggcggctgcagcgtgcctgtggccgtgcacacagccatgaaggatggccagctgtacctgactggaggagtgtggagcctggatggcagtgacagcatccaggagaccatgcaggccaccatccacgtgcctgcccagcatgaagatggcccagaagatgacccccagctggtgggcatcacagccaggaacatcccccggggcccccagctggccgcccagaacctgggcatcagcctggccaacctgctgctgagcaaaggagccaagaacatcctggatgtggcccggcagctgaatgatgcccactag

SEQ ID NO: 92573 - DNA, 1351 bp, Artificial Sequence
  derived and/or modified sequence
agactgtaggacgacctcgggtcccacgtgtccccggtactcgccggccggagcccccggcttcccggggccgggggaccttagcggcacccacacacagcctactttccaagcggagccatgtctggtaacggcaatgcggctgcaacggcggaagaaaacagcccaaagatgagagtgattcgcgtgggtacccgcaagagccagcttgctcgcatacagacggacagtgtggtggcaacattgaaagcctcgtaccctggcctgcagtttgaaatcattgctatgtccaccacaggggacaagattcttgatactgcactctctaagattggagagaaaagcctgtttaccaaggagcttgaacatgccctggagaagaatgaagtggacctggttgttcactccttgaaggacctgcccactgtgcttcctcctggcttcaccatcggagccatctgcaagcgggaaaaccctcatgatgctgttgtctttcacccaaaatttgttgggaagaccctagaaaccctgccagagaagagtgtggtgggaaccagctccctgcgaagagcagcccagctgcagagaaagttcccgcatctggagttcaggagtattcggggaaacctcaacacccggcttcggaagctggacgagcagcaggagttcagtgccatcatcctggcaacagctggcctgcagcgcatgggctggcacaaccgggtggggcagatcctgcaccctgaggaatgcatgtatgctgtgggccaggaaggaggctgcagtgtgccagtagccgtgcatacagctatgaaggatgggcaactgtacctgactggaggagtctggagtctagacggctcagatagcatacaagagaccatgcaggctaccatccatgtccctgcccagcatgaagatggccctgaggatgacccacagttggtaggcatcactgctcgtaacattccacgagggccccagttggctgcccagaacttgggcatcagcctggccaacttgttgctgagcaaaggagccaaaaacatcctggatgttgcacggcagcttaacgatgcccattaactggtttgtggggcacagatgcctgggttgctgctgtccagtgcctacatcccgggcctcagtgccccattctcactgctatctggggagtgattaccccgggagactgaactgcagggttcaagccttccagggatttgcctcaccttggggccttgatgactgccttgcctcctcagtatgtgggggcttcatctctttagagaagtccaagcaacagcctttgaatgtaaccaatcctactaataaaccagttctgaaggtg

SEQ ID NO: 92574 - DNA, 1469 bp, Artificial Sequence
  derived and/or modified sequence
gacgcgaggctctgcggagaccaggagtcagactgtaggacgacctcgggtcccacgtgtccccggtactcgccggccggagcccccggcttcccggggccgggggaccttagcggcacccacacacagcctactttccaagcggagccatgtctggtaacggcaatgcggctgcaacggcggtgagtgctgagccggtgaccagcacactttgggcttctggacgagccgtgcagcgattggccccaggttgccatcctcagtcgtctattggaagaaaacagcccaaagatgagagtgattcgcgtgggtacccgcaagagccagcttgctcgcatacagacggacagtgtggtggcaacattgaaagcctcgtaccctggcctgcagtttgaaatcattgctatgtccaccacaggggacaagattcttgatactgcactctctaagattggagagaaaagcctgtttaccaaggagcttgaacatgccctggagaagaatgaagtggacctggttgttcactccttgaaggacctgcccactgtgcttcctcctggcttcaccatcggagccatctgcaagcgggaaaaccctcatgatgctgttgtctttcacccaaaatttgttgggaagaccctagaaaccctgccagagaagagtgtggtgggaaccagctccctgcgaagagcagcccagctgcagagaaagttcccgcatctggagttcaggagtattcggggaaacctcaacacccggcttcggaagctggacgagcagcaggagttcagtgccatcatcctggcaacagctggcctgcagcgcatgggctggcacaaccgggtggggcagatcctgcaccctgaggaatgcatgtatgctgtgggccaggaaggaggctgcagtgtgccagtagccgtgcatacagctatgaaggatgggcaactgtacctgactggaggagtctggagtctagacggctcagatagcatacaagagaccatgcaggctaccatccatgtccctgcccagcatgaagatggccctgaggatgacccacagttggtaggcatcactgctcgtaacattccacgagggccccagttggctgcccagaacttgggcatcagcctggccaacttgttgctgagcaaaggagccaaaaacatcctggatgttgcacggcagcttaacgatgcccattaactggtttgtggggcacagatgcctgggttgctgctgtccagtgcctacatcccgggcctcagtgccccattctcactgctatctggggagtgattaccccgggagactgaactgcagggttcaagccttccagggatttgcctcaccttggggccttgatgactgccttgcctcctcagtatgtgggggcttcatctctttagagaagtccaagcaacagcctttgaatgtaaccaatcctactaataaaccagttctgaagg

SEQ ID NO: 92575 - DNA, 966 bp, Artificial Sequence
  derived and/or modified sequence
atgagcggcaacggcaacgccgccgccaccgccgaggagaacagccctaagatgagagtgataagggtcggaacccggaagtctcagctcgcacgcatccaaaccgattctgtcgtggccacactcaaagcttcttatccaggcctccagttcgaaatcatcgccatgagcacaaccggggataaaatccttgacactgccttgagcaaaataggtgaaaagagtcttttcacaaaagagctggagcacgccttggaaaagaacgaagttgatttagtcgtgcactctctgaaagaccttcccaccgttctgccacccgggttcaccattggcgccatttgcaagcgcgaaaaccctcatgacgccgttgtctttcacccaaaattcgtcggcaagactcttgagacactgcctgaaaagagcgtcgtgggcacctcaagcctgcgacgagccgctcagttacaaagaaaattccctcatctggagtttaggagcatcagagggaatctcaacactaggttgcgtaaactcgacgaacaacaggaattctctgctatcatcttggcaaccgctggactacaaagaatgggctggcataacagggttggccagattctgcacccagaggaatgtatgtacgctgtgggccaggaggggggctgttccgttcccgtggctgtgcatacggccatgaaggacggacaattatatctgacgggcggggtgtggagccttgacggtagtgactctatccaggaaacaatgcaggctacaattcacgtcccagcccagcacgaagatgggcccgaagatgacccccagctcgttggtattaccgcgcgcaatattcctcgcgggccccagcttgccgcccagaatctggggatttctcttgctaatctgctcctcagtaaaggagccaagaatatcctggatgtcgctcgccagttgaacgatgcccattag

SEQ ID NO: 92576 - DNA, 966 bp, Artificial Sequence
  derived and/or modified sequence
atgtccgggaatgggaatgcggctgccaccgccgaggaaaactcgccgaaaatgcgcgtcattcgagtggggacgcggaaatcccagctggcaagaatccaaacggattcagtggtcgccaccctgaaagcatcatatcctggacttcaatttgaaatcattgccatgagtactactggggacaaaattctcgataccgctctatccaaaattggtgagaagtcgttgtttaccaaagaattagaacacgcactagagaaaaatgaggtggaccttgtcgtccacagcctgaaagacctgccaacagtgttaccacccggattcacaattggggctatttgcaagagggagaacccacacgatgccgtggtgtttcaccccaaatttgtgggcaaaacactggagacactgccagaaaagagcgtcgttggaaccagcagcctccgcagggcagcccagctgcaaagaaagtttccccatctagaatttcgttcaattcgcggaaaccttaacactcgattgagaaaattagacgagcagcaagaatttagtgctatcatacttgccactgctggtctgcagcggatgggatggcacaatagggtcggtcagatcctgcatcccgaagagtgcatgtatgcggtaggacaagaaggagggtgcagtgtgccagtcgccgtgcatacagccatgaaagacggacagctgtacctcaccggcggtgtttggtccctcgacgggagtgattccatccaagaaactatgcaggcaaccatccacgtccccgcacagcacgaggacgggcctgaagatgatccccagctggtggggattacagcccgaaatatacccagagggccacagctggccgcacaaaacctcggcatctccctagccaacctattgttatccaagggagcgaagaatattttggacgtggcacgacagttgaatgatgcgcactag

SEQ ID NO: 92577 - DNA, 966 bp, Artificial Sequence
  derived and/or modified sequence
atgtctggaaacggcaatgccgccgccactgcagaggagaatagtcctaaaatgcgggtgatccgagtggggacccggaaatcacaactagcccgcattcagaccgatagcgtggttgcaacgctgaaggcctcataccccggcctccaattcgagataatcgcaatgagcacaaccggggataagatcctggacacagccctaagtaagataggagaaaagtctctgtttacaaaggaactagaacatgccctggagaagaatgaggtcgacctggtggtccactccctgaaagatctccccactgttctgcctcccggcttcacgattggcgccatctgcaagcgggagaatccacacgatgccgtcgtattccaccctaaattcgtagggaagactcttgaaaccctgcctgagaaatcggttgttggaacttcttccttgagaagagctgcccaattacaaagaaagttcccgcacttggagtttcggtcaatccgggggaacctaaacacgaggctccgaaagcttgacgaacagcaggagttttccgctattatactcgccacggcagggctgcagcgtatgggatggcacaatagggtcggacagatactgcaccctgaagagtgcatgtatgccgtcggccaggagggtggatgcagcgtgcctgttgccgtgcataccgccatgaaagacggccagctgtacctgactggaggagtgtggagtctggacggttctgattcaatacaggagaccatgcaggcgactatccacgttccggctcagcatgaagatgggccagaagatgacccacagttggtgggtattactgctcgcaatattcccagaggaccacagctagcggctcagaacctggggatttccttggccaatttgttactgagtaaaggtgccaagaatattctggacgtggctcgacagttgaacgacgctcactag

SEQ ID NO: 92578 - DNA, 755 bp, Artificial Sequence
  derived and/or modified sequence
gctcagtgtcctggttactgcagcggcagcaacagcaggtcctactatcgcctccctctagtctctgcttctctggatccctgaggagggcagaagccagtgattctggttcttggacaaggtgttgaggaacactagaaacagaggggactgtgacctggggactttttctgcaggaagaaaacagcccaaagatgagagtgattcgcgtgggtacccgcaagagccagcttgctcgcatacagacggacagtgtggtggcaacattgaaagcctcgtaccctggcctgcagtttgaaatcattgctatgtccaccacaggggacaagattcttgatactgcactctctaagattggagagaaaagcctgtttaccaaggagcttgaacatgccctggagaagaatgaagtggacctggttgttcactccttgaaggacctgcccactgtgcttcctcctggcttcaccatcggagccatctgcaagcgggaaaaccctcatgatgctgttgtctttcacccaaaatttgttgggaagaccctagaaaccctgccagagaagagtgtggtgggaaccagctccctgcgaagagcagcccagctgcagagaaagttcccgcatctggagttcaggagtattcggggaaacctcaacacccggcttcggaagctggacgagcagcaggagttcagtgccatcatcctggcaacagctggcctgcagcgcatgggctggcacaaccgggtggggcag

SEQ ID NO: 92579 - DNA, 1155 bp, Artificial Sequence
  derived and/or modified sequence
gaacaaacagatcctggtgggacagtgtacccaaggtcacccagccaagaggctgagcaggactgtacgtcagatccgtttacctcagtccttaatgcatgcagtccagccagattaagggacccttaatactgtcagctttccccactgtgggatcttcatcctcttgacttcttttgtagccagacatctgggcctcttgctggagaaggtggcagcttgctgctcttagactctagtctactccatgtggcatctggatggcactgaaattttctcaagtgccttgtctgttgtagataatgaatctatcctccagtgactcagcacaggttccccagtgtggtcctggctgccctgcccctgccagctgcaggccccacccttcctgtggccaggctgatgggccttatctctttacccacctggctgtgcacagcactcccactgacaactgccttggtcaaggtgggcttcagggctcagtgtcctggttactgcagcggcagcaacagcaggtcctactatcgcctccctctagtctctgcttctctggatccctgaggagggcagaaggaagaaaacagcccaaagatgagagtgattcgcgtgggtacccgcaagagccagcttgctcgcatacagacggacagtgtggtggcaacattgaaagcctcgtaccctggcctgcagtttgaaatcattgctatgtccaccacaggggacaagattcttgatactgcactctctaagattggagagaaaagcctgtttaccaaggagcttgaacatgccctggagaagaatgaagtggacctggttgttcactccttgaaggacctgcccactgtgcttcctcctggcttcaccatcggagccatctgcaagcgggaaaaccctcatgatgctgttgtctttcacccaaaatttgttgggaagaccctagaaaccctgccagagaagagtgtggtgggaaccagctccctgcgaagagcagcccagctgcagagaaagttcccgcatctggagttcaggagtattcggggaaacctcaacacccggcttcggaagctggacgagcagcaggagttcagtgccatcatcctggcaacagctggcctgcagcgcatgggctggcacaaccgggtggggcag

SEQ ID NO: 92580 - DNA, 966 bp, Artificial Sequence
  derived and/or modified sequence
atgagcggcaacggcaacgccgccgccaccgccgaggagaacagccctaagatgagggtgatccgcgtcggcaccaggaagagtcaattggcccggatccagactgactctgttgtagccacattgaaggcttcatacccagggctgcaatttgaaatcattgcgatgtccacgaccggggataagattttggataccgcgctgagcaagatcggggaaaagagcctcttcacaaaagagctcgagcacgccttagagaagaatgaggtggatctggtcgtgcattcgctgaaggatcttcccaccgttctgcctccaggatttactataggggccatctgcaaacgtgagaacccacatgacgcggtggtcttccaccccaagttcgtcgggaagaccctggagacactccctgaaaagagtgtcgtgggaacaagttcactccggcgcgcagcccagctgcaacgaaagtttccacatttggagttcaggagtatccgcgggaacctgaatacacgtctgaggaaactggatgaacaacaggagttcagtgccattatcctggcgacggccggattacagagaatgggatggcataaccgagtaggacaaattctgcatcctgaagagtgcatgtacgcggtggggcaggagggcgggtgttctgtgcctgtggccgtacatactgccatgaaggacggtcagctgtacctgaccgggggagtgtggtctctggatggctccgatagcatccaagaaaccatgcaggccacgatccatgtgccagcacagcatgaagatggccctgaggatgacccgcagctggtagggatcactgcgcggaacatccctcggggaccgcagctggctgcccagaatctgggcatttccctcgccaacctgttgctatcgaaaggcgcgaaaaatatactggacgtggcacggcaattgaacgacgctcattag

SEQ ID NO: 92581 - DNA, 966 bp, Artificial Sequence
  derived and/or modified sequence
atgagcggcaacggtaatgcagctgccaccgcagaggaaaacagccctaagatgagagtcatcagagtcggcacgaggaagagtcagctagccagaatccagacggactccgtcgtggctacactgaaggcttcttatccaggcctacagtttgaaattatcgccatgtccaccactggagataagatcctcgatacagccctgtcaaagatcggggagaagagcctatttacgaaagaactagagcatgctctcgagaagaatgaggtagacttggtcgtccattccctcaaggacttgcccaccgtgctgccacctggatttacaatcggcgcaatctgcaagagggaaaaccctcacgatgccgtggtattccaccctaagttcgtgggcaagacacttgagacccttcctgagaagagtgtggtcggaacaagctcactgcggagagccgcacagctgcagcgcaagtttccgcacttggagttcaggtccatcaggggaaacctgaatacgcggcttaggaagttggacgaacagcaggagttttccgccattattttagctacggccggactgcaaaggatggggtggcacaacagggtgggacagattctccatccagaggagtgcatgtatgctgtcggccaggagggcggatgcagtgtccctgttgccgtacatacagccatgaaggatggtcagctgtacttaacaggaggagtatggtcactggacggaagcgactctatccaggaaacaatgcaggcgacgatccacgtgcctgcacagcatgaagacggtcccgaagacgatccccagttagtggggattactgcacggaatattccacgagggcctcagcttgccgctcagaacctgggcattagcctagcgaacttgcttctatccaagggggctaagaatatcctggatgtggccaggcaactgaatgacgcacattag

SEQ ID NO: 92582 - DNA, 915 bp, Artificial Sequence
  derived and/or modified sequence
atgagagtgatcagagtgggcaccagaaagagccagctggccagaatccagaccgacagcgtggtggccaccctgaaggccagctaccccggcctgcagttcgagatcatcgccatgagcaccaccggcgacaagatcctggacaccgccctgagcaagatcggcgagaagagcctgttcaccaaggagctggagcacgccctggagaagaacgaggtggacctggtggtgcacagcctgaaggacctgcccaccgtgctgccccccggcttcaccatcggcgccatctgcaagagagagaacccccacgacgccgtggtgttccaccccaagttcgtgggcaagaccctggagaccctgcccgagaagagcgtggtgggcaccagcagcctgagaagagccgcccagctgcagagaaagttcccccacctggagttcagaagcatcagaggcaacctgaacaccagactgagaaagctggacgagcagcaggagttcagcgccatcatcctggccaccgccggcctgcagagaatgggctggcacaacagagtgggccagatcctgcaccccgaggagtgcatgtacgccgtgggccaggagggcggctgcagcgtgcccgtggccgtgcacaccgccatgaaggacggccagctgtacctgaccggcggcgtgtggagcctggacggcagcgacagcatccaggagaccatgcaggccaccatccacgtgcccgcccagcacgaggacggccccgaggacgacccccagctggtgggcatcaccgccagaaacatccccagaggcccccagctggccgcccagaacctgggcatcagcctggccaacctgctgctgagcaagggcgccaagaacatcctggacgtggccagacagctgaacgacgcccactag

SEQ ID NO: 92583 - DNA, 915 bp, Artificial Sequence
  derived and/or modified sequence
atgagagtcatccgtgtgggtacccgcaagtctcagctggcccggatccagaccgattctgtggtcgccaccctcaaagcaagctatcccggcttgcagtttgagatcatcgccatgagtacaactggcgacaagattctggacacagctctgagcaagatcggcgagaagtctctattcacgaaagaattagaacacgccctcgaaaagaatgaggtggatctggtggtacactccttgaaggatctccccactgtgcttccccccggattcacaatcggtgcaatctgcaaaagagagaaccctcacgatgcggtagtgtttcatccaaagttcgttggcaagacactggagacactgcccgaaaagagtgtggtgggcacctctagcctccgaagggccgcccaacttcagcgtaagttcccccatctcgaatttcgctcgattagggggaatcttaacacgcgactgcgcaaactggatgaacagcaggaattcagcgccattatcttggctacagctggcctacaaagaatggggtggcacaatcgggtgggtcaaatactccatcccgaggaatgtatgtatgcggtgggtcaagaaggaggctgttctgtgccagtggccgtacacaccgccatgaaggacggccagctgtatctgactgggggtgtgtggagcctcgacggctccgacagcattcaggaaacaatgcaggccactatacatgttcctgcacagcacgaggacggaccagaggatgatcctcagctcgtggggatcactgcccgaaacattcccagagggccacagctggcggcccagaatctgggaatttcacttgcgaacctgctgctatctaaaggtgctaaaaacattctggatgttgctcggcagcttaacgatgcccattag

SEQ ID NO: 92584 - DNA, 915 bp, Artificial Sequence
  derived and/or modified sequence
atgagggtcatccgggtgggcaccaggaagagccagctggcccgcatccagacagacagcgtggtggccaccctgaaggccagctacccaggcctgcagtttgagatcatcgccatgagcaccaccggggacaagatcctggacacagccctgagcaagatcggggagaagagcctcttcaccaaggagctggagcacgccctggagaagaatgaggtggacctggtggtgcacagcctgaaggacctgcccaccgtgctgcccccaggcttcaccatcggggccatctgcaagcgggagaacccccatgatgctgtggtgttccaccccaagtttgtgggcaagaccctggagaccctgcctgagaagtctgtggtgggcaccagcagcctgcggcgggccgcccagctgcagaggaagttcccccacctggagttccgcagcatccggggcaacctgaacacccggctgaggaagctggatgagcagcaggagttcagcgccatcatcctggccacagctggcctgcagaggatgggctggcacaacagagtgggccagatcctgcaccctgaggagtgcatgtatgctgtgggccaggagggcggctgcagcgtgcctgtggccgtgcacacagccatgaaggatggccagctgtacctgaccggcggcgtgtggagcctggatggcagtgacagcatccaggagaccatgcaggccaccatccacgtgcctgcccagcatgaagatggcccagaagatgacccccagctggtgggcatcacagccaggaacatcccccggggcccccagctggccgcccagaacctgggcatcagcctggccaacctgctgctgagcaagggggccaagaacatcctggatgtggcccggcagctgaatgatgcccactag

SEQ ID NO: 92585 - DNA, 915 bp, Artificial Sequence
  derived and/or modified sequence
atgcgggtgatccgggtgggcacccggaagagccagctggcccggatccagacagacagcgttgttgcaacactcaaagccagctatcctgggctccagtttgagataatagctatgagcaccaccggagataaaattctggacaccgccctgagcaagatcggcgaaaaaagcctgttcacaaaggaactggagcacgcacttgagaaaaacgaggtggatttggttgtccactctttgaaggatctcccaactgtgcttcctccagggtttaccatcggggcgatatgcaagagagaaaatccacatgatgcagtggttttccatccgaaatttgtcggcaagaccctggagaccttacctgagaagtccgttgttggcacttcgagtctaagaagagctgctcagctccagaggaagttccctcatctggaattccgtagtatcagaggaaatcttaatactaggctaaggaagctggacgagcaacaggagttcagcgcaatcatcttggcaactgccggtttgcaaagaatgggatggcataaccgtgtgggacagatactccacccggaggaatgcatgtacgcagtgggacaggagggcgggtgtagcgtgcctgtggcggtccacacggccatgaaggacgggcaactctacctcacgggtggcgtatggtcactcgatgggtctgactccatacaggaaactatgcaggccaccatccacgtgcctgctcaacatgaagatggaccggaggatgatccacagctggttggcataaccgcacgcaatatcccgcgagggcctcagctggctgctcagaatctcggaatttcactggcaaatctgctgctttccaagggggcgaagaatattctggacgtggcacgtcaactgaatgatgcacactag

SEQ ID NO: 92586 - DNA, 915 bp, Artificial Sequence
  derived and/or modified sequence
atgagggtaatccgcgtcggcacgcgaaagtcccagctggctcgcattcaaacggactctgtggtggctactctgaaagcctcctatcccggacttcagttcgagatcatcgcgatgagtacaaccggcgacaaaatcctggacactgccctgtccaaaattggcgaaaaaagcctgttcactaaagagttggagcacgcactggaaaagaatgaagtcgacctggttgtccattcattaaaggacctccccacggtgctgccgcctggatttaccattggcgcaatttgcaaaagagagaacccgcatgatgcagtggtgttccaccctaagtttgtgggtaaaaccctcgaaaccctaccagagaaatccgtggtaggaacctcatcacttaggagggccgcacaacttcagagaaaatttccacatctcgagtttcggagcattagggggaatctcaatactcggcttcggaaactggatgagcagcaggagttcagcgccatcattttggccacggcaggcctgcagagaatggggtggcacaaccgggtggggcagattctgcatccagaagagtgcatgtacgcagtgggccaggaaggtggatgcagcgtgcccgttgccgtgcacactgccatgaaggacgggcaattatatctgacaggcggagtgtggagcttagatggcagcgattccattcaggagacaatgcaggccaccatccatgtcccggctcagcacgaggacgggcctgaggatgatccccagctcgtggggatcaccgcaagaaacatcccgagaggcccacagctggctgcccagaacttggggatatcattagcaaacctcttgctgtccaaaggggctaagaacatcctggacgtggccagacagctcaatgatgcacattag

SEQ ID NO: 92587 - DNA, 564 bp, Artificial Sequence
  derived and/or modified sequence
atgcgtgtgatcagagtgggcacaaggaagagccaactcgcccgcattcaaactgattccgtggtggcaaccctgaaagcatcttatcctggtctgcagtttgagatcattgcgatgtccactacaggcgacaagatcctggacacagccctttcgaaaatcggcgagaaatccctcttcaccaaggaactcgaacacgccctggaaaaaaacgaagttgacctggtggttcactccctgaaggaccttcccactgtgctcccgcccgggtttactattggcgcaatttgcaagagagagaaccctcatgacgcggttgtattccatcctaagtttgtgggtaagacactagagactttgccagagaaaagcgtggtaggaacaagctccttgcgccgcgctgcccagctgcaacgcaaatttccacatctggagtttcgaagcatccgcggtaatctcaacacacggctcagaaagctcgacgagcagcaggagttctctgctatcatcctggccacagctggactccagaggatgggctggcataatagggtgggccagtag

SEQ ID NO: 92588 - DNA, 564 bp, Artificial Sequence
  derived and/or modified sequence
atgcgcgtcattcgagtcggcacccgtaaatcccagttggcacggatccagacagacagcgtcgtggctactctcaaagctagctaccccgggctgcagtttgagatcatcgcaatgtccacaacaggagataaaatattggataccgcgttgtcgaagatcggcgaaaagtccttgtttacaaaggaactagaacatgcccttgagaaaaatgaggttgatctcgtggtgcatagcttgaaagacctgcctaccgtcctgccccccgggtttacaatcggtgctatttgtaaaagggaaaatccacacgatgctgtcgtttttcatcctaaatttgtgggcaaaacactggaaacattgccagagaaatcggtggtgggcacatctagccttagaagggccgctcagttacaaaggaaattcccccatctggaattccgatctattcgcggtaacctgaacacccgactgcgaaaattggatgaacagcaggagttcagcgctattatactggccacagcaggactccagcgcatgggatggcacaaccgggttgggcagtag

SEQ ID NO: 92589 - DNA, 915 bp, Artificial Sequence
  derived and/or modified sequence
atgagggtgatccgtgtcggcacccggaaaagccagctggcccgaattcaaaccgattctgtcgtcgcaacactcaaagctagttatcccggcctgcagttcgaaatcatcgctatgtcaacaaccggagataagatcttagatacagccctgagcaagattggtgagaagtctctattcaccaaggagttggaacatgcactcgagaagaacgaagttgacctagttgtgcactccctcaaagacctccccacagtgcttccccccgggtttaccataggcgcaatctgcaaaagggagaaccctcatgatgccgtggtgtttcatcctaaattcgtgggcaaaacactcgagaccttaccagaaaagtcagtcgtgggcaccagcagcctaagaagagcggcccaactacagcgcaagtttcctcacctggagttcagatctattcgggggaacttaaacacccgcctaagaaaactcgacgagcagcaggaatttagcgcgatcatcctggcaacagcaggattgcagagaatgggttggcacaatagggtcgggcagatcctgcatccagaggaatgcatgtacgctgttggacaggaagggggatgttcagtcccagtggccgtgcacactgcaatgaaggacggccagttgtacctgactggaggtgtgtggagtctggacgggtcagatagcatacaagagacaatgcaggcaacaatccatgttccagctcagcatgaggatggcccagaagacgatccccagcttgtgggcattactgccaggaatattcctcggggaccacagttggctgctcaaaacctgggtatcagcctggccaatctgcttctcagcaagggagccaagaacatcctggacgtggcccgacagctgaacgatgctcattag

SEQ ID NO: 92590 - DNA, 564 bp, Artificial Sequence
  derived and/or modified sequence
atgagggtcatccgggtgggcaccaggaagagccagctggcccgcatccagacagacagcgtggtggccaccctgaaggccagctacccaggcctgcagtttgagatcatcgccatgagcaccaccggggacaagatcctggacacagccctgagcaagatcggggagaagagcctcttcaccaaggagctggagcacgccctggagaagaatgaggtggacctggtggtgcacagcctgaaggacctgcccaccgtgctgcccccaggcttcaccatcggggccatctgcaagcgggagaacccccatgatgctgtggtgttccaccccaagtttgtgggcaagaccctggagaccctgcctgagaagtctgtggtgggcaccagcagcctgcggcgggccgcccagctgcagaggaagttcccccacctggagttccgcagcatccggggcaacctgaacacccggctgaggaagctggatgagcagcaggagttcagcgccatcatcctggccacagctggcctgcagaggatgggctggcacaacagagtgggccagtag

SEQ ID NO: 92591 - DNA, 564 bp, Artificial Sequence
  derived and/or modified sequence
atgcgggtgatccgggtgggcacccggaagagccagctggcccggattcagaccgattcggtcgtcgcaaccctgaaagctagctatccaggccttcaattcgagataatcgctatgagtaccacaggggacaaaattctcgatactgctctgtctaaaattggcgagaagagcctcttcacaaaggagctagagcacgcgctggagaagaacgaagtcgatctcgtggtgcactccctgaaagacctcccaactgtactgccgcctgggtttacgatcggggccatttgtaagcgagagaatccccatgatgccgttgtgtttcaccctaagttcgttgggaagaccttggagaccctgccagagaaaagcgtggtggggacttcctctttacggcgcgctgctcagctccagcggaaattcccccacctggagtttcgctcaataaggggcaacctgaatactcgcttgaggaaactggacgagcagcaggagttctcagcaattatcctggccactgccggactccagcgcatggggtggcacaatagggtaggacagtag

SEQ ID NO: 92592 - DNA, 564 bp, Artificial Sequence
  derived and/or modified sequence
atgcgggtgatccgggtgggcacccggaagagccagctggcccggatccaaacagattctgtagtggctacgctcaaggcaagctaccctggactccaattcgagataattgctatgagtacaaccggagacaagatcctggatactgcactcagcaagattggagagaagtcactcttcacgaaagagctcgagcacgccctggagaaaaacgaagtcgacctggtcgttcattcactgaaagatctgccgacagtactgccccctggctttaccatcggcgccatctgtaaacgtgagaacccacatgatgccgtagtgttccacccaaagttcgtggggaagaccctggaaacactgcccgagaagagtgttgtcggcacctcttcactgaggcgtgccgcccagctgcaacgcaaatttcctcacctggaattcagatccattagaggcaatctgaataccagattacgtaaactcgatgagcagcaggaatttagtgctattatactcgcaaccgcgggactgcaacgaatgggctggcataatcgtgttggtcaatag

SEQ ID NO: 92593 - DNA, 915 bp, Artificial Sequence
  derived and/or modified sequence
atgcgggtgatccgggtgggcacccggaagagccagctggcccggatccagaccgatagcgtcgttgccacccttaaagcctcctatcctggtttacagttcgaaattatcgccatgtccaccacaggtgacaaaattctagacactgccttgagtaagataggtgagaagagccttttcactaaggaactggagcacgcgctagaaaagaatgaagtagacctggtagtgcactccctaaaggatttgccaaccgtcttaccacccgggtttaccattggcgccatttgcaaacgggagaatccccacgatgccgtggtttttcacccaaagttcgtcggcaagaccctcgaaactctgcccgagaagtccgtggttggaacatcctctcttcggcgggctgcccagctccagcgcaagtttccccatctggagtttcggtctattcgaggcaacctaaacaccagactgcgcaagctggatgagcagcaggagttcagcgccatcatccttgcaacagccgggttgcagagaatgggctggcacaacagagtagggcagatacttcatcctgaagaatgtatgtacgcagttggtcaagaaggtggctgttccgtcccagtggcggtgcacacagctatgaaagatggacagctctacttaactggcggagtgtggtctctcgacggatcagatagcattcaggagacaatgcaggccacaattcacgtgccagctcagcacgaagatgggcctgaggacgacccacagctcgtcgggataaccgcccggaacataccacgcggtccccagttagctgcccagaatctcggtatcagtctggccaatctccttctcagcaagggagctaagaatatcctcgacgtggcacgccagctaaacgatgctcactag

SEQ ID NO: 92594 - DNA, 564 bp, Artificial Sequence
  derived and/or modified sequence
atgagagttatccgagttgggacacggaagagccagctggccagaatccagacggattctgtcgtggctacccttaaagcaagctacccaggtctccaatttgaaattattgccatgtccaccacaggagataagatcctggataccgcccttagcaaaatcggcgaaaagtctctctttacaaaggaactggagcacgcactggagaaaaatgaagtggacttggtggtacactccttgaaagatctgccaaccgttctgcccccaggctttacaatcggtgctatttgcaaacgagagaatccacacgatgctgtagtgtttcaccctaaattcgtggggaaaactctcgaaactttacccgaaaaaagtgtcgtagggacttcttcgctccggagggctgcccagctccagcgaaaattccctcaccttgagttccgaagtatccgaggtaatctgaacacacgcctgcgcaagctggatgagcaacaagagtttagtgccattatcctggccactgctggactgcaacgaatggggtggcataatagggtggggcagtag

SEQ ID NO: 92595 - DNA, 564 bp, Artificial Sequence
  derived and/or modified sequence
atgcgagtcataagggttgggacgcggaagagccagctggcaagaatccagaccgacagcgtagttgctaccttgaaagcttcttatccaggtctgcaatttgaaatcatcgctatgtctaccacgggcgataagatactggacacagccctgagcaagattggcgagaagtcgctgttcactaaggaacttgaacacgccctggaaaagaatgaggtagacttggtcgtgcactcgctgaaagacctacccacagtactgccccctggcttcacaatcggggctatttgcaagcgcgagaaccctcacgacgcagtggtcttccatccgaagtttgtgggcaagacacttgagacgctcccggagaagagcgttgtcggtacatctagtctgaggagggcagcccagctacagcgcaagttcccccacttggagttccgcagtattaggggcaaccttaataccaggctgcgcaagttggatgaacagcaggagttctctgcaattatcctcgcaaccgcaggcttgcagcggatgggatggcataacagagtaggacagtag

SEQ ID NO: 92596 - DNA, 915 bp, Artificial Sequence
  derived and/or modified sequence
atgagggtcatcagagtgggcacaaggaagagtcagctcgctagaatccagactgactcagttgtggctaccctaaaagcaagttaccccggtctgcaattcgagatcatcgctatgtccacaacgggcgataagatcctggacacagcccttagtaaaataggtgagaagagtcttttcacaaaagagttagagcacgcactggagaaaaacgaagtggatctcgtcgtgcactcgcttaaggacctgccaaccgttcttccaccgggtttcacaatcggggctatctgcaagagagaaaatccccacgacgccgtggtttttcaccccaagttcgtcggcaagactttagaaacgctacctgagaaatccgtagtcggaacgtcctccctccgccgagccgctcagctacagcgtaagttcccccacctcgaatttaggagtattcgcggtaacctgaacacacggcttcgaaaactcgatgaacagcaggaatttagcgcgataatcctcgccaccgctggactgcagagaatgggatggcacaatagagtggggcagatcttacaccccgaagaatgcatgtacgcagttggccaggaggggggatgttccgtccctgtcgccgtccacaccgccatgaaggatgggcagctgtatttgaccggaggcgtgtggtccctggatggttcagattcaattcaagaaaccatgcaggctacaattcacgttcccgcacagcacgaagatggtccggaggatgaccctcagctggttggaataactgctagaaatattccaagaggccctcaactggccgctcagaatctcggcatcagcttggcgaacctactgctctcaaagggagccaaaaacatcctggatgtcgccagacagctgaacgacgcccactag

SEQ ID NO: 92597 - DNA, 564 bp, Artificial Sequence
  derived and/or modified sequence
atgagagtgatcagagtgggcaccagaaagagccagctggccagaatccagaccgacagcgtggtggccaccctgaaggccagctaccccggcctgcagttcgagatcatcgccatgagcaccaccggcgacaagatcctggacaccgccctgagcaagatcggcgagaagagcctgttcaccaaggagctggagcacgccctggagaagaacgaggtggacctggtggtgcacagcctgaaggacctgcccaccgtgctgccccccggcttcaccatcggcgccatctgcaagagagagaacccccacgacgccgtggtgttccaccccaagttcgtgggcaagaccctggagaccctgcccgagaagagcgtggtgggcaccagcagcctgagaagagccgcccagctgcagagaaagttcccccacctggagttcagaagcatcagaggcaacctgaacaccagactgagaaagctggacgagcagcaggagttcagcgccatcatcctggccaccgccggcctgcagagaatgggctggcacaacagagtgggccagtag

SEQ ID NO: 92598 - protein, 453 aa, Artificial Sequence
  derived and/or modified sequence
MAHITINQYLQQVYEAIDSRDGASCAELVSFKHPHVANPRLQMASPEEKCQQVLEPPYDEMFAAHLRCTYAVGNHDFIEAYKCQTVIVQYPLSFMAAVPHRTHAVDYLGLETRKHWASCSFLQLERNDSVLEQKLVSALSLGTSFLRAFQAHKEENWALPVMYAVALDLRVFANNADQQLVKKGKSKVGDMLEKAAELLMSCFRVCASDTRAGIEDSKKWGMLFLVNQLFKIYFKINKLHLCKPLIRAIDSSNLKDDYSTAQRVTYKYYVGRKAMFDSDFKQAEEYLSFAFEHCHRSSQKNKRMILIYLLPVKMLLGHMPTVELLKKYHLMQFAEVTRAVSEGNLLLLHEALAKHEAFFIRCGIFLILEKLKIITYRNLFKKVYLLLKTHQLSLDAFLVALKFMQVEDVDIDEVQCILANLIYMGHVKGYISHQHQKLVVSKQNPFPPLSTVC

SEQ ID NO: 92599 - DNA, 1362 bp, Artificial Sequence
  derived and/or modified sequence
atggcacatatcactatcaatcagtacttgcagcaggtgtatgaagccatcgattcgcgtgacggggcttcttgcgctgagctcgtatcatttaaacatcctcatgtcgctaacccaagacttcaaatggccagccctgaggaaaagtgtcagcaggttctcgaaccaccatacgacgaaatgttcgccgcccatctgcgttgcacctacgccgtcgggaatcacgatttcatcgaggcctacaagtgccagacagtaattgtgcaatacccattgtctttcatggctgccgtcccacataggacccacgccgttgactacctaggcttggagactcgaaagcactgggcctcctgctcctttctccagctagagcgtaacgacagcgtgttagagcagaagctggtgagcgctctatccctgggtacgagtttcctgagggcatttcaggctcacaaagaggagaattgggctctccccgtgatgtatgccgtggccttagatcttagagtgttcgctaacaacgccgatcagcagctggtgaagaagggaaagtccaaggtcggggatatgctggagaaagcggctgagctccttatgtcatgtttccgcgtctgtgcatctgatacgcgggcagggattgaggattccaaaaagtggggcatgctgttcctggttaatcagctgtttaagatttattttaagattaataaactgcatctgtgcaagccgctcattcgggccatcgactcaagtaacttaaaggacgactattctacagcccagagggtgacatacaaatattacgtaggccgaaaagccatgtttgactctgatttcaaacaggcggaggagtatcttagcttcgcctttgagcactgtcacaggtcttctcagaagaacaagagaatgatactcatatacctgctgcctgtaaaaatgctgctgggacatatgcccacggttgagctgctgaaaaagtatcatctcatgcagttcgccgaagtgacccgagcagtgagcgagggcaacctgcttctgttgcatgaggcactggctaagcacgaggctttttttattagatgtgggatatttctgatccttgaaaaattaaagatcataacttatcgcaaccttttcaaaaaggtctacctgttgttaaagacgcaccagctgtcactggatgcttttcttgtagcactgaaatttatgcaggtggaggacgtcgacattgacgaggtgcagtgtattctggccaacttaatttacatggggcatgtgaagggctacatctctcaccagcatcaaaagctggtggtaagtaaacagaacccttttcctcctctgagtacagtgtgctag

SEQ ID NO: 92600 - DNA, 1362 bp, Artificial Sequence
  derived and/or modified sequence
atggcccacatcaccatcaaccagtacctgcagcaggtgtatgaggccatcgacagcagagatggagccagctgtgccgagctggtgtccttcaagcacccccacgtggccaacccccggctgcagatggccagccctgaggagaagtgccagcaggtgctggagcccccctatgatgagatgtttgctgcccacctgcgctgcacctatgctgtgggcaaccacgacttcatcgaggcctacaagtgccagacagtgattgtgcagtaccccctgtccttcatggctgctgtgccccacaggacccatgctgtggactacctgggcctggagaccaggaagcactgggccagctgcagcttcctgcagctggagagaaatgattctgtgctggagcagaagctggtgtctgccctgagcctgggcaccagcttcctgcgggccttccaggcccacaaggaggagaactgggccctgcctgtgatgtatgctgtggccctggacctgcgggtgtttgccaacaatgctgaccagcagctggtgaagaagggcaagagcaaggtgggggacatgctggagaaggctgctgagctgctgatgagctgcttccgggtgtgtgccagtgacacccgggccggcatcgaggacagcaagaagtggggcatgctgttcctggtgaaccagctgttcaagatctacttcaagatcaacaagctgcacctgtgcaagcccctcatccgggccatcgacagcagcaacctgaaggatgactacagcacagcccagagggtgacctacaagtactacgtgggcaggaaggccatgtttgacagcgacttcaagcaggccgaggagtacctgagctttgcctttgagcactgccacaggagcagccagaagaacaagaggatgatcctgatctacctgctgcctgtgaagatgctgctgggccacatgcccaccgtggagctgctgaagaagtaccacctgatgcagtttgctgaggtgaccagggctgtgtctgagggcaacctgctgctgctgcacgaggccctggccaagcatgaggccttcttcatccgctgtggcatcttcctgatcctggagaagctgaagatcatcacctacagaaacctcttcaagaaggtgtacctgctgctgaagacccaccagctgagcctggatgccttcctggtggccctgaagttcatgcaggtggaggatgtggacattgatgaggtgcagtgcatcctggccaacctgatctacatgggccacgtgaagggctacatcagccaccagcaccagaagctggtggtgtccaagcagaaccccttcccccccctgagcacagtgtgctag

SEQ ID NO: 92601 - DNA, 1362 bp, Artificial Sequence
  derived and/or modified sequence
atggcccacatcaccatcaaccagtacctgcagcaggtgtacgaggctattgacagtcgggacggagcctcctgcgccgagctagtgtcatttaaacatccccacgttgctaatccgagactccagatggcgagtcctgaggaaaagtgccagcaggtactggagcccccctacgacgagatgttcgcagctcaccttagatgtacttatgctgtcgggaatcacgactttatcgaggcatacaagtgccagaccgtcatcgtacagtatcccttgtcctttatggcggccgtcccacatcggactcatgctgtcgactacctgggtttggagacccgcaagcactgggcctcatgttccttcttgcagctcgagagaaacgactctgtcctcgagcagaaactggtgtctgctctgtctctgggaacctctttccttcgggctttccaggcgcataaggaggaaaactgggctttacctgtcatgtacgccgttgccttggatttgagggtgttcgccaataacgccgaccaacagctggtcaagaaggggaagagcaaagttggagatatgcttgagaaggccgccgagttgctaatgtcttgcttcagagtgtgcgcttctgacacaagggccggtattgaagattccaaaaagtgggggatgctttttctggtgaaccagttgtttaaaatttactttaagattaacaagctgcatctgtgcaaacccctcatcagggcaattgatagctctaacctgaaggacgattattccacggcgcagcgagtaacatataaatactacgtgggacggaaagccatgtttgattctgattttaaacaagcagaagagtacctcagctttgcatttgagcactgccaccgtagctcgcaaaaaaataagcggatgatcttaatctatctcttgcctgtgaagatgcttctcggccacatgcccacagtcgagctgctgaaaaagtaccatctcatgcagttcgcggaagtgactcgtgccgtgtctgagggaaacctgctgttgctccatgaggctctcgccaagcacgaagccttcttcatcaggtgcggcatattcctgattctggaaaagctgaagattatcacatatcgaaacctttttaagaaggtatacctgctgctgaaaacacaccaattgtcccttgacgcttttctcgtggctttgaaatttatgcaggtagaagatgtagatatcgacgaggtccagtgtattcttgcaaatctgatatatatggggcacgtcaagggttatatttcacaccagcaccagaagctggtagtctcaaaacagaatccatttccgccattgtcgaccgtgtgctag

SEQ ID NO: 92602 - DNA, 1786 bp, Artificial Sequence
  derived and/or modified sequence
gtagggggtggcgctctccgttcggcggcgctcccatggcgcacattaccattaaccagtacctgcagcaggtgtacgaagccatcgacagcagagatggagcatcttgtgcagagttggtgtcttttaaacatcctcatgttgcaaacccacgacttcaaatggcctctccagaggagaagtgtcaacaagtcttggaacccccttatgatgaaatgtttgcagctcatttaaggtgcacttatgcagtggggaatcatgacttcatagaggcatacaagtgccagaccgtgatagtccaatatcctttgtcgttcatggcagctgtcccgcatagaacacatgcagtggattacttgggacttgagacccggaaacactgggccagttgctcatttctgcagttagaaaggaatgacagtgttttggaacagaagctcgtttcagctctttcacttggtacatcattcttgcgagcattccaggcccacaaagaagaaaactgggctctgcctgtcatgtatgcagtagcgcttgaccttcgagtgtttgccaataatgcagatcaacagttggtaaagaaaggaaaaagcaaagttggggacatgttggaaaaagcagcagagttactgatgagctgtttccgggtctgtgccagcgacacccgtgctggtatagaggactctaagaagtggggcatgctgtttctggtgaaccagctgtttaaaatctacttcaagatcaacaaactccatttatgtaaacccctaattagagcaattgacagctcaaacctgaaagacgattacagcactgcacagagagtaacatacaaatactacgttggacgcaaggctatgtttgacagcgattttaagcaagctgaggagtacctgtcatttgcctttgagcattgtcaccgttctagtcagaagaacaaaaggatgattctgatctatttgcttccagtaaaaatgctattgggtcacatgcccactgtggagctcctgaaaaagtatcacctgatgcagtttgcggaagtaaccagagctgtgagcgagggcaacctgctgctgctgcacgaggcgctggcgaagcacgaggccttcttcattcgctgcggaatcttcctcatcctggagaagctgaagatcatcacctacaggaacctctttaagaaagtgtatttgttactgaaaacacaccagctgtctctggatgcttttctggttgccttgaagttcatgcaggtggaggacgtggacattgacgaagttcagtgtattctggctaacttgatatacatgggacacgtcaaaggctacatatcgcatcagcatcagaagctggtggtcagcaagcagaacccatttcctcccctgtccacggtgtgttgaaagtacacggagccccgaggacggactcggctggttctggagtctttgtgagacttctttgaaggaggctttgcgtgaaggctgctcggctcacttttcctaagtgtggttcctgaaggctgtctttgtaactttttgtagttctttgtgtaaaaagcgtattctgaatttatacacatggcatgttcttcattatatcttccaggatacatctatttttatatattaaatttgaatgtgttatcaaaatgcttggttaacttaaggcacctttttaaaagcagaatttaatttgatttaaattttccagattttatagcttgcctgtatggatgctcctcaatttatgatagggttacatcccaataaacttattttatttgcctttg

SEQ ID NO: 92603 - DNA, 1362 bp, Artificial Sequence
  derived and/or modified sequence
atggcccacattacaatcaaccaatatctccagcaagtttacgaggctatcgatagcagggatggcgctagctgcgcagagctggtttcatttaaacatcctcatgtcgctaacccacgtctgcagatggcgagtcccgaagaaaagtgtcagcaggtgctagagcccccttacgacgagatgtttgccgctcatttaagatgtacatacgctgtgggtaatcatgactttattgaagcctacaaatgtcagactgtgattgtgcagtatccgttgagtttcatggctgccgtcccccacagaactcacgcagtggactatcttgggttagaaactcgaaagcactgggcgtcctgtagctttctacagctggaacgcaacgatagcgtactcgagcagaaactcgtttctgctctctcgctcggaacctctttcttaagggcatttcaagctcacaaagaggagaactgggctctgccggtgatgtatgctgttgccctggacctgagggtgtttgctaacaacgcggaccagcagcttgttaaaaaagggaaatctaaagtgggcgatatgctagagaaggctgcagaacttctgatgtcctgcttcagggtgtgtgcgtccgacacaagggctgggatagaggattcgaaaaaatggggaatgctcttcctggtgaaccagctgttcaagatttatttcaaaatcaacaagctccacctgtgcaaacccttgatccgagccatcgattcgtccaacctgaaagatgactattcaacggcccagcgtgtgacctacaagtattacgtaggaaggaaagccatgttcgactcagattttaagcaggccgaagaatatctgtccttcgcgttcgagcattgtcatcggtcttcacagaaaaataagcgcatgattctgatttacctgctgcccgtcaaaatgctgttggggcatatgccaaccgtggagctgcttaaaaaatatcacctgatgcagtttgctgaagtgacaagggctgtctccgaaggtaacctgttgcttctgcacgaggcccttgcaaagcatgaagcatttttcataaggtgtggcatcttcctgatcttagagaaacttaaaataattacatacagaaacctttttaaaaaagtttacctgctgcttaaaacccaccagttgagcttagatgcattcttagttgctttgaagtttatgcaggttgaagacgtggatattgatgaggtgcagtgtattctggcgaacctcatctacatgggacacgtgaagggctacatctcacaccagcatcagaagctggtggtttccaaacaaaatcctttcccccctttgtcaactgtttgttag

SEQ ID NO: 92604 - DNA, 1362 bp, Artificial Sequence
  derived and/or modified sequence
atggcccacatcaccatcaaccagtacctgcagcaggtgtacgaggccatcgacagcagagacggcgccagctgcgccgagctggtgagcttcaagcacccccacgtggccaaccccagactgcagatggccagccccgaggagaagtgccagcaggtgctggagcccccctacgacgagatgttcgccgcccacctgagatgcacctacgccgtgggcaaccacgacttcatcgaggcctacaagtgccagaccgtgatcgtgcagtaccccctgagcttcatggccgccgtgccccacagaacccacgccgtggactacctgggcctggagaccagaaagcactgggccagctgcagcttcctgcagctggagagaaacgacagcgtgctggagcagaagctggtgagcgccctgagcctgggcaccagcttcctgagagccttccaggcccacaaggaggagaactgggccctgcccgtgatgtacgccgtggccctggacctgagagtgttcgccaacaacgccgaccagcagctggtgaagaagggcaagagcaaggtgggcgacatgctggagaaggccgccgagctgctgatgagctgcttcagagtgtgcgccagcgacaccagagccggcatcgaggacagcaagaagtggggcatgctgttcctggtgaaccagctgttcaagatctacttcaagatcaacaagctgcacctgtgcaagcccctgatcagagccatcgacagcagcaacctgaaggacgactacagcaccgcccagagagtgacctacaagtactacgtgggcagaaaggccatgttcgacagcgacttcaagcaggccgaggagtacctgagcttcgccttcgagcactgccacagaagcagccagaagaacaagagaatgatcctgatctacctgctgcccgtgaagatgctgctgggccacatgcccaccgtggagctgctgaagaagtaccacctgatgcagttcgccgaggtgaccagagccgtgagcgagggcaacctgctgctgctgcacgaggccctggccaagcacgaggccttcttcatcagatgcggcatcttcctgatcctggagaagctgaagatcatcacctacagaaacctgttcaagaaggtgtacctgctgctgaagacccaccagctgagcctggacgccttcctggtggccctgaagttcatgcaggtggaggacgtggacatcgacgaggtgcagtgcatcctggccaacctgatctacatgggccacgtgaagggctacatcagccaccagcaccagaagctggtggtgagcaagcagaaccccttcccccccctgagcaccgtgtgctag

SEQ ID NO: 92605 - protein, 399 aa, Artificial Sequence
  derived and/or modified sequence
MRLTDVVQQLVYEAIDSRDGASCAELVSFKHPHVANPRLQMASPEEKCQQVLEPPYDEMFAAHLRCTYAVGNHDFIEAYKCQTVIVQYTSFLRAFQAHKEENWALPVMYAVALDLRVFANNADQQLVKKGKSKVGDMLEKAAELLMSCFRVCASDTRAGIEDSKKWGMLFLVNQLFKIYFKINKLHLCKPLIRAIDSSNLKDDYSTAQRVTYKYYVGRKAMFDSDFKQAEEYLSFAFEHCHRSSQKNKRMILIYLLPVKMLLGHMPTVELLKKYHLMQFAEVTRAVSEGNLLLLHEALAKHEAFFIRCGIFLILEKLKIITYRNLFKKVYLLLKTHQLSLDAFLVALKFMQVEDVDIDEVQCILANLIYMGHVKGYISHQHQKLVVSKQNPFPPLSTVC

SEQ ID NO: 92606 - protein, 397 aa, Artificial Sequence
  derived and/or modified sequence
MRLTDVVQQLVYEAIDSRDGASCAELVSFKHPHVANPRLQMASPEEKCQQVLEPPYDEMFAAHLRCTYAVGNHDFIEAYKCQTVIVQSFLRAFQAHKEENWALPVMYAVALDLRVFANNADQQLVKKGKSKVGDMLEKAAELLMSCFRVCASDTRAGIEDSKKWGMLFLVNQLFKIYFKINKLHLCKPLIRAIDSSNLKDDYSTAQRVTYKYYVGRKAMFDSDFKQAEEYLSFAFEHCHRSSQKNKRMILIYLLPVKMLLGHMPTVELLKKYHLMQFAEVTRAVSEGNLLLLHEALAKHEAFFIRCGIFLILEKLKIITYRNLFKKVYLLLKTHQLSLDAFLVALKFMQVEDVDIDEVQCILANLIYMGHVKGYISHQHQKLVVSKQNPFPPLSTVC

SEQ ID NO: 92607 - DNA, 1200 bp, Artificial Sequence
  derived and/or modified sequence
atgcgcttaaccgatgtcgtccagcaattggtttacgaagctattgatagccgcgacggtgctagctgcgctgagctggtatccttcaagcacccccacgtagcaaacccacgactccagatggcatccccagaagaaaaatgccagcaggtgttagagcctccgtacgatgagatgtttgccgcccacttacgctgcacatatgctgtgggcaaccacgactttatcgaagcatataaatgtcagaccgtgattgtccagtacacatctttccttagagcgttccaggcacacaaggaggaaaactgggcgctgcccgtgatgtatgctgtggctctggacctgcgagtcttcgccaataacgcagaccaacagttggtgaagaagggcaagtccaaggttggggacatgctggaaaaggctgctgaactcctgatgtcctgttttagggtttgtgcgtcagacacaagggcaggtatcgaggacagcaaaaagtgggggatgctgtttctcgtgaaccagctgtttaagatctacttcaagatcaacaaactgcacctttgtaaacctctcatccgtgctatagactcttcaaatttgaaagacgactattcgacagcccaacgggttacctacaagtattatgtgggaagaaaggctatgttcgatagcgattttaagcaggccgaggagtacctgagcttcgctttcgaacactgccacaggagcagtcagaagaacaaaagaatgatacttatctatcttttaccggtcaaaatgcttctggggcatatgccaactgtcgagcttcttaagaaatatcatcttatgcagtttgccgaggtgactcgggccgtatctgagggcaacctgctgctccttcatgaggcgctcgctaagcacgaagccttttttattcggtgtggcatcttcctgatcctggagaaacttaagattattacatacagaaacctgtttaagaaagtgtatctgctgctgaagactcaccaactctctctcgacgctttcctagttgcactgaagtttatgcaggtggaagatgtagacattgacgaagttcagtgcatcctcgcaaacctaatttatatggggcacgtgaaggggtacataagtcatcagcaccagaagctggtagtgtctaagcaaaacccatttcctccattatctaccgtttgttag

SEQ ID NO: 92608 - DNA, 1194 bp, Artificial Sequence
  derived and/or modified sequence
atgcgcctgacagacgtggtccagcaactggtgtacgaagctattgactctcgggatggagcatcatgtgcggaattggtgtcttttaagcatccacatgtcgccaacccacgtcttcagatggcatctcctgaagaaaagtgccagcaggttctggaacctccctatgacgagatgttcgctgctcacctgagatgtacttatgcagttggcaaccatgacttcatagaagcttacaagtgccagactgtcatcgttcagagcttcctgcgagcctttcaggcacacaaggaagagaattgggctctgccagtcatgtacgccgtggcactggacctcagggttttcgctaataacgccgatcagcaactggtgaagaaaggtaaaagcaaagtgggcgatatgcttgaaaaggcagctgagctcctgatgagttgttttcgggtctgtgcatccgatacacgcgcggggatcgaggattccaagaagtggggaatgctgttcctggttaaccagctgttcaagatatactttaagattaataaacttcatctgtgcaagccactgatacgtgcgatcgatagttctaatttgaaagacgattattctactgcgcaacgagttacctacaagtattatgtgggtagaaaagctatgttcgacagtgacttcaaacaggccgaagagtacttatctttcgctttcgagcactgtcaccgatcaagccagaagaacaaaagaatgatactgatatacttgctgcccgtgaaaatgttgctggggcacatgcccaccgttgagctgctgaaaaagtatcatctcatgcagttcgcagaggttacccgagcagtgagtgagggcaatctgctcctactacacgaggccctggctaagcatgaggcattcttcatacgctgtggcatcttcctgattctggagaagctgaaaattattacctacagaaatttatttaaaaaggtatatctgctgctgaagacacatcagctgtccctggatgcgtttctggtcgctcttaagttcatgcaggtggaagacgttgacatcgatgaagtgcagtgtattctcgctaacctgatctacatgggccacgtgaaaggttatatatctcaccagcatcagaagctcgttgtgtctaagcaaaatccattcccacccctcagcacagtttgttag

SEQ ID NO: 92609 - DNA, 1200 bp, Artificial Sequence
  derived and/or modified sequence
atgaggctgacagatgtggtgcagcagctggtgtatgaggccatcgacagcagagatggagccagctgtgccgagctggtgtccttcaagcacccccacgtggccaacccccggctgcagatggccagccctgaggagaagtgccagcaggtgctggagcccccctatgatgagatgtttgctgcccacctgcgctgcacctatgctgtgggcaaccacgacttcatcgaggcctacaagtgccagacagtgattgtgcagtacaccagcttcctgcgggccttccaggcccacaaggaggagaactgggccctgcctgtgatgtatgctgtggccctggacctgcgggtgtttgccaacaatgctgaccagcagctggtgaagaagggcaagagcaaggtgggggacatgctggagaaggctgctgagctgctgatgagctgcttccgggtgtgtgccagtgacacccgggccggcatcgaggacagcaagaagtggggcatgctgttcctggtgaaccagctgttcaagatctacttcaagatcaacaagctgcacctgtgcaagcccctcatccgggccatcgacagcagcaacctgaaggatgactacagcacagcccagagggtgacctacaagtactacgtgggcaggaaggccatgtttgacagcgacttcaagcaggccgaggagtacctgagctttgcctttgagcactgccacaggagcagccagaagaacaagaggatgatcctgatctacctgctgcctgtgaagatgctgctgggccacatgcccaccgtggagctgctgaagaagtaccacctgatgcagtttgctgaggtgaccagggctgtgtctgagggcaacctgctgctgctgcacgaggccctggccaagcatgaggccttcttcatccgctgtggcatcttcctgatcctggagaagctgaagatcatcacctacagaaacctcttcaagaaggtgtacctgctgctgaagacccaccagctgagcctggatgccttcctggtggccctgaagttcatgcaggtggaggatgtggacattgatgaggtgcagtgcatcctggccaacctgatctacatgggccacgtgaagggctacatcagccaccagcaccagaagctggtggtgtccaagcagaaccccttcccccccctgagcacagtgtgctag

SEQ ID NO: 92610 - DNA, 1194 bp, Artificial Sequence
  derived and/or modified sequence
atgaggctgacagatgtggtgcagcagctggtgtatgaggccatcgacagcagagatggagccagctgtgccgagctggtgtccttcaagcacccccacgtggccaacccccggctgcagatggccagccctgaggagaagtgccagcaggtgctggagcccccctatgatgagatgtttgctgcccacctgcgctgcacctatgctgtgggcaaccacgacttcatcgaggcctacaagtgccagacagtgattgtgcagagcttcctgcgggccttccaggcccacaaggaggagaactgggccctgcctgtgatgtatgctgtggccctggacctgcgggtgtttgccaacaatgctgaccagcagctggtgaagaagggcaagagcaaggtgggggacatgctggagaaggctgctgagctgctgatgagctgcttccgggtgtgtgccagtgacacccgggccggcatcgaggacagcaagaagtggggcatgctgttcctggtgaaccagctgttcaagatctacttcaagatcaacaagctgcacctgtgcaagcccctcatccgggccatcgacagcagcaacctgaaggatgactacagcacagcccagagggtgacctacaagtactacgtgggcaggaaggccatgtttgacagcgacttcaagcaggccgaggagtacctgagctttgcctttgagcactgccacaggagcagccagaagaacaagaggatgatcctgatctacctgctgcctgtgaagatgctgctgggccacatgcccaccgtggagctgctgaagaagtaccacctgatgcagtttgctgaggtgaccagggctgtgtctgagggcaacctgctgctgctgcacgaggccctggccaagcatgaggccttcttcatccgctgtggcatcttcctgatcctggagaagctgaagatcatcacctacagaaacctcttcaagaaggtgtacctgctgctgaagacccaccagctgagcctggatgccttcctggtggccctgaagttcatgcaggtggaggatgtggacattgatgaggtgcagtgcatcctggccaacctgatctacatgggccacgtgaagggctacatcagccaccagcaccagaagctggtggtgtccaagcagaaccccttcccccccctgagcacagtgtgctag

SEQ ID NO: 92611 - DNA, 1200 bp, Artificial Sequence
  derived and/or modified sequence
atgcggctgaccgacgtggtgcagcagctggtgtacgaggccatcgatagccgcgatggcgcatcttgtgcagagctggtgtctttcaaacaccctcatgtggcaaacccgaggttacaaatggcttctcccgaagagaagtgccagcaggtcctggagcctccatacgatgagatgttcgcagcccacctgcgttgtacttacgcagtgggcaaccacgattttattgaggcctacaagtgtcagactgtcatcgtgcaatataccagtttcttgagggcattccaggcacacaaagaggagaattgggcgctgccggtgatgtatgccgtcgcactcgacctcagagtgtttgcaaacaatgcagatcagcagttagtgaagaaaggcaaaagtaaagtaggggacatgctggaaaaagctgccgagttacttatgtcttgtttcagagtgtgcgcaagcgacacccgtgctggtatcgaagactccaagaagtgggggatgctgttcctggtcaaccagctcttcaagatttactttaagattaataaacttcatctctgtaagcccttgattcgagctatcgattcatcaaacctgaaagatgactatagcaccgcccagagggtcacttataaatattacgtgggcaggaaagccatgtttgacagtgattttaagcaggccgaggagtatcttagcttcgcatttgagcattgtcaccggtcctcacaaaagaataagcgtatgatactaatttacttgctgcctgtgaagatgctactgggccatatgcccacggtggaattactgaagaagtatcatttgatgcagtttgcagaagttacccgcgctgtctctgaaggaaacctactcctactgcacgaagcactggctaaacatgaggccttctttattagatgtggcatttttcttattctggagaagctgaagattattacctacagaaatttgttcaaaaaagtttacctgctgctgaaaacacaccaactaagcctggacgcctttcttgttgcacttaagttcatgcaggtagaggacgtggacatcgacgaagttcaatgcattcttgccaacctcatttatatgggccatgtcaagggatacatctctcatcaacatcagaaactcgtggtgtctaagcagaacccctttcctcccctctccacggtgtgttag

SEQ ID NO: 92612 - DNA, 1194 bp, Artificial Sequence
  derived and/or modified sequence
atgcggctgaccgacgtggtgcagcagctggtgtacgaggccatcgattcacgcgatggtgcatcttgcgccgagttagttagctttaaacatcctcatgtggctaaccctcgtctccagatggccagtccggaggagaagtgccagcaggtcctcgaacctccttatgacgagatgttcgcggcccatctccgctgcacctatgcagtgggtaaccatgacttcattgaggcgtataagtgccagacggtcattgtgcaaagtttcctgagagccttccaggcccacaaagaggagaattgggctcttcctgtgatgtacgctgtcgcactcgacctaagagtgtttgccaacaacgccgatcagcagctcgtgaaaaaaggcaaatctaaggtcggggatatgttggaaaaggccgccgagcttttgatgagctgttttagagtttgtgcaagcgatacccgggccggcatcgaggatagcaagaagtgggggatgctttttctggtaaaccaactgtttaagatatattttaagattaacaagttacacttatgcaaacccctcattagggccatcgatagctccaatttgaaagacgattattccacggctcagagagttacttacaagtactatgtaggacggaaagcgatgttcgattccgactttaagcaagcggaagaatatctatcatttgccttcgaacattgtcaccgctcatcacagaaaaataagcgtatgatcctgatttatctgctacctgtgaagatgttactgggccacatgccgaccgtggagctgctcaagaaataccacctgatgcagttcgctgaggtgacgcgcgctgtttcagagggcaatttactgctgcttcacgaggcactagctaaacacgaggctttttttataaggtgtggcatttttcttatattggaaaaactgaaaattataacctataggaacctgtttaagaaagtctatttactgcttaagacacatcaactttcgctggacgcttttctggtggccctgaagtttatgcaggtagaagatgtcgacatcgacgaagtgcagtgtatactagccaatctgatctatatgggccacgtgaaagggtatataagtcatcaacatcagaagctggttgttagcaaacagaacccctttcctccactttccactgtgtgctag

SEQ ID NO: 92613 - DNA, 1584 bp, Artificial Sequence
  derived and/or modified sequence
atgcgtctgacagatgttgttcaacagcttgtgtacgaagccatcgacagcagagatggagcatcttgtgcagagttggtgtcttttaaacatcctcatgttgcaaacccacgacttcaaatggcctctccagaggagaagtgtcaacaagtcttggaacccccttatgatgaaatgtttgcagctcatttaaggtgcacttatgcagtggggaatcatgacttcatagaggcatacaagtgccagaccgtgatagtccaatatacatcattcttgcgagcattccaggcccacaaagaagaaaactgggctctgcctgtcatgtatgcagtagcgcttgaccttcgagtgtttgccaataatgcagatcaacagttggtaaagaaaggaaaaagcaaagttggggacatgttggaaaaagcagcagagttactgatgagctgtttccgggtctgtgccagcgacacccgtgctggtatagaggactctaagaagtggggcatgctgtttctggtgaaccagctgtttaaaatctacttcaagatcaacaaactccatttatgtaaacccctaattagagcaattgacagctcaaacctgaaagacgattacagcactgcacagagagtaacatacaaatactacgttggacgcaaggctatgtttgacagcgattttaagcaagctgaggagtacctgtcatttgcctttgagcattgtcaccgttctagtcagaagaacaaaaggatgattctgatctatttgcttccagtaaaaatgctattgggtcacatgcccactgtggagctcctgaaaaagtatcacctgatgcagtttgcggaagtaaccagagctgtgagcgagggcaacctgctgctgctgcacgaggcgctggcgaagcacgaggccttcttcattcgctgcggaatcttcctcatcctggagaagctgaagatcatcacctacaggaacctctttaagaaagtgtatttgttactgaaaacacaccagctgtctctggatgcttttctggttgccttgaagttcatgcaggtggaggacgtggacattgacgaagttcagtgtattctggctaacttgatatacatgggacacgtcaaaggctacatatcgcatcagcatcagaagctggtggtcagcaagcagaacccatttcctcccctgtccacggtgtgttgaaagtacacggagccccgaggacggactcggctggttctggagtctttgtgagacttctttgaaggaggctttgcgtgaaggctgctcggctcacttttcctaagtgtggttcctgaaggctgtctttgtaactttttgtagttctttgtgtaaaaagcgtattctgaatttatacacatggcatgttcttcattatatcttccaggatacatctatttttatatattaaatttgaatgtgttatcaaaatgcttggttaacttaaggcacctttttaaaagcagaatttaatttgatttaaattttccagattttatagcttgcctgtatggatgctcctcaatttatgatagggttacatcccaataaacttattttatttgc

SEQ ID NO: 92614 - DNA, 2372 bp, Artificial Sequence
  derived and/or modified sequence
gttcggcggcgctcccatggcgcacattaccattaaccagtacctgcagcaggtgggtcctagccggggagcgcgcggcggcgtggttggccctcggcgtgttccgtgtgtcccctcctgccttggaccctcaggccttttcctttcccgcctcgccacccttcttccgttcgggtccccggcgggcagccgcgcgagccgaacagcggcggccgggactcgggaaggcggcccgagttctcccctgcagggccgccgtgggggccgggcggtgtccgtggatcgcggagtcgtcgcggtgtaagtagacgcggcggtcccaggtcgctgccctcacttgctggcacgtgtggccgcgctcccaggcggtccgaagggcctgcgggccacgccgagggcccgctgtgggcggtgctgtgtcggatggacgctgtttcccagcaggatgcgggatgaattcggggactccaggaggcgatggaggagtaagcgcgaggctgtggccgtgctgcaggccgggctcgtgcccctcgtcctcgctgtcgtttaacgcccttcactctccgagcacaatgcacacttcatatcgctcggtacatgcgtctgacagatgttgttcaacagcttgtgtacgaagccatcgacagcagagatggagcatcttgtgcagagttggtgtcttttaaacatcctcatgttgcaaacccacgacttcaaatggcctctccagaggagaagtgtcaacaagtcttggaacccccttatgatgaaatgtttgcagctcatttaaggtgcacttatgcagtggggaatcatgacttcatagaggcatacaagtgccagaccgtgatagtccaatcattcttgcgagcattccaggcccacaaagaagaaaactgggctctgcctgtcatgtatgcagtagcgcttgaccttcgagtgtttgccaataatgcagatcaacagttggtaaagaaaggaaaaagcaaagttggggacatgttggaaaaagcagcagagttactgatgagctgtttccgggtctgtgccagcgacacccgtgctggtatagaggactctaagaagtggggcatgctgtttctggtgaaccagctgtttaaaatctacttcaagatcaacaaactccatttatgtaaacccctaattagagcaattgacagctcaaacctgaaagacgattacagcactgcacagagagtaacatacaaatactacgttggacgcaaggctatgtttgacagcgattttaagcaagctgaggagtacctgtcatttgcctttgagcattgtcaccgttctagtcagaagaacaaaaggatgattctgatctatttgcttccagtaaaaatgctattgggtcacatgcccactgtggagctcctgaaaaagtatcacctgatgcagtttgcggaagtaaccagagctgtgagcgagggcaacctgctgctgctgcacgaggcgctggcgaagcacgaggccttcttcattcgctgcggaatcttcctcatcctggagaagctgaagatcatcacctacaggaacctctttaagaaagtgtatttgttactgaaaacacaccagctgtctctggatgcttttctggttgccttgaagttcatgcaggtggaggacgtggacattgacgaagttcagtgtattctggctaacttgatatacatgggacacgtcaaaggctacatatcgcatcagcatcagaagctggtggtcagcaagcagaacccatttcctcccctgtccacggtgtgttgaaagtacacggagccccgaggacgggtgagcagttgtttctttccactttggttgtgctgatgagaccggtccggtactgcaacaaggctccctgaagccggaactcttggaggcgcttttcccagggatgctgaggctgagattttcagcacacccgagttaatctccttcatttgtaactaatttcagcctgatgaaaacctggaattcctttttcacagactcggctggttctggagtctttgtgagacttctttgaaggaggctttgcgtgaaggctgctcggctcacttttcctaagtgtggttcctgaaggctgtctttgtaactttttgtagttctttgtgtaaaaagcgtattctgaatttatacacatggcatgttcttcattatatcttccaggatacatctatttttatatattaaatttgaatgtgttatcaaaatgcttggttaacttaaggcacctttttaaaagcagaatttaatttgatttaaattttccagattttatagcttgcctgtatggatgctcctcaatttatgatagggttacatcccaataaacttattttatttgc

SEQ ID NO: 92615 - DNA, 1200 bp, Artificial Sequence
  derived and/or modified sequence
atgcgcttaacagatgtagttcagcaattggtgtatgaagccattgacagtcgggacggggcaagttgcgcagaacttgtatcattcaagcaccctcacgtcgctaacccccgactgcagatggcttcgccagaagagaagtgccagcaggtgctcgaacccccttacgacgagatgtttgccgctcacctccggtgtacctatgccgtcgggaatcatgacttcattgaggcttacaagtgccagactgtgatcgtgcagtacaccagcttccttagggcatttcaagctcacaaggaagagaattgggcactaccggtcatgtacgctgtcgctctagaccttcgagtttttgcaaataacgctgatcagcagctcgttaagaaaggtaaaagcaaggtcggagatatgctggaaaaagccgctgaattgctgatgtcatgtttcagggtgtgcgccagcgatacaagggctggcattgaggatagtaagaagtggggcatgctttttctcgtgaatcagctgttcaaaatttattttaaaatcaacaagctgcatctatgcaagcccctcattagggctattgactcctcgaacctgaaggatgattacagcaccgcacagagggtgacatataagtattacgtaggccgaaaggcgatgttcgactccgactttaaacaggcagaagagtatctaagctttgcttttgaacattgccacaggagcagccagaagaacaaacgtatgattttgatttacttgttgcctgtcaagatgctgctggggcatatgcccacagttgaattactaaagaaataccatctgatgcaattcgcagaggtcaccagggctgtcagcgagggtaatctgttactgttgcatgaggccctggccaagcacgaggcattcttcatcagatgtggcatattcctgatcctcgaaaagctcaaaataattacttatcggaatctgtttaagaaggtttacctcttactcaaaacacaccagctgtcactggacgcatttctggtagccttaaagtttatgcaagtcgaggatgttgatatcgacgaggttcagtgtatcctcgctaatctcatctatatgggtcacgtgaaaggatacatatcccatcaacaccagaaactggtcgtatctaagcagaacccattccccccattgtctaccgtgtgctag

SEQ ID NO: 92616 - DNA, 1194 bp, Artificial Sequence
  derived and/or modified sequence
atgagattaaccgacgttgtccaacagctggtctatgaggccattgactctcgcgatggggcttcttgcgctgaactcgtctccttcaaacatccccatgtggctaatccaaggttacagatggcctcaccagaggagaagtgccagcaagtcctggagcctccatacgacgaaatgttcgctgctcacctccgttgtacttacgctgtgggtaaccacgacttcattgaggcttacaagtgccaaaccgtcatagtccagtccttcttgcgcgctttccaggcccacaaagaggaaaattgggctctgcccgtgatgtacgcggtggccctcgacttgagagtgtttgcgaacaacgcggatcagcagttggtcaaaaaaggcaagtccaaagttggtgacatgctggagaaggctgcagagttattgatgtcgtgttttagagtctgtgcctctgacacccgggcaggcattgaggactcaaaaaagtggggcatgttgtttctggtgaatcagctgttcaaaatatatttcaagatcaacaaattgcacctgtgtaagcctctcattagagcgatcgattcgtccaacctgaaggacgattactccacggctcagagggtcacatacaagtattacgttggcagaaaagccatgttcgattctgattttaagcaggcggaagaatacttatcattcgcctttgagcactgccaccgcagctcccagaagaataaacgaatgatcctgatttatctactgccggtaaaaatgctcctagggcacatgccaacagtggagcttctcaagaagtaccaccttatgcagttcgccgaagtgacgagagcagtaagtgaagggaatctgcttcttctgcacgaggcccttgccaagcacgaggcattttttatccggtgcgggattttcctgattctggaaaagctgaaaatcatcacctaccgaaacctgtttaaaaaagtttatctcctgctgaagacccaccagctgtcactcgatgcctttctcgtggccttgaaatttatgcaggttgaggacgtggacatcgacgaggtgcagtgtatcttagccaatctcatatacatgggtcacgtgaaagggtatatcagccaccagcaccagaagttagtcgtttccaaacagaacccctttcctccactctccacggtgtgttag

SEQ ID NO: 92617 - DNA, 1200 bp, Artificial Sequence
  derived and/or modified sequence
atgagactgaccgacgtggtgcagcagctggtgtacgaggccatcgacagcagagacggcgccagctgcgccgagctggtgagcttcaagcacccccacgtggccaaccccagactgcagatggccagccccgaggagaagtgccagcaggtgctggagcccccctacgacgagatgttcgccgcccacctgagatgcacctacgccgtgggcaaccacgacttcatcgaggcctacaagtgccagaccgtgatcgtgcagtacaccagcttcctgagagccttccaggcccacaaggaggagaactgggccctgcccgtgatgtacgccgtggccctggacctgagagtgttcgccaacaacgccgaccagcagctggtgaagaagggcaagagcaaggtgggcgacatgctggagaaggccgccgagctgctgatgagctgcttcagagtgtgcgccagcgacaccagagccggcatcgaggacagcaagaagtggggcatgctgttcctggtgaaccagctgttcaagatctacttcaagatcaacaagctgcacctgtgcaagcccctgatcagagccatcgacagcagcaacctgaaggacgactacagcaccgcccagagagtgacctacaagtactacgtgggcagaaaggccatgttcgacagcgacttcaagcaggccgaggagtacctgagcttcgccttcgagcactgccacagaagcagccagaagaacaagagaatgatcctgatctacctgctgcccgtgaagatgctgctgggccacatgcccaccgtggagctgctgaagaagtaccacctgatgcagttcgccgaggtgaccagagccgtgagcgagggcaacctgctgctgctgcacgaggccctggccaagcacgaggccttcttcatcagatgcggcatcttcctgatcctggagaagctgaagatcatcacctacagaaacctgttcaagaaggtgtacctgctgctgaagacccaccagctgagcctggacgccttcctggtggccctgaagttcatgcaggtggaggacgtggacatcgacgaggtgcagtgcatcctggccaacctgatctacatgggccacgtgaagggctacatcagccaccagcaccagaagctggtggtgagcaagcagaaccccttcccccccctgagcaccgtgtgctag

SEQ ID NO: 92618 - DNA, 1194 bp, Artificial Sequence
  derived and/or modified sequence
atgagactgaccgacgtggtgcagcagctggtgtacgaggccatcgacagcagagacggcgccagctgcgccgagctggtgagcttcaagcacccccacgtggccaaccccagactgcagatggccagccccgaggagaagtgccagcaggtgctggagcccccctacgacgagatgttcgccgcccacctgagatgcacctacgccgtgggcaaccacgacttcatcgaggcctacaagtgccagaccgtgatcgtgcagagcttcctgagagccttccaggcccacaaggaggagaactgggccctgcccgtgatgtacgccgtggccctggacctgagagtgttcgccaacaacgccgaccagcagctggtgaagaagggcaagagcaaggtgggcgacatgctggagaaggccgccgagctgctgatgagctgcttcagagtgtgcgccagcgacaccagagccggcatcgaggacagcaagaagtggggcatgctgttcctggtgaaccagctgttcaagatctacttcaagatcaacaagctgcacctgtgcaagcccctgatcagagccatcgacagcagcaacctgaaggacgactacagcaccgcccagagagtgacctacaagtactacgtgggcagaaaggccatgttcgacagcgacttcaagcaggccgaggagtacctgagcttcgccttcgagcactgccacagaagcagccagaagaacaagagaatgatcctgatctacctgctgcccgtgaagatgctgctgggccacatgcccaccgtggagctgctgaagaagtaccacctgatgcagttcgccgaggtgaccagagccgtgagcgagggcaacctgctgctgctgcacgaggccctggccaagcacgaggccttcttcatcagatgcggcatcttcctgatcctggagaagctgaagatcatcacctacagaaacctgttcaagaaggtgtacctgctgctgaagacccaccagctgagcctggacgccttcctggtggccctgaagttcatgcaggtggaggacgtggacatcgacgaggtgcagtgcatcctggccaacctgatctacatgggccacgtgaagggctacatcagccaccagcaccagaagctggtggtgagcaagcagaaccccttcccccccctgagcaccgtgtgctag

SEQ ID NO: 92619 - DNA, 774 bp, Artificial Sequence
  derived and/or modified sequence
atgtcacgcccactaattacccgatccccagcctcacccctcaacaatcaggggatacctacccccgctcagctcactaagtccaacgcaccagtgcacatcgatgtagggggccacatgtatacatccagtctcgcgacactgacaaagtatccagagtcacggatcggccgcctctttgacggaaccgaaccgatcgtactggactccctcaaacagcactattttatcgacagggatggtcagatgttccgctatattctcaatttcctgaggacctcgaagcttctaattccggatgactttaaggactatacacttctgtacgaggaagctaaatacttccagctccaacctatgctgctggagatggagaggtggaaacaggaccgtgagaccggccgcttttctcggccctgcgaatgtcttgtggtgagagtcgcgcccgacctgggggaacgtattaccctgagcggtgataagtctctgattgaggaagtgttcccagaaatcggggacgtgatgtgcaatagtgtgaatgccggttggaatcacgactcaacccacgtgattcgtttccccctcaatggctattgtcaccttaactctgtccaggtcctggagagactgcagcagcgcggtttcgaaatagtcggaagctgcggcggtggagttgattcctcacaattttctgaatatgtgcttcggagggagctgagaaggacccctcgggtcccctctgttatccggatcaaacaagaaccgctcgactag

SEQ ID NO: 92620 - DNA, 774 bp, Artificial Sequence
  derived and/or modified sequence
atgtcgaggcccctgatcacaagaagcccagcgtcaccacttaataaccaaggtatccccacccccgcccaactgactaagtcaaacgccccggttcatatagatgtggggggacacatgtacacctccagtcttgccaccttgaccaagtaccccgaatcaaggattgggaggctgtttgatgggacagaaccaatcgtgctcgacagtctgaagcagcactatttcattgatcgcgatggccagatgttccggtatattttgaatttcctgcggacttcaaagctgttgattcctgacgactttaaggattatacactgctttacgaagaagccaagtacttccagctgcagccaatgcttctggagatggagcggtggaaacaagaccgggagactggccgtttctctcggccttgcgagtgtctggtagtccgtgtggcaccggacctcggcgagcggataacactgtcaggagataagagccttatagaagaggtatttcccgagatcggcgacgttatgtgcaattcagtcaatgctgggtggaatcatgattccactcacgttattaggttcccacttaacggatactgtcacctaaacagcgtgcaggttctggaacgccttcaacaacggggattcgaaatcgtgggtagctgtgggggcggggtcgacagttcccagttctcagagtacgtgttgcggcgggaactgagaagaacgcctcgtgtgccgtctgtgattcgtatcaaacaagaacccttggattag

SEQ ID NO: 92621 - DNA, 774 bp, Artificial Sequence
  derived and/or modified sequence
atgagccggccccttattacaagaagtccagcatctcctcttaacaaccaagggattcccactcccgctcagctgactaagtcaaatgctcccgttcacatcgatgtggggggtcacatgtatacaagcagcctggccacgcttacaaagtaccctgagtctcggattggccggctgtttgacggcaccgagcctatcgtcttggactccctgaagcagcattattttattgacagagacggtcagatgtttcggtacattcttaactttttgcggactagcaaactgctgattcccgacgactttaaggattatacgctcctgtatgaagaagcgaagtatttccagttgcagcccatgctgctggaaatggagcgctggaaacaggaccgggaaactggacgcttcagccgcccctgtgagtgtttggtggtgcgcgtggccccagacctgggtgagcgaatcactctgtccggggacaagtctttaatcgaagaggtgttccccgagataggagatgtgatgtgtaactcagtcaatgcgggatggaatcacgacagcacgcacgtgatccggttcccactcaatgggtattgtcatctgaatagcgttcaagtgcttgaacgactgcagcagcggggatttgaaattgtcggcagttgcggcggtggagtcgactcctctcaattttccgaatatgtgctgcgcagagagctgaggagaacccccagagtgccttctgtcattcgcattaaacaggaaccactggactag

SEQ ID NO: 92622 - DNA, 774 bp, Artificial Sequence
  derived and/or modified sequence
atgagccggcccctcatcaccaggagccctgccagccccctgaacaaccagggcatccccaccccagcccagctgaccaagagcaatgcccctgtgcacattgatgtgggcggccacatgtacaccagcagcctggccaccctgaccaagtacccagagagccgcatcggccgcctgtttgatggaacagagcccatcgtgctggacagcctgaagcagcactacttcatcgacagagatggccagatgttccgctacatcctgaacttcctgcggaccagcaagctgctgatcccagatgacttcaaggactacaccctgctgtatgaggaggccaagtacttccagctgcagcccatgctgctggagatggagcgctggaagcaggaccgggagaccggccgcttcagccggccctgtgaatgtctggtggtgcgggtggccccagacctgggggagcgcatcaccctgagcggggacaagagcctcatcgaggaggtgtttcctgagattggagatgtgatgtgcaacagcgtgaatgccggctggaaccacgacagcacccacgtgatccgcttccccctgaatggctactgccacctgaacagcgtgcaggtgctggagcggctgcagcagaggggctttgaaattgtgggcagctgtggcggcggcgtggacagcagccagttctctgaatatgtgctgcggcgggagctgcggaggaccccccgggtgcccagcgtcatccgcatcaagcaggagcccctggactag

SEQ ID NO: 92623 - DNA, 774 bp, Artificial Sequence
  derived and/or modified sequence
atgagccggcccctgatcacccggagccccgccagccccctgaacaatcagggcatcccaactcccgcccaactgactaagtcaaacgctccggttcacattgacgtcggtggacacatgtacacgagttctctcgcgacgctcacaaaataccctgagtcgaggatcgggagactttttgacggcaccgaacctattgtcctcgattctcttaaacagcattatttcatcgacagagatggtcaaatgttcaggtatattctaaactttctaaggacctcaaaactactcatcccagatgatttcaaggactatacactcctctatgaagaggcgaagtactttcaactgcagcctatgctgttggagatggaaagatggaaacaagatagagagacaggacgattttcccggccgtgtgagtgtctcgtcgtgcgagttgcccccgacctcggagagcgtattactttgtccggtgataagagtctgatcgaggaagtgttcccagagatcggtgatgttatgtgcaatagcgtgaatgctggctggaatcacgacagtacgcatgttattcgattccccctgaatggttactgtcatttgaacagcgtgcaggtcctcgagcgcctgcagcagcggggttttgagatcgtggggagttgcggcggcggcgtagactcttcacaatttagcgaatatgtactacgccgggaattgaggaggacgccacgtgtcccgagtgtgatccgtatcaaacaagagcctcttgattag

SEQ ID NO: 92624 - DNA, 774 bp, Artificial Sequence
  derived and/or modified sequence
atgagccggcccctgatcacccggagccccgccagccccctgaacaaccagggcatccctacacctgcccaactgactaaatcaaacgcacctgtccacatcgacgtcggcggacatatgtacacaagctccctggccactctgaccaagtaccccgagagtcgaattgggagattattcgacggaaccgagcctattgtgctggattccttgaaacagcattacttcatagatagagacgggcagatgttccgctacattctcaattttctgcggacgtctaagctcctgatccctgacgattttaaggactatactctgctgtatgaagaagctaagtacttccaactccagcctatgttactggaaatggaacgctggaaacaagatcgggaaacaggccgtttctcacggccatgcgagtgcttagtcgtccgcgtcgctcctgatcttggcgagcggatcacgctgtcaggagacaaaagcctgattgaggaggtgttccctgagatcggcgatgtgatgtgtaactcagtgaacgcgggctggaatcatgattctacccacgtaatcagatttcctctaaacggctactgtcatctcaattctgttcaggtcctcgaaaggcttcagcagcgaggatttgagattgtcggcagttgcgggggtggcgtcgattcatcccagttctccgagtacgtgctacgtcgagaactgcggcggaccccaagggtgcctagcgtgatacgcattaagcaagagccgcttgattag

SEQ ID NO: 92625 - DNA, 774 bp, Artificial Sequence
  derived and/or modified sequence
atgagccggcccctgatcacccggagccccgccagccccctgaacaaccaggggattcccacgcctgcccagctgacaaaatctaacgcgcccgtgcatatcgacgtgggggggcatatgtacacgtcaagccttgctacgctcacaaagtatcccgagagcagaattggtcgcctctttgatggtaccgaacccatcgtactggactctctgaaacaacactactttattgatcgggacgggcagatgttcaggtatattctaaattttctccggaccagtaagctcctgattcctgatgactttaaggactataccttattgtatgaagaagctaaatatttccaattgcagcctatgctgttggagatggaacggtggaaacaggatcgcgaaaccggccgtttcagtaggccctgtgagtgtcttgtcgtgagggtggcacccgatctgggggagcgcataaccctgtccggagacaagagcctgatcgaagaggttttcccagagatcggtgacgttatgtgcaactccgtgaatgcgggctggaatcacgatagcacacacgtcataaggttccccctcaacggatattgccacttaaattccgttcaggttttagaaagactgcagcagcgcggttttgagattgtcggttcctgcgggggcggtgtggacagcagccagttttccgagtacgtgctgcgccgggagctgaggagaacaccaagagttcccagtgtaattagaatcaaacaggaacctttagattag

SEQ ID NO: 92626 - DNA, 774 bp, Artificial Sequence
  derived and/or modified sequence
atgtcgcgccctctgattactagatctccggcatcccctctaaataatcaaggcattccaacaccagcccagctgacgaaatccaatgccccagttcatatcgatgttggtggacacatgtacacttcatcactggcaacactgacgaaataccccgaatcccgtattgggcgtctgttcgacgggacagaaccaattgtcctggatagcttgaagcaacattacttcatcgaccgcgacggtcagatgtttcgctacatcttaaactttctcaggactagcaagctactcattccggacgacttcaaggactatacccttctgtacgaggaggcaaaatattttcagctgcaacccatgctcctggaaatggagcgatggaaacaggatagagaaacagggcgattcagccggccttgcgagtgcctggtcgttcgggtcgctcctgatcttggggagcgaattactctgagcggggacaaaagtttgatcgaagaagtatttcccgagataggggatgtgatgtgcaactcagtcaacgctggctggaatcacgacagtacccacgtgattcggtttcccctgaacggctactgtcaccttaattctgttcaggtacttgagcgcctgcaacagcggggttttgagatcgtcggatcttgcggtggaggcgtcgattcctctcaattttccgaatacgttctgcgcagagaactgagaaggactccaagagtgccttctgtgattcgcatcaagcaggaaccactggattag

SEQ ID NO: 92627 - DNA, 774 bp, Artificial Sequence
  derived and/or modified sequence
atgtccaggccactgatcactcggtcaccggcatcccctttgaataatcagggaattcccacccctgcacagctgactaagtccaatgccccagtgcatatagacgtgggaggccacatgtacacatcctccctggccactttaacaaagtatcccgaatcccgaatcggaaggttgttcgacggcactgaacccattgtgctggattctctgaaacagcactactttatcgatcgcgatggccagatgttccgctacattctcaacttcctgagaacaagcaagctgcttattcccgatgatttcaaagactacaccctgctttacgaggaggctaagtacttccagctgcagcctatgctcttggagatggagagatggaagcaggacagagaaaccgggcgattcagcagaccgtgtgagtgtctggtggtaagagtggctcccgacctgggcgagcgcattaccttgtctggcgacaaatccctgatcgaggaggtttttccggaaatcggggacgttatgtgtaactccgtcaatgctgggtggaatcatgattcgactcacgtgatcagattccctctcaatggctactgccatctcaatagtgtccaggttcttgagagattacagcagaggggtttcgaaatcgttggctcctgtgggggaggtgtagattcctctcagttttcagagtacgtgttaagaagagaacttaggcggacacctagggtaccttccgttattcgtataaaacaagaaccactggattag

SEQ ID NO: 92628 - DNA, 774 bp, Artificial Sequence
  derived and/or modified sequence
atgtctcggcctctgatcaccagaagccccgcatcaccgttgaataaccaaggcatacccactcccgcacagctgacaaaatccaatgcacctgttcatatagatgtgggaggacacatgtacacatccagccttgccactttgaccaagtatcccgaaagccgcatcggaagactattcgatggaacagagcccatcgtgcttgatagtttaaagcaacactactttatagatagagatgggcagatgttcagatatatcctaaactttctgcggacctctaaattactcatccctgatgacttcaaagattataccttactctatgaggaggcaaagtacttccaacttcaacctatgttgcttgaaatggagcgatggaaacaggatagagagacaggacgtttttcaaggccctgtgagtgcctggtcgttcgggtagcccctgacctgggagagcggatcactttatctggagataagtcactgatcgaggaggtgttccccgagataggggacgtcatgtgtaattctgtaaacgccggttggaaccacgattcaacccatgtcatcagattcccattgaatggctattgccacctaaactccgttcaggtcctggagcggctgcaacagaggggcttcgagattgtcgggagctgtggagggggagtggactccagtcagtttagtgaatatgtcctgcggcgagaactcagaagaacaccacgcgtgccttcagtgataaggataaagcaggaacccctggactag

SEQ ID NO: 92629 - DNA, 774 bp, Artificial Sequence
  derived and/or modified sequence
atgagcagacccctgatcaccagaagccccgccagccccctgaacaaccagggcatccccacccccgcccagctgaccaagagcaacgcccccgtgcacatcgacgtgggcggccacatgtacaccagcagcctggccaccctgaccaagtaccccgagagcagaatcggcagactgttcgacggcaccgagcccatcgtgctggacagcctgaagcagcactacttcatcgacagagacggccagatgttcagatacatcctgaacttcctgagaaccagcaagctgctgatccccgacgacttcaaggactacaccctgctgtacgaggaggccaagtacttccagctgcagcccatgctgctggagatggagagatggaagcaggacagagagaccggcagattcagcagaccctgcgagtgcctggtggtgagagtggcccccgacctgggcgagagaatcaccctgagcggcgacaagagcctgatcgaggaggtgttccccgagatcggcgacgtgatgtgcaacagcgtgaacgccggctggaaccacgacagcacccacgtgatcagattccccctgaacggctactgccacctgaacagcgtgcaggtgctggagagactgcagcagagaggcttcgagatcgtgggcagctgcggcggcggcgtggacagcagccagttcagcgagtacgtgctgagaagagagctgagaagaacccccagagtgcccagcgtgatcagaatcaagcaggagcccctggactag

SEQ ID NO: 92630 - DNA, 1718 bp, Artificial Sequence
  derived and/or modified sequence
tacagctcccgtcactagctttttctcctcaagcctgcactgcacaccaactgggacggagggtgcagatgaataaaggcaaatccatcaccaaaagacagtcggcccaatatgtcaagacctctgatcactagatcccctgcatctccactgaacaaccaaggcatccctactccagcacaactcacaaaatccaatgcgcctgtccacattgatgtgggcggccacatgtacaccagcagcctggccaccctcaccaaataccctgaatccagaatcggaagactttttgatggtacagagcccattgttttggacagtctcaaacagcactatttcattgacagagatggacagatgttcagatatatcttgaattttctacgaacatccaaactcctcattcctgatgatttcaaggactacactttgttatatgaagaggcaaaatattttcagcttcagcccatgttgttggagatggaaagatggaagcaggacagagaaactggtcgattttcaaggccctgtgagtgcctcgtcgtgcgtgtggccccagacctcggagaaaggatcacgctaagcggtgacaaatccttgatagaagaagtatttccagagatcggcgacgtgatgtgtaactctgtcaatgcaggctggaatcacgactcgacgcacgtcatcaggtttccactaaatggctactgtcacctcaactcagtccaggtcctcgagaggttgcagcaaagaggatttgaaatcgtgggctcctgtgggggaggagtagactcgtcccagttcagcgaatacgtccttcggcgggaactgaggcggacgccccgtgtaccctccgtcatccggataaagcaagagcctctggactaaatggacatatttcttatgcaaaaaggaaaacacacacaaccaataactcaaacaaaaaagggacatttatgtgcagttgggacagcaaaccaagtcctggacgtaaaatcgaataaaagacacatttatatccaatagagaccacacctgtattcatatgggaacaattggaatagtgatatcctcaaggtgtaaaaaatatataaatatatatatatatgtcaaaaggtaggaaatgcaaaaaagaaaaaaaaaaaaggtgacagccgcagttggtgctgtgatggccgtgaagtgtcctgggccttccgaggcctctgacaaataaacaagccatgagtggtgaggacacagtctccttacagtttccattgccaacaacagccatccatatttcttttttcctttgtctttctttttcctttttttttaaaaaaacaaaacaaacaaaacaccttgaatcaagtttgtttgtatatggaggttccacgtctttctttaggcagggaccaggcaggacttcagaaaaaccctcatgagcacattgcaaagatgttagacatgaaattttaaatgtagtttgtacagaagtcacacttttttgtccacctcacagatgtgaactttactttgttttaaaactgatcagttttgccaaggggccagaattattccttgttagaattgctccagttcaagtctgctgctttcctacaatttttcaaattttataatgtattaaatacaataaactctgtttaaaaaataaggtctgtgtgaaacacacatgtgggggtgaggctggattaaagtgaaattttttctttttgaaa

SEQ ID NO: 92631 - DNA, 2164 bp, Artificial Sequence
  derived and/or modified sequence
ctggaccggcgcggacttgccccagacctacggggagcgccccaggtctttaatgacagcttaaatgtggctgttggaaaagtcgaaagggatgtggctgacgtggggcgtgtttcgctcctttgcaagagtcggaaagggagttgggagccgcgcggctggccccaggcccccgcgcctcgccgccagcaagtaggtgggggagccgccgccgccgccagccccatcccgctcccaagcctcgcccgctgcgccctggccgcgggcgccgagagggtgcggggcctcgccgtgcctcctccaccctgctcattaacctgcctgctccgctccgctccgggcggccccagacacgggtttcccgcggcagcacccgcggcccgcccggcgcagccgccgccccgaccccccggctccggggggcaatgagggggcagtggaaggggcactgctcctcgggcattacttagagaaacgagaccgtcccgccctctcgccggccctccctctctcccgcccgggcccgcgcaattctccgccagagggacagtcggcccaatatgtcaagacctctgatcactagatcccctgcatctccactgaacaaccaaggcatccctactccagcacaactcacaaaatccaatgcgcctgtccacattgatgtgggcggccacatgtacaccagcagcctggccaccctcaccaaataccctgaatccagaatcggaagactttttgatggtacagagcccattgttttggacagtctcaaacagcactatttcattgacagagatggacagatgttcagatatatcttgaattttctacgaacatccaaactcctcattcctgatgatttcaaggactacactttgttatatgaagaggcaaaatattttcagcttcagcccatgttgttggagatggaaagatggaagcaggacagagaaactggtcgattttcaaggccctgtgagtgcctcgtcgtgcgtgtggccccagacctcggagaaaggatcacgctaagcggtgacaaatccttgatagaagaagtatttccagagatcggcgacgtgatgtgtaactctgtcaatgcaggctggaatcacgactcgacgcacgtcatcaggtttccactaaatggctactgtcacctcaactcagtccaggtcctcgagaggttgcagcaaagaggatttgaaatcgtgggctcctgtgggggaggagtagactcgtcccagttcagcgaatacgtccttcggcgggaactgaggcggacgccccgtgtaccctccgtcatccggataaagcaagagcctctggactaaatggacatatttcttatgcaaaaaggaaaacacacacaaccaataactcaaacaaaaaagggacatttatgtgcagttgggacagcaaaccaagtcctggacgtaaaatcgaataaaagacacatttatatccaatagagaccacacctgtattcatatgggaacaattggaatagtgatatcctcaaggtgtaaaaaatatataaatatatatatatatgtcaaaaggtaggaaatgcaaaaaagaaaaaaaaaaaaggtgacagccgcagttggtgctgtgatggccgtgaagtgtcctgggccttccgaggcctctgacaaataaacaagccatgagtggtgaggacacagtctccttacagtttccattgccaacaacagccatccatatttcttttttcctttgtctttctttttcctttttttttaaaaaaacaaaacaaacaaaacaccttgaatcaagtttgtttgtatatggaggttccacgtctttctttaggcagggaccaggcaggacttcagaaaaaccctcatgagcacattgcaaagatgttagacatgaaattttaaatgtagtttgtacagaagtcacacttttttgtccacctcacagatgtgaactttactttgttttaaaactgatcagttttgccaaggggccagaattattccttgttagaattgctccagttcaagtctgctgctttcctacaatttttcaaattttataatgtattaaatacaataaactctgtttaaaaaataaggtctgtgtgaaacacacatgtgggggtgaggctggattaaagtgaaattttttctttttg

SEQ ID NO: 92632 - DNA, 1747 bp, Artificial Sequence
  derived and/or modified sequence
ccaccacctgcctcaccagtagctgggactacagctcccgtcactagctttttctcctcaagcctgcactgcacaccaactgggacggagggtgcagatgaataaaggcaaatccatcaccaaaagacagtcggcccaatatgtcaagacctctgatcactagatcccctgcatctccactgaacaaccaaggcatccctactccagcacaactcacaaaatccaatgcgcctgtccacattgatgtgggcggccacatgtacaccagcagcctggccaccctcaccaaataccctgaatccagaatcggaagactttttgatggtacagagcccattgttttggacagtctcaaacagcactatttcattgacagagatggacagatgttcagatatatcttgaattttctacgaacatccaaactcctcattcctgatgatttcaaggactacactttgttatatgaagaggcaaaatattttcagcttcagcccatgttgttggagatggaaagatggaagcaggacagagaaactggtcgattttcaaggccctgtgagtgcctcgtcgtgcgtgtggccccagacctcggagaaaggatcacgctaagcggtgacaaatccttgatagaagaagtatttccagagatcggcgacgtgatgtgtaactctgtcaatgcaggctggaatcacgactcgacgcacgtcatcaggtttccactaaatggctactgtcacctcaactcagtccaggtcctcgagaggttgcagcaaagaggatttgaaatcgtgggctcctgtgggggaggagtagactcgtcccagttcagcgaatacgtccttcggcgggaactgaggcggacgccccgtgtaccctccgtcatccggataaagcaagagcctctggactaaatggacatatttcttatgcaaaaaggaaaacacacacaaccaataactcaaacaaaaaagggacatttatgtgcagttgggacagcaaaccaagtcctggacgtaaaatcgaataaaagacacatttatatccaatagagaccacacctgtattcatatgggaacaattggaatagtgatatcctcaaggtgtaaaaaatatataaatatatatatatatgtcaaaaggtaggaaatgcaaaaaagaaaaaaaaaaaaggtgacagccgcagttggtgctgtgatggccgtgaagtgtcctgggccttccgaggcctctgacaaataaacaagccatgagtggtgaggacacagtctccttacagtttccattgccaacaacagccatccatatttcttttttcctttgtctttctttttcctttttttttaaaaaaacaaaacaaacaaaacaccttgaatcaagtttgtttgtatatggaggttccacgtctttctttaggcagggaccaggcaggacttcagaaaaaccctcatgagcacattgcaaagatgttagacatgaaattttaaatgtagtttgtacagaagtcacacttttttgtccacctcacagatgtgaactttactttgttttaaaactgatcagttttgccaaggggccagaattattccttgttagaattgctccagttcaagtctgctgctttcctacaatttttcaaattttataatgtattaaatacaataaactctgtttaaaaaataaggtctgtgtgaaacacacatgtgggggtgaggctggattaaagtgaaattttttctttttgaaa

SEQ ID NO: 92633 - protein, 1392 aa, Artificial Sequence
  derived and/or modified sequence
MKSCAVSLTTAAVAFGDEAKKMAEGKASRESEEESVSLTVEEREALGGMDSRLFGFVRLHEDGARTKTLLGKAVRCYESLILKAEGKVESDFFCQLGHFNLLLEDYSKALSAYQRYYSLQADYWKNAAFLYGLGLVYFYYNAFHWAIKAFQDVLYVDPSFCRAKEIHLRLGLMFKVNTDYKSSLKHFQLALIDCNPCTLSNAEIQFHIAHLYETQRKYHSAKEAYEQLLQTENLPAQVKATVLQQLGWMHHNMDLVGDKATKESYAIQYLQKSLEADPNSGQSWYFLGRCYSSIGKVQDAFISYRQSIDKSEASADTWCSIGVLYQQQNQPMDALQAYICAVQLDHGHAAAWMDLGTLYESCNQPQDAIKCYLNAARSKRCSNTSTLAARIKFLQAQLCNLPQSSLQNKTKLLPSIEEAWSLPIPAELTSRQGAMNTAQQNGSDNWNGGQSLSHHPVQQVYSLCLTPQKLQHLEQLRANRDNLNPAQKHQLEQLESQFVLMQQMRHKEVAQVRTTGIHNGAITDSSLPTNSVSNRQPHGALTRVSSVSQPGVRPACVEKLLSSGAFSAGCIPCGTSKILGSTDTILLGSNCIAGSESNGNVPYLQQNTHTLPHNHTDLNSSTEEPWRKQLSNSAQGLHKSQSSCLSGPNEEQPLFSTGSAQYHQATSTGIKKANEHLTLPSNSVPQGDADSHLSCHTATSGGQQGIMFTKESKPSKNRSLVPETSRHTGDTSNGCADVKGLSNHVHQLIADAVSSPNHGDSPNLLIADNPQLSALLIGKANGNVGTGTCDKVNNIHPAVHTKTDHSVASSPSSAISTATPSPKSTEQRSINSVTSLNSPHSGLHTVNGEGLGKSQSSTKVDLPLASHRSTSQILPSMSVSICPSSTEVLKACRNPGKNGLSNSCILLDKCPPPRPPTSPYPPLPKDKLNPPTPSIYLENKRDAFFPPLHQFCTNPKNPVTVIRGLAGALKLDLGLFSTKTLVEANNEHMVEVRTQLLQPADENWDPTGTKKIWRCESNRSHTTIAKYAQYQASSFQESLREENEKRTQHKDHSDNESTSSENSGRRRKGPFKTIKFGTNIDLSDNKKWKLQLHELTKLPAFARVVSAGNLLTHVGHTILGMNTVQLYMKVPGSRTPGHQENNNFCSVNINIGPGDCEWFVVPEDYWGVLNDFCEKNNLNFLMSSWWPNLEDLYEANVPVYRFIQRPGDLVWINAGTVHWVQAVGWCNNIAWNVGPLTACQYKLAVERYEWNKLKSVKSPVPMVHLSWNMARNIKVSDPKLFEMIKYCLLKILKQYQTLREALVAAGKEVIWHGRTNDEPAHYCSICEVEVFNLLFVTNESNTQKTYIVHCHDCARKTSKSLENFVVLEQYKMEDLIQVYDQFTLALSLSSSS

SEQ ID NO: 92634 - protein, 1211 aa, Artificial Sequence
  derived and/or modified sequence
MKSCAVSLTTAAVAFGDEAKKMAEGKASRESEEESVSLTVEEREALGGMDSRLFGFVRLHEDGARTKTLLGKAVRCYESLILKAEGKVESDFFCQLGHFNLLLEDYSKALSAYQRYYSLQADYWKNAAFLYGLGLVYFYYNAFHWAIKAFQDVLYVDPSFCRAKEIHLRLGLMFKVNTDYKSSLKHFQLALIDCNPCTLSNAEIQFHIAHLYETQRKYHSAKEAYEQLLQTENLPAQVKATVLQQLGWMHHNMDLVGDKATKESYAIQYLQKSLEADPNSGQSWYFLGRCYSSIGKVQDAFISYRQSIDKSEASADTWCSIGVLYQQQNQPMDALQAYICAVQLDHGHAAAWMDLGTLYESCNQPQDAIKCYLNAARSKRCSNTSTLAARIKFLQAQLCNLPQSSLQNKTKLLPSIEEAWSLPIPAELTSRQGAMNTAQQNGSDNWNGGQSLSHHPVQQVYSLCLTPQKLQHLEQLRANRDNLNPAQKHQLEQLESQFVLMQQMRHKEVAQGLHKSQSSCLSGPNEEQPLFSTGSAQYHQATSTGIKKANEHLTLPSNSVPQGDADSHLSCHTATSGGQQGIMFTKESKPSKNRSLVPETSRHTGDTSNGCADVKGLSNHVHQLIADAVSSPNHGDSPNLLIADNPQLSALLIGKANGNVGTGTCDKVNNIHPAVHTKTDHSVASSPSSAISTATPSPKSTEQRSINSVTSLNSPHSGLHTVNGEGLGKSQSSTKVDLPLASHRSTSQILPSMSVSICPSSTEVLKACRNPGKNGLSNSCILLDKCPPPRPPTSPYPPLPKDKLNPPTPSIYLENKRDAFFPPLHQFCTNPKNPVTVIRGLAGALKLDLGLFSTKTLVEANNEHMVEVRTQLLQPADENWDPTGTKKIWRCESNRSHTTIAKYAQYQASSFQESLREENEKRTQHKDHSDNESTSSENSGRRRKGPFKTIKFGTNIDLSDNKKWKLQLHELTKLPAFARVVSAGNLLTHVGHTILGMNTVQLYMKVPGSRTPGHQENNNFCSVNINIGPGDCEWFVVPEDYWGVLNDFCEKNNLNFLMSSWWPNLEDLYEANVPVYRFIQRPGDLVWINAGTVHWVQAVGWCNNIAWNVGPLTACQYKLAVERYEWNKLKSVKSPVPMVHLSWNMARNIKVSDPKLFEMIKYCLLKILKQYQTLREALVAAGKEVIWHGRTNDEPAHYCSICEALSLSSSS

SEQ ID NO: 92635 - DNA, 3636 bp, Artificial Sequence
  derived and/or modified sequence
atgaagagctgcgccgtgagcctgaccaccgccgccgtggccttcggcgacgaggccaagaagatggccgagggcaaggccagcagagagagcgaggaggagagcgtgagcctgaccgtggaggagagagaggccctgggcggcatggacagcagactgttcggcttcgtgagactgcacgaggacggcgccagaaccaagaccctgctgggcaaggccgtgagatgctacgagagcctgatcctgaaggccgagggcaaggtggagagcgacttcttctgccagctgggccacttcaacctgctgctggaggactacagcaaggccctgagcgcctaccagagatactacagcctgcaggccgactactggaagaacgccgccttcctgtacggcctgggcctggtgtacttctactacaacgccttccactgggccatcaaggccttccaggacgtgctgtacgtggaccccagcttctgcagagccaaggagatccacctgagactgggcctgatgttcaaggtgaacaccgactacaagagcagcctgaagcacttccagctggccctgatcgactgcaacccctgcaccctgagcaacgccgagatccagttccacatcgcccacctgtacgagacccagagaaagtaccacagcgccaaggaggcctacgagcagctgctgcagaccgagaacctgcccgcccaggtgaaggccaccgtgctgcagcagctgggctggatgcaccacaacatggacctggtgggcgacaaggccaccaaggagagctacgccatccagtacctgcagaagagcctggaggccgaccccaacagcggccagagctggtacttcctgggcagatgctacagcagcatcggcaaggtgcaggacgccttcatcagctacagacagagcatcgacaagagcgaggccagcgccgacacctggtgcagcatcggcgtgctgtaccagcagcagaaccagcccatggacgccctgcaggcctacatctgcgccgtgcagctggaccacggccacgccgccgcctggatggacctgggcaccctgtacgagagctgcaaccagccccaggacgccatcaagtgctacctgaacgccgccagaagcaagagatgcagcaacaccagcaccctggccgccagaatcaagttcctgcaggcccagctgtgcaacctgccccagagcagcctgcagaacaagaccaagctgctgcccagcatcgaggaggcctggagcctgcccatccccgccgagctgaccagcagacagggcgccatgaacaccgcccagcagaacggcagcgacaactggaacggcggccagagcctgagccaccaccccgtgcagcaggtgtacagcctgtgcctgaccccccagaagctgcagcacctggagcagctgagagccaacagagacaacctgaaccccgcccagaagcaccagctggagcagctggagagccagttcgtgctgatgcagcagatgagacacaaggaggtggcccagggcctgcacaagagccagagcagctgcctgagcggccccaacgaggagcagcccctgttcagcaccggcagcgcccagtaccaccaggccaccagcaccggcatcaagaaggccaacgagcacctgaccctgcccagcaacagcgtgccccagggcgacgccgacagccacctgagctgccacaccgccaccagcggcggccagcagggcatcatgttcaccaaggagagcaagcccagcaagaacagaagcctggtgcccgagaccagcagacacaccggcgacaccagcaacggctgcgccgacgtgaagggcctgagcaaccacgtgcaccagctgatcgccgacgccgtgagcagccccaaccacggcgacagccccaacctgctgatcgccgacaacccccagctgagcgccctgctgatcggcaaggccaacggcaacgtgggcaccggcacctgcgacaaggtgaacaacatccaccccgccgtgcacaccaagaccgaccacagcgtggccagcagccccagcagcgccatcagcaccgccacccccagccccaagagcaccgagcagagaagcatcaacagcgtgaccagcctgaacagcccccacagcggcctgcacaccgtgaacggcgagggcctgggcaagagccagagcagcaccaaggtggacctgcccctggccagccacagaagcaccagccagatcctgcccagcatgagcgtgagcatctgccccagcagcaccgaggtgctgaaggcctgcagaaaccccggcaagaacggcctgagcaacagctgcatcctgctggacaagtgccccccccccagaccccccaccagcccctacccccccctgcccaaggacaagctgaacccccccacccccagcatctacctggagaacaagagagacgccttcttcccccccctgcaccagttctgcaccaaccccaagaaccccgtgaccgtgatcagaggcctggccggcgccctgaagctggacctgggcctgttcagcaccaagaccctggtggaggccaacaacgagcacatggtggaggtgagaacccagctgctgcagcccgccgacgagaactgggaccccaccggcaccaagaagatctggagatgcgagagcaacagaagccacaccaccatcgccaagtacgcccagtaccaggccagcagcttccaggagagcctgagagaggagaacgagaagagaacccagcacaaggaccacagcgacaacgagagcaccagcagcgagaacagcggcagaagaagaaagggccccttcaagaccatcaagttcggcaccaacatcgacctgagcgacaacaagaagtggaagctgcagctgcacgagctgaccaagctgcccgccttcgccagagtggtgagcgccggcaacctgctgacccacgtgggccacaccatcctgggcatgaacaccgtgcagctgtacatgaaggtgcccggcagcagaacccccggccaccaggagaacaacaacttctgcagcgtgaacatcaacatcggccccggcgactgcgagtggttcgtggtgcccgaggactactggggcgtgctgaacgacttctgcgagaagaacaacctgaacttcctgatgagcagctggtggcccaacctggaggacctgtacgaggccaacgtgcccgtgtacagattcatccagagacccggcgacctggtgtggatcaacgccggcaccgtgcactgggtgcaggccgtgggctggtgcaacaacatcgcctggaacgtgggccccctgaccgcctgccagtacaagctggccgtggagagatacgagtggaacaagctgaagagcgtgaagagccccgtgcccatggtgcacctgagctggaacatggccagaaacatcaaggtgagcgaccccaagctgttcgagatgatcaagtactgcctgctgaagatcctgaagcagtaccagaccctgagagaggccctggtggccgccggcaaggaggtgatctggcacggcagaaccaacgacgagcccgcccactactgcagcatctgcgaggccctgagcctgagcagcagcagctag

SEQ ID NO: 92636 - DNA, 3636 bp, Artificial Sequence
  derived and/or modified sequence
atgaaatcctgtgcggtcagcctcactacagcagctgttgcctttggggacgaggccaagaagatggcagagggcaaggcctcccgggagagcgaggaggaatccgttagtctaaccgtcgaggaaagagaagctctgggtgggatggattcgaggctgtttggctttgtcagattgcatgaagatggagccagaacgaaaactcttctgggaaaagcagtaagatgctacgagagcctgattctgaaggccgaggggaaagtggaatccgacttcttttgccagctcggtcatttcaacctactgttggaggactatagcaaggctctcagcgcataccagaggtattactcgctacaggccgactactggaaaaatgccgccttcttatatggattgggcctggtttatttctactataacgcattccactgggcaatcaaggcctttcaggacgtgctgtatgtagaccctagcttttgccgggcgaaagagatccatttgaggctgggtttaatgtttaaggtcaatactgattacaagagttccctgaaacatttccaactggccctcatcgattgcaatccatgcacccttagcaacgccgagatacagtttcatattgcccacctgtacgaaacacaacgcaaatatcactcggcgaaggaagcatacgaacaactgttacagaccgagaatctgccagcccaggtgaaggccacggtgctccaacagttaggctggatgcaccataacatggatctcgtgggggacaaggcgacaaaggaatcatatgccattcagtacctgcagaaatctctcgaggccgaccctaactcaggccagagctggtactttctggggaggtgttactctagcattgggaaagtgcaagacgcttttataagctataggcaatctatcgacaagtccgaggctagcgccgacacctggtgtagtattggggtcctgtatcagcagcagaatcaaccaatggacgccttgcaggcctatatttgtgccgtgcagctggaccacggccatgcagcagcatggatggatctgggtaccctctacgagtcttgcaatcagccacaggatgccattaagtgttacttaaacgctgccagatctaaacggtgtagcaacacctcaacgctcgccgcacggataaaatttctccaagcccaactctgtaacctgcctcagagcagcctccagaataaaaccaagctgttgccctctattgaggaggcttggtcactacccataccggctgagcttacaagtcggcagggcgccatgaacacagctcagcagaatggcagtgacaactggaacggcggacaatctttatctcatcacccggtacaacaagtgtactcactctgcctaacgccccagaaactgcagcatctcgaacaacttagagcgaatagggacaatctcaatcctgcacagaagcatcaactggaacagctcgagagccagttcgtgctcatgcagcagatgcgccacaaagaagtagcccagggtcttcataaatcccagtcttcttgtctgtccggtccaaacgaggaacagcccttattctccactggtagtgcacaataccatcaggctactagcactgggataaaaaaagccaacgagcacctcactctgccatccaactccgtccctcagggcgacgctgatagccacctatcttgtcacaccgccacctccggtggccagcaaggcatcatgttcacaaaagagtccaagccgtccaaaaaccggtcccttgtccctgagacaagccgccacaccggtgacacctctaatgggtgcgccgatgttaagggcttaagcaaccacgtgcatcagttaattgctgatgccgtgtcctcgccaaatcatggggactctcccaacctgctaattgctgataatcctcagctcagtgctctgctcatcggcaaagccaacggcaatgtgggaacagggacctgcgataaggtgaacaatatacacccggcagtgcacacgaagactgaccatagcgtcgcttcctcaccctcttccgctatttcaacggctacaccatctccaaaatccaccgaacaacggtctattaacagcgtgacctctctgaactcacctcatagcggactgcataccgtgaacggggagggccttggaaaatcacaaagttctaccaaggtcgacctccccctggctagtcacagaagtacatcacagattttacccagcatgagcgtcagtatctgtccttcaagcacagaagttctcaaagcatgtcgcaaccctgggaaaaatggcctatcaaactcgtgtatcctcctggacaaatgccctccgccccggccgcctaccagcccgtatccccctctgccaaaggataaattgaatcccccgacccccagcatatatttagagaacaaacgcgatgccttcttccctccgctacaccagttctgtacaaatcctaaaaatccggttacagtcatacggggcctcgccggagccctcaagttggatctgggtcttttttccaccaaaaccttggtcgaggccaacaatgagcatatggtggaggtgcggacccagcttctgcagcctgccgacgagaattgggatcccacaggcacaaagaaaatttggcggtgcgaatctaaccgcagccacaccaccattgccaagtacgcccagtaccaggccagttcatttcaggagtcactcagggaagagaatgagaaaagaacacagcacaaggaccatagtgataacgagagtacctctagcgagaattcaggtaggaggcgtaaaggaccatttaaaacaataaaattcggtacaaatatcgatctcagcgataacaagaagtggaagttgcaacttcacgagctgacgaagcttcccgcattcgcccgcgtggtgtccgcaggaaacctgttaactcatgtaggccatactattctcggcatgaacacagtgcaactgtatatgaaagtacccggatcaaggacaccaggccaccaggaaaacaataatttctgctcagtgaatattaacatcgggccaggagattgcgagtggttcgtcgtgcctgaagattattggggcgtgctgaacgacttctgcgaaaaaaataatctgaactttctgatgtctagttggtggcctaatctggaggacctgtatgaggcaaatgtgcccgtgtaccgcttcatccaacgccccggcgacctggtgtggatcaatgccgggacggtgcactgggtacaggcagtaggctggtgcaataatattgcatggaacgttggcccactcacagcatgtcagtataaactggcggtcgagaggtacgagtggaataagcttaagagcgtgaagtcccccgtcccgatggttcacctgtcatggaacatggcgcgcaatattaaggtgagtgatcctaagctctttgagatgatcaaatattgcctgctgaaaattctgaagcagtaccagaccttgcgcgaggcattggttgcagctggaaaagaagtcatttggcatggccggacaaatgatgagccagcccattactgctcaatttgcgaggctctgagtctgagtagcagctcttag

SEQ ID NO: 92637 - DNA, 3636 bp, Artificial Sequence
  derived and/or modified sequence
atgaagagctgtgctgtgtccctgaccacagctgctgtggcctttggagatgaggccaagaagatggccgagggcaaggccagccgggagagcgaggaggagagcgtgtccctgactgtggaggagcgggaggccctgggcggcatggacagccggctgtttggatttgtgcggctgcatgaagatggagcccggaccaagaccctgctgggcaaggctgtgcgctgctatgagagcctcatcctgaaggccgagggcaaggtggagagtgacttcttctgccagctgggccacttcaacctgctgctggaggactacagcaaggccctgagcgcctaccagcgctactacagcctgcaggccgactactggaagaatgctgccttcctgtatggcctgggcctggtgtacttctactacaatgccttccactgggccatcaaggccttccaggatgtgctgtatgtggaccccagcttctgccgggccaaggagatccacctgcggctgggcctgatgttcaaggtgaacacagactacaagagcagcctgaagcacttccagctggccctgattgactgcaacccctgcaccctgagcaatgctgagatccagttccacatcgcccacctgtatgagacccagaggaagtaccacagcgccaaggaggcctatgagcagctgctgcagacagagaacctgcctgcccaggtgaaggccaccgtgctgcagcagctgggctggatgcaccacaacatggacctggtgggggacaaggccaccaaggagagctatgccatccagtacctgcagaagagcctggaggccgaccccaacagcggccagagctggtacttcctgggccgctgctacagcagcatcggcaaggtgcaggatgccttcatctcctaccggcagagcattgacaagtctgaggccagcgctgacacctggtgcagcattggagtgctgtaccagcagcagaaccagcccatggatgccctgcaggcctacatctgtgctgtgcagctggaccacggccatgctgctgcctggatggacctgggcaccctgtatgagagctgcaaccagccccaggatgccatcaagtgctacctgaatgctgcccggagcaagcgctgcagcaacaccagcaccctggccgcccgcatcaagttcctgcaggcccagctgtgcaacctgccccagagcagcctgcagaacaagaccaagctgctgcccagcattgaggaggcctggagcctgcccatcccagctgagctgaccagccggcagggcgccatgaacacagcccagcagaatggaagtgacaactggaatggaggccagagcctgagccaccaccctgtgcagcaggtgtacagcctgtgcctgaccccccagaagctgcagcacctggagcagctgcgggccaacagagacaacctgaacccagcccagaagcaccagctggagcagctggagagccagtttgtgctgatgcagcagatgaggcacaaggaggtggcccagggcctgcacaagagccagagcagctgcctgagcggccccaatgaggagcagcccctcttcagcactggaagtgcccagtaccaccaggccaccagcacaggcatcaagaaggccaatgagcacctgaccctgcccagcaacagcgtgccccagggagatgctgacagccacctgagctgccacacagccaccagcggcggccagcagggcatcatgttcaccaaggagagcaagcccagcaagaacagaagcctggtgcctgagaccagccgccacactggagacaccagcaatggctgtgctgatgtgaagggcctgagcaaccacgtgcaccagctgattgctgatgctgtgagcagccccaaccacggggacagccccaacctgctgattgctgacaacccccagctgagcgccctgctgattggcaaggccaatggaaatgtgggcaccggcacctgtgacaaggtgaacaacatccaccctgctgtgcacaccaagacagaccacagcgtggccagcagccccagcagcgccatcagcacagccacccccagccccaagagcacagagcagaggagcatcaacagcgtgaccagcctgaacagcccccacagcggcctgcacacagtgaatggagagggcctgggcaagagccagagcagcaccaaggtggacctgcccctggccagccacaggagcaccagccagatcctgcccagcatgtctgtgtccatctgccccagcagcacagaggtgctgaaggcctgcagaaatcctgggaagaatggcctgagcaacagctgcatcctgctggacaagtgccccccacccaggcctcccaccagcccctacccacccctgcccaaggacaagctgaacccccccacccccagcatctacctggagaacaagagagatgccttcttcccccccctgcaccagttctgcaccaaccccaagaaccctgtgaccgtcatccggggcctggccggggccctgaagctggacctgggcctcttcagcaccaagaccctggtggaggccaacaatgagcacatggtggaggtgaggacccagctgctgcagcctgcagatgagaactgggaccccaccggcaccaagaagatctggaggtgtgagagcaacagaagccacaccaccatcgccaagtatgcccagtaccaggccagcagcttccaggagagcctgcgggaggagaatgagaagaggacccagcacaaggaccacagcgacaatgaaagcaccagcagtgaaaattctggaagaagaaggaagggccccttcaagaccatcaagtttggcaccaacatcgacctgagtgacaacaagaagtggaagctgcagctgcacgagctgaccaagctgcctgcctttgcccgggtggtgtctgctggcaacctgctgacccacgtgggccacaccatcctgggcatgaacacagtgcagctgtacatgaaggtgcccggcagcaggaccccaggccaccaggagaacaacaacttctgcagcgtgaacatcaacatcggccctggggactgtgagtggtttgtggtgcctgaggactactggggcgtgctgaatgacttctgtgagaagaacaacctgaacttcctgatgagctcctggtggcccaacctggaggacctgtatgaggccaacgtgcctgtgtaccgcttcatccagaggcctggggacctggtgtggatcaatgccggcaccgtgcactgggtgcaggccgtgggctggtgcaacaacatcgcctggaatgtgggccccctgacagcctgccagtacaagctggccgtggagagatatgagtggaacaagctgaagtctgtgaagagccctgtgcccatggtgcacctgtcctggaacatggccaggaacatcaaggtgtctgaccccaagctgtttgagatgatcaagtactgcctgctgaagatcctgaagcagtaccagaccctgcgggaggccctggtggccgccggcaaggaggtgatctggcacggccgcaccaatgatgagcccgcccactactgcagcatctgtgaggccctgagcctgagcagcagcagctag

SEQ ID NO: 92638 - DNA, 3636 bp, Artificial Sequence
  derived and/or modified sequence
atgaagagctgcgccgtgagcctgaccaccgccgccgtggccttcggggatgaggccaagaaaatggcagaaggtaaggcgtcccgggagagcgaggaagagtctgtgtctctcaccgtcgaagagcgggaggccttggggggcatggacagcaggcttttcgggttcgtgcggctgcatgaggacggcgcgaggacgaagaccctcctgggaaaagccgtgcggtgttatgaatctctgatcttgaaagcagaagggaaggtcgaatctgacttcttctgccagttgggacactttaatctcctgctggaagattatagcaaagctctctctgcttatcaaaggtactacagcctgcaggccgattactggaaaaacgccgctttcctatatgggctcggtctggtgtacttttactataatgcctttcactgggccatcaaagcgtttcaggacgtgctttatgtggacccctctttctgccgagccaaagagatccacttaagattggggttgatgttcaaagttaacaccgactacaaaagttccctcaagcattttcaactggccctcattgattgcaatccttgcacattatcgaacgctgagatccaatttcacattgcccatctgtatgagacccagcgaaaatatcacagtgccaaggaggcttatgaacagctcctccagaccgaaaatctgccagcacaggtgaaggctactgtgctccagcagctggggtggatgcaccacaatatggacctcgtgggtgataaggcaactaaggagagctacgcaatccagtacctgcagaagagcctggaagccgatcccaatagcggtcaaagctggtattttcttggccgctgctactccagcatcggaaaagtccaggatgcctttatttcctatcggcagtccatcgataagagcgaagctagcgcagatacatggtgctcgatcggcgtgctctatcagcagcagaaccagccaatggatgccctacaagcatacatttgcgccgtgcagttagatcatggtcatgcagcagcatggatggacttaggcaccctttacgagtcatgtaaccaaccccaagatgccattaagtgctacttgaacgcagcgcgtagcaagcgctgtagcaacacatccaccctagccgcaaggataaagttcctgcaggcacagctgtgtaatctgccacagagcagtctccagaacaaaactaaattgctcccatccatagaagaggcctggagcctccccatacccgcggaactcacgagtcggcaaggtgctatgaacacagcccaacaaaacgggagcgacaattggaacggggggcagtcattgtcacaccacccagtccagcaggtgtacagcttatgtttgacccctcagaaactgcagcacctggaacagctgagagcaaaccgggataatctgaacccagcgcagaagcatcagctcgagcagctcgagtcccagtttgtactcatgcagcagatgagacacaaagaagtagcacagggactacataagagtcagtcatcatgtctgtcaggccccaacgaggaacagccactgttcagtacaggcagcgcgcagtatcatcaggcaacaagcaccgggatcaagaaagccaatgaacacctgactctgccaagcaattccgtaccccagggggacgcagatagccatctctcatgccatactgccactagtggcgggcaacagggcatcatgtttaccaaagaaagtaaaccatccaaaaatcgctccctcgtgccagaaaccagcagacatactggcgatacaagcaacgggtgcgccgatgtgaaaggcttaagcaaccacgtgcaccaactcatagccgacgcagtctcctctcccaatcatggcgattccccaaatttgctgatcgcggacaacccccagctgtctgcactgctgatcggaaaggcaaacggtaacgtgggaaccggcacgtgcgataaggtgaacaatatccacccggccgtgcacaccaaaactgaccattctgtcgcatcaagtccgagcagtgctattagcacagcaacacctagcccaaagagcaccgagcagcggtctataaatagtgtaacttccttaaacagtcctcactcagggttgcacacagtgaacggagaaggtctgggtaaatcacagtcctccaccaaggttgatctgcccctggcatcacaccgcagcactagccagatattgccaagcatgtcagtgagtatctgtccaagtagtaccgaggtgctgaaggcttgccggaatcccgggaagaacgggttatcaaactcctgtatcctgcttgataagtgtccgcccccgaggccacctacttccccataccctcccttgcccaaggacaagttgaatccccctaccccctctatctacctggaaaacaaaagggacgcatttttcccccccttgcatcagttttgtactaatccaaaaaacccagtcacagtgatccgaggactggccggggctcttaagctcgatctgggcctattcagtaccaagaccttggtcgaggctaataacgagcacatggtggaggtcagaacccagctgctgcagcccgctgacgaaaactgggaccccacgggcactaaaaagatatggcggtgtgaatccaatcgaagccataccacaattgcgaagtacgcacagtatcaagcatcttcgttccaggaaagtcttagggaggagaacgagaagcgcacccagcacaaagaccattcagataacgaatcaaccagcagtgagaacagcgggcgccggcgcaaagggccattcaagactattaaattcggtaccaatatcgaccttagcgacaataagaagtggaagttacagctgcatgagctgacaaaactaccagctttcgcgcgggtggtgtctgcgggaaacttgctcacccatgtgggacacaccatactggggatgaataccgtgcagctgtatatgaaagtcccaggatcccgcactcctgggcatcaagagaacaacaacttttgtagtgtgaacattaacattgggcccggcgactgcgaatggttcgtggttccagaggattactggggagtactgaacgacttctgtgagaagaataatttgaacttccttatgtcatcatggtggcctaatttggaggacctctatgaggccaacgtgcctgtctaccgcttcatacagaggcccggggatctcgtgtggattaatgctggcaccgtacactgggttcaggccgtcgggtggtgcaataacatcgcctggaatgtgggccccctaaccgcctgtcagtacaaactcgccgttgagaggtatgagtggaacaaactcaagagtgtgaaaagccccgtgcctatggttcacctcagctggaacatggctcgcaacataaaagtgtccgaccccaagctgtttgaaatgattaagtattgcctgctgaagattttgaaacagtaccagacgctgagagaagctctggtggccgcaggcaaggaagtgatctggcatggtcgcacaaacgatgagcccgcgcattactgcagtatatgcgaggccctgagcctgtcctccagtagctag

SEQ ID NO: 92639 - DNA, 3636 bp, Artificial Sequence
  derived and/or modified sequence
atgaagtcttgtgctgtgagcctgaccaccgctgctgtagccttcggagatgaagcgaaaaagatggccgaaggcaaggcgagcagggagtctgaggaagaaagcgtcagccttaccgttgaggaacgggaagctttggggggaatggatagcaggttgttcgggtttgttcgccttcacgaggacggagcgagaactaaaacgctgttggggaaggctgtgcgttgctacgaatccctgatcctcaaagcggaggggaaggtggaatcagacttcttttgtcaacttggacactttaatttgcttctcgaggattactccaaggctctgagtgcctaccagagatactacagcctgcaggccgattactggaaaaacgccgcattcctatacggtcttggactcgtgtacttttattacaatgcatttcactgggccataaaggctttccaagacgttttgtacgtagatccatctttctgccgcgctaaggagattcatctaaggctgggtctgatgtttaaggttaacacagattataaatcatctcttaagcactttcagcttgcgctgatcgattgcaacccctgcactctgagcaacgccgagatccagtttcacattgctcacttgtatgagacacagagaaagtaccatagcgccaaggaagcctatgaacagctgttgcagacagagaatctgccggcacaggtgaaggcaacagttctgcagcaactgggctggatgcatcacaatatggatctggtgggcgataaggccactaaggaatcgtacgcaatccaataccttcaaaaatctcttgaggccgatcctaacagcgggcagtcctggtatttcttgggacgatgctattcctccatcggcaaagtccaggacgcatttataagttatagacagtccatagacaaaagcgaggctagcgcagacacctggtgtagtatcggggttttataccagcaacaaaaccagcccatggacgctctccaggcctatatttgtgcagtgcagctggaccacggacacgccgctgcctggatggacttaggaaccctttacgagtcatgcaatcaacctcaggacgcaatcaagtgttacctcaacgcggcacgctctaagcgctgtagtaacactagcacgctggctgctagaatcaaatttctgcaggcgcaactatgtaacctgccacagagtagtttgcagaataaaaccaagctgctgccaagtatcgaggaagcgtggtcgttgccaatccccgctgagctcacctctagacagggtgcaatgaacaccgcccagcagaacgggtccgacaattggaatggtggccaaagcctatcccaccatcccgtgcagcaggtgtatagcctgtgcctgacaccgcaaaaactgcaacacctggaacagctccgggcaaatagggataatcttaatcctgcccagaagcaccaacttgaacagctcgaaagccagtttgtattgatgcagcaaatgcgtcacaaggaggtggctcagggactgcataaatctcagagttcatgcctctctggtcccaacgaggaacagccactgtttagcactggcagtgcacagtaccatcaggctacctccaccggaattaagaaagccaacgagcacctgacattgcccagtaacagcgtaccccagggcgacgccgactcccatctgtcatgtcatactgccacctcaggaggacagcaaggaattatgtttactaaggaaagcaaaccatccaagaatcgaagtctggtacctgaaacatctcgtcatactggcgatacttccaatggctgcgcggatgtgaagggtctttccaatcacgtgcaccaactgattgctgacgctgtttcctcacctaaccatggagactccccaaatcttctcatcgccgacaacccacaactgtccgctctcctgataggaaaggccaacgggaatgtcggcacgggcacatgcgacaaggtcaataatattcaccctgctgtacatacaaaaactgatcactcagttgcaagcagccctagctcagcaatctcaactgccaccccttctccaaagtctaccgagcagcggtctatcaactccgtgacatccttgaattccccccattccggtctgcacactgtgaacggcgagggtctgggtaagagccagagcagtaccaaggtcgacctgccactggccagtcacagatctaccagccagattctcccttcaatgagcgtgtcgatttgtcccagttcaacagaggttttgaaagcttgccggaaccccggaaagaatggtctaagcaatagttgtatcttgctcgataagtgtcctcccccacggccacccacttccccttatccacccctaccaaaagacaaactcaacccccctactccatctatttatctcgaaaataagagagacgcattcttcccacctctgcatcagttttgtaccaatcccaaaaaccctgttaccgtaattaggggcctggccggagcgctgaagttagacttgggactatttagcactaagaccctggtcgaggcgaataacgaacatatggtcgaggtgcgtacccagctgttacagcctgcagacgagaattgggaccccacagggacaaagaagatttggagatgtgaatccaaccgatcccacaccaccattgctaagtacgcccagtaccaagccagttcattccaagaatctctgagagaggagaacgaaaagcgaactcaacataaagatcactctgacaatgaatctactagctcagagaactctggcagacgacgcaaaggccctttcaaaaccattaagttcggcactaacatcgaccttagcgacaataaaaaatggaaactccagttgcatgagcttacgaagttgcctgctttcgcgagggtggtgtccgccggtaacctgctaactcatgtggggcatacgatcctgggcatgaataccgtccagctatacatgaaggtgcccggatcgaggactcctggccaccaggaaaataacaacttttgtagcgtcaacataaatattggccctggagattgtgaatggttcgtggttcccgaagattactggggcgtactgaatgatttttgtgaaaaaaataacctcaatttcctgatgtcatcgtggtggcctaacctagaggacctgtacgaggccaacgtaccagtctataggtttatccagaggcctggcgatctagtgtggatcaatgctggcacagtccactgggtccaggccgtggggtggtgcaacaacatcgcttggaatgtgggtccactcactgcatgccagtacaaactggccgtggagaggtacgagtggaacaaactgaaatccgtgaagtcaccagtgccaatggtgcatctctcctggaatatggctagaaatatcaaggtgtctgatcccaagctattcgaaatgatcaagtactgcctccttaagattctgaagcagtatcaaacactgagggaggcattggtagctgccggaaaggaggtcatctggcacggcaggacaaacgatgagcccgctcactattgtagcatttgtgaagctttgagtctgtcttcgtcttcctag

SEQ ID NO: 92640 - DNA, 3636 bp, Artificial Sequence
  derived and/or modified sequence
atgaaatcctgcgcagtgtcgctcactaccgccgctgttgccttcggtgatgaggcaaagaaaatggcggaaggaaaagcgagccgcgagagtgaagaggagtctgttagcctgacagtcgaggaaagggaggcgcttggtggcatggacagccgtctcttcgggttcgtgaggcttcatgaagatggcgccagaacgaagaccctactaggcaaggctgttcgctgctacgaatctttaatcttaaaagctgaaggaaaagtggagtctgacttcttttgccaattaggtcacttcaacctcttgttggaagattattcaaaagcattatctgcatatcagagatattacagtttacaggctgactactggaagaatgctgcgtttttatatggccttggtttggtctacttctactacaatgcatttcattgggcaattaaagcatttcaagatgtcctttatgttgaccccagcttttgtcgagccaaggaaattcatttacgacttgggctcatgttcaaagtgaacacagactacaagtctagtttaaagcattttcagttagccttgattgactgtaatccatgtactttgtccaatgctgaaattcaatttcatattgcccatttgtatgaaacccagaggaagtatcattctgcaaaggaggcatatgaacaacttttgcagacagaaaaccttcctgcacaagtaaaagcaactgtattgcaacagttaggttggatgcatcataatatggatctagtaggagacaaagccacaaaggaaagctatgctattcagtatctccaaaagtctttggaggcagatcctaattctggccaatcgtggtattttcttggaaggtgttattcaagtattgggaaagttcaggatgcctttatatcttacaggcaatctattgataaatcagaagcaagtgcagatacatggtgttcaataggtgtgttgtatcagcagcaaaatcagcctatggatgctttacaggcatatatttgtgctgtacaattggaccatgggcatgccgcagcctggatggacctaggtactctctatgaatcctgcaatcaacctcaagatgccattaaatgctacctaaatgcagctagaagcaaacgttgtagtaatacctctacgcttgctgcaagaattaaatttctacaggctcagttgtgtaaccttccacaaagtagtctacagaataaaactaaattacttcctagtattgaggaggcatggagcctaccaatccccgcagagcttacctccaggcagggtgccatgaacacagcacagcagaatggttctgataactggaatggtggccagagtctttcacatcatccagtacagcaagtttattcgttgtgtttgacaccacagaaattacagcacttggaacaactgcgagcaaatagagataatttaaatccagcacagaagcatcagctggaacagttagaaagtcagtttgtcttaatgcagcaaatgagacacaaagaagttgctcaggggcttcataaaagtcagagttcatgtttgtcaggacctaatgaagaacaacctctgttttccactgggtcagcccagtatcaccaggcaactagcactggtattaagaaggcgaatgaacatctcactctgcctagtaattcagtaccacagggggatgctgacagtcacctctcctgtcatactgctacctcaggtggacaacaaggcattatgtttaccaaagagagcaagccttcaaaaaatagatccttggtgcctgaaacaagcaggcatactggagacacatctaatggctgtgctgatgtcaagggactttctaatcatgttcatcagttgatagcagatgctgtttccagtcctaaccatggagattcaccaaatttattaattgcagacaatcctcagctctctgctttgttgattggaaaagccaatggcaatgtgggtactggaacctgtgacaaagtgaataatattcacccagctgttcatacaaagactgatcattctgttgcctcttcaccctcttcagccatttccacagcaacaccttctcctaaatccactgagcagagaagcataaacagtgttaccagccttaacagtcctcacagtggattacacacagtcaatggagaggggctggggaagtcacagagctctacaaaagtagacctgcctttagctagccacagatctacttctcagatcttaccatcaatgtcagtgtctatatgccccagttcaacagaagttctgaaagcatgcaggaatccaggtaaaaatggcttgtctaatagctgcattttgttagataaatgtccacctccaagaccaccaacttcaccatacccacccttgccaaaggacaagttgaatccacccacacctagtatttacttggaaaataaacgtgatgctttctttcctccattacatcaattttgtacaaatccaaaaaaccctgttacagtaatacgtggccttgctggagctcttaaattagatcttggacttttctctaccaaaactttggtagaagctaacaatgaacatatggtagaagtgaggacacagttgctgcaaccagcagatgaaaactgggatcccactggaacaaagaaaatctggcgttgtgaaagcaatagatctcatactacaattgccaaatacgcacaataccaggcttcctccttccaggaatcattgagagaagaaaatgagaaaagaacacaacacaaagatcattcagataacgaatccacatcttcagagaattctggaaggagaaggaaaggaccttttaaaaccataaaatttgggaccaacattgacctctctgataacaaaaagtggaagttgcagttacatgaactgactaaacttcctgcttttgcgcgtgtggtgtcagcaggaaatcttctaacccatgttgggcataccattctgggcatgaatacagtacaactgtatatgaaagttccagggagtcggacaccaggtcaccaagaaaataacaacttctgctctgttaacataaatattggtccaggagattgtgaatggtttgttgtacctgaagattattggggtgttctgaatgacttctgtgaaaaaaataatttgaattttttaatgagttcttggtggcccaaccttgaagatctttatgaagcaaatgtccctgtgtatagatttattcagcgacctggagatttggtctggataaatgcaggcactgtgcattgggttcaagctgttggctggtgcaataacattgcctggaatgttggtccacttacagcctgccagtataaattggcagtggaacggtatgaatggaacaaattgaaaagtgtgaagtcaccagtacccatggtgcatctttcctggaatatggcacgaaatatcaaagtctcagatccaaagctttttgaaatgattaagtattgtcttttgaaaattctgaagcaatatcagacattgagagaagctcttgttgcagcaggaaaagaggttatatggcatgggcggacaaatgatgaaccagctcattactgtagcatttgtgaggctctttcattatcatcctcatcttga

SEQ ID NO: 92641 - protein, 1005 aa, Artificial Sequence
  derived and/or modified sequence
MKSCAVSLTTAAVAFGDEAKKMAEGKASRESEEESVSLTVEEREALGGMDSRLFGFVRLHEDGARTKTLLGKAVRCYESLILKAEGKVESDFFCQLGHFNLLLEDYSKALSAYQRYYSLQADYWKNAAFLYGLGLVYFYYNAFHWAIKAFQDVLYVDPSFCRAKEIHLRLGLMFKVNTDYKSSLKHFQLALIDCNPCTLSNAEIQFHIAHLYETQRKYHSAKEAYEQLLQTENLPAQVKATVLQQLGWMHHNMDLVGDKATKESYAIQYLQKSLEADPNSGQSWYFLGSVLYQQQNQPMDALQAYICAVQLDHGHAAAWMDLGTLYESCNQPQDAIKCYLNAARSKRCSNTSTLAARIKFLQQSLSLHMITSSQVEGLSSPAKKKRTSSPTKNGSDNWNGGQSLSHHPVQQVYSLCLTPQKLQHLEQLRANRDNLNPAQKHQLEQLESQFVLMQQMRHKEVAQVRTTGIHNGAITDSSLPTNSVSNRQPHGALTRVSSVSQPGVRPACVEKLLSSGAFSAGCIPCGTSKILGSTDTILLGSNCIAGSESNGNVPYLQQNTHTLPHNHTDLNSSTEEPWRKQLSNSAQGLHKSQSSCLSGPNEEQPLFSTGSAQYHQATSTGIKKANEHLTLPSNSVPQGDADSHLSCHTATSGGQQGIMFTKESKPSKNRSLVPETSRHTGDTSNGCADVKGLSNHVHQLIADAVSSPNHGDSPNLLIADNPQLSALLIGKANGNVGTGTCDKVNNIHPAVHTKTDHSVASSPSSAISTATPSPKSTEQRSINSVTSLNSPHSGLHTVNGEGLGKSQSSTKVDLPLASHRSTSQILPSMSVSICPSSTEVLKACRNPGKNGLSNSCILLDKCPPPRPPTSPYPPLPKDKLNPPTPSIYLENKRDAFFPPLHQFCTNPKNPVTVIRGLAGALKLDLGLFSTKTLVEANNEHMVEVRTQLLQPADENWDPTGTKKIWRCESNRSHTTIAKYAQYQASSFQESLRSLILSHPGWNAMV

SEQ ID NO: 92642 - protein, 1240 aa, Artificial Sequence
  derived and/or modified sequence
MKSCAVSLTTAAVAFGDEAKKMAEGKASRESEEESVSLTVEEREALGGMDSRLFGFVRLHEDGARTKTLLGKAVRCYESLILKAEGKVESDFFCQLGHFNLLLEDYSKALSAYQRYYSLQADYWKNAAFLYGLGLVYFYYNAFHWAIKAFQDVLYVDPSFCRAKEIHLRLGLMFKVNTDYKSSLKHFQLALIDCNPCTLSNAEIQFHIAHLYETQRKYHSAKEAYEQLLQTENLPAQVKATVLQQLGWMHHNMDLVGDKATKESYAIQYLQKSLEADPNSGQSWYFLGRCYSSIGKVQDAFISYRQSIDKSEASADTWCSIGVLYQQQNQPMDALQAYICAVQLDHGHAAAWMDLGTLYESCNQPQDAIKCYLNAARSKRCSNTSTLAARIKFLQNGSDNWNGGQSLSHHPVQQVYSLCLTPQKLQHLEQLRANRDNLNPAQKHQLEQLESQFVLMQQMRHKEVAQVRTTGIHNGAITDSSLPTNSVSNRQPHGALTRVSSVSQPGVRPACVEKLLSSGAFSAGCIPCGTSKILGSTDTILLGSNCIAGSESNGNVPYLQQNTHTLPHNHTDLNSSTEEPWRKQLSNSAQGLHKSQSSCLSGPNEEQPLFSTGSAQYHQATSTGIKKANEHLTLPSNSVPQGDADSHLSCHTATSGGQQGIMFTKESKPSKNRSLVPETSRHTGDTSNGCADVKGLSNHVHQLIADAVSSPNHGDSPNLLIADNPQLSALLIGKANGNVGTGTCDKVNNIHPAVHTKTDHSVASSPSSAISTATPSPKSTEQRSINSVTSLNSPHSGLHTVNGEGLGKSQSSTKVDLPLASHRSTSQILPSMSVSICPSSTEVLKACRNPGKNGLSNSCILLDKCPPPRPPTSPYPPLPKDKLNPPTPSIYLENKRDAFFPPLHQFCTNPKNPVTVIRGLAGALKLDLGLFSTKTLVEANNEHMVEVRTQLLQPADENWDPTGTKKIWRCESNRSHTTIAKYAQYQASSFQESLREENEKRTQHKDHSDNESTSSENSGRRRKGPFKTIKFGTNIDLSDNKKWKLQLHELTKLPAFARVVSAGNLLTHVGHTILGMNTVQLYMKVPGSRTPGHQENNNFCSVNINIGPGDCEWFVVPEDYWGVLNDFCEKNNLNFLMSSWWPNLEDLYEANVPVYRFIQRPGDLVWINAGTVHWVQAVGWCNNIAWNVGPLTACQYKLAVERYEWNKLKSVKSPVPMVHLSWNMARNIKVSDPKLFEMIK

SEQ ID NO: 92643 - protein, 551 aa, Artificial Sequence
  derived and/or modified sequence
KPLLNHVLAIKGPRSRWRTFYNIATRRKALKNPSEEYGKILEVVGRYSVHNAGISFSVKKQGETVADVRTLPNASTVDNIRSIFGNAVSRELIEIGCEDKTLAFKMNGYISNANYSVKKCIFLLFINHRLVESTSLRKAIETVYAAYLPKNTHPFLYLSLEISPQNVDVNVHPTKHEVHFLHEESILERVQQHIESKLLGSNSSRMYFTQTLLPGLAGPSGEMVKSTTSLTSSSTSGSSDKVYAHQMVRTDSREQKLDAFLQPLSKPLSSQPQAIVTEDKTDISSGRARQQDEEMLELPAPAEVAAKNQSLEGDTTKGTSEMSEKRGPTSSNPRKRHREDSDVEMVEDDSRKEMTAACTPRRRIINLTSVLSLQEEINEQGHEVLREMLHNHSFVGCVNPQWALAQHQTKLYLLNTTKLSEELFYQILIYDFANFGVLRLSEPAPLFDLAMLALDSPESGWTEEDGPKEGLAEYIVEFLKKKAEMLADYFSLEIDESEVPGSIPNSWKWTVEHIVYKALRSHILPPKHFTEDGNILQLANLPDLYKVFERC

SEQ ID NO: 92644 - protein, 116 aa, Artificial Sequence
  derived and/or modified sequence
MSEKRGPTSSNPRKRHREDSDVEMVEDDSRKEMTAACTPRRRIINLTSVLSLQEEINEQGHEVLREMLHNHSFVGCVNPQWALAQHQTKLYLLNTTKLRVKCLAPFQTPGSGLWNT

SEQ ID NO: 92645 - protein, 174 aa, Artificial Sequence [sequence omitted]

SEQ ID NO: 92646 - protein, 319 aa, Artificial Sequence
  derived and/or modified sequence
MIENCLDAKSTSIQVIVKEGGLKLIQIQDNGTGIRKEDLDIVCERFTTSKLQSFEDLASISTYGFRGEALASISHVAHVTITTKTADGKCAYRASYSDGKLKAPPKPCAGNQGTQITVEDLFYNIATRRKALKNPSEEYGKILEVVGRYSVHNAGISFSVKKQGETVADVRTLPNASTVDNIRSIFGNAVSRELIEIGCEDKTLAFKMNGYISNANYSVKKCIFLLFINHRLVESTSLRKAIETVYAAYLPKNTHPFLYLSLEISPQNVDVNVHPTKHEVHFLHEESILERVQQHIESKLLGSNSSRMYFTQKETSGRF

SEQ ID NO: 92647 - protein, 679 aa, Artificial Sequence
  derived and/or modified sequence
  misc_feature (1)..(1): Xaa can be any naturally occurring amino acid
XRLDETVVNRIAAGEVIQRPANAIKEMIENCLDAKSTSIQVIVKEGGLKLIQIQDNGTGIRKEDLDIVCERFTTSKLQSFEDLASISTYGFRGEALASISHVAHVTITTKTADGKCAYRASYSDGKLKAPPKPCAGNQGTQITVEDLFYNIATRRKALKNPSEEYGKILEVVGRYSVHNAGISFSVKKQGETVADVRTLPNASTVDNIRSIFGNAVSRELIEIGCEDKTLAFKMNGYISNANYSVKKCIFLLFINHRLVESTSLRKAIETVYAAYLPKNTHPFLYLSLEISPQNVDVNVHPTKHEVHFLHEESILERVQQHIESKLLGSNSSRMYFTQTLLPGLAGPSGEMVKSTTSLTSSSTSGSSDKVYAHQMVRTDSREQKLDAFLQPLSKPLSSQPQAIVTEDKTDISSGRARQQDEEMLELPAPAEVAAKNQSLEGDTTKGTSEMSEKRGPTSSNPRKRHREDSDVEMVEDDSRKEMTAACTPRRRIINLTSVLSLQEEINEQGHEVLREMLHNHSFVGCVNPQWALAQHQTKLYLLNTTKLSEELFYQILIYDFANFGVLRLSEPAPLFDLAMLALDSPESGWTEEDGPKEGLAEYIVEFLKKKAEMLADYFSLEIDESEVPGSIPNSWKWTVEHIVYKALRSHILPPKHFTEDGNILQLANLPDLYKVFERC

SEQ ID NO: 92648 - protein, 280 aa, Artificial Sequence
  derived and/or modified sequence
MIENCLDAKSTSIQVIVKEGGLKLIQIQDNGTGIRKEDLDIVCERFTTSKLQSFEDLASISTYGFRGEALASISHVAHVTITTKTADGKCAYRASYSDGKLKAPPKPCAGNQGTQITVEDLFYNIATRRKALKNPSEEYGKILEVVGRYSVHNAGISFSVKKQGETVADVRTLPNASTVDNIRSIFGNAVSRELIEIGCEDKTLAFKMNGYISNANYSVKKCIFLLFINHRLVESTSLRKAIETVYAAYLPKNTHPFLYLRLCYQDLLAPLGRWLNPQQV

SEQ ID NO: 92649 - DNA, 1656 bp, Artificial Sequence
  derived and/or modified sequence
aagcccctgctgaaccacgtgctggccatcaagggccccagaagcagatggagaaccttctacaacatcgccaccagaagaaaggccctgaagaaccccagcgaggagtacggcaagatcctggaggtggtgggcagatacagcgtgcacaacgccggcatcagcttcagcgtgaagaagcagggcgagaccgtggccgacgtgagaaccctgcccaacgccagcaccgtggacaacatcagaagcatcttcggcaacgccgtgagcagagagctgatcgagatcggctgcgaggacaagaccctggccttcaagatgaacggctacatcagcaacgccaactacagcgtgaagaagtgcatcttcctgctgttcatcaaccacagactggtggagagcaccagcctgagaaaggccatcgagaccgtgtacgccgcctacctgcccaagaacacccaccccttcctgtacctgagcctggagatcagcccccagaacgtggacgtgaacgtgcaccccaccaagcacgaggtgcacttcctgcacgaggagagcatcctggagagagtgcagcagcacatcgagagcaagctgctgggcagcaacagcagcagaatgtacttcacccagaccctgctgcccggcctggccggccccagcggcgagatggtgaagagcaccaccagcctgaccagcagcagcaccagcggcagcagcgacaaggtgtacgcccaccagatggtgagaaccgacagcagagagcagaagctggacgccttcctgcagcccctgagcaagcccctgagcagccagccccaggccatcgtgaccgaggacaagaccgacatcagcagcggcagagccagacagcaggacgaggagatgctggagctgcccgcccccgccgaggtggccgccaagaaccagagcctggagggcgacaccaccaagggcaccagcgagatgagcgagaagagaggccccaccagcagcaaccccagaaagagacacagagaggacagcgacgtggagatggtggaggacgacagcagaaaggagatgaccgccgcctgcacccccagaagaagaatcatcaacctgaccagcgtgctgagcctgcaggaggagatcaacgagcagggccacgaggtgctgagagagatgctgcacaaccacagcttcgtgggctgcgtgaacccccagtgggccctggcccagcaccagaccaagctgtacctgctgaacaccaccaagctgagcgaggagctgttctaccagatcctgatctacgacttcgccaacttcggcgtgctgagactgagcgagcccgcccccctgttcgacctggccatgctggccctggacagccccgagagcggctggaccgaggaggacggccccaaggagggcctggccgagtacatcgtggagttcctgaagaagaaggccgagatgctggccgactacttcagcctggagatcgacgagagcgaggtgcccggcagcatccccaacagctggaagtggaccgtggagcacatcgtgtacaaggccctgagaagccacatcctgccccccaagcacttcaccgaggacggcaacatcctgcagctggccaacctgcccgacctgtacaaggtgttcgagagatgctag

SEQ ID NO: 92650 - DNA, 525 bp, Artificial Sequence
  derived and/or modified sequence
atgagcgagaagagaggccccaccagcagcaaccccagaaagagacacagagaggacagcgacgtggagatggtggaggacgacagcagaaaggagatgaccgccgcctgcacccccagaagaagaatcatcaacctgaccagcgtgctgagcctgcaggaggagatcaacgagcagggccacgaggtgctgagagagatgctgcacaaccacagcttcgtgggctgcgtgaacccccagccctggcacagcatcaagcccagctacaccttcagcaccccccccagcttcagcgaggagctgttctaccagatcctgatctacgacttcgccaacttcggcgtgctgagactgagcagcgaggtgcccggcagcatccccaacagctggaagtggaccgtggagcacatcgtgtacaaggccctgagaagccacatcctgccccccaagcacttcaccgaggacggcaacatcctgcagctggccaacctgcccgacctgtacaaggtgttcgagagatgctag

SEQ ID NO: 92651 - DNA, 960 bp, Artificial Sequence
  derived and/or modified sequence
atgatcgagaactgcctggacgccaagagcaccagcatccaggtgatcgtgaaggagggcggcctgaagctgatccagatccaggacaacggcaccggcatcagaaaggaggacctggacatcgtgtgcgagagattcaccaccagcaagctgcagagcttcgaggacctggccagcatcagcacctacggcttcagaggcgaggccctggccagcatcagccacgtggcccacgtgaccatcaccaccaagaccgccgacggcaagtgcgcctacagagccagctacagcgacggcaagctgaaggccccccccaagccctgcgccggcaaccagggcacccagatcaccgtggaggacctgttctacaacatcgccaccagaagaaaggccctgaagaaccccagcgaggagtacggcaagatcctggaggtggtgggcagatacagcgtgcacaacgccggcatcagcttcagcgtgaagaagcagggcgagaccgtggccgacgtgagaaccctgcccaacgccagcaccgtggacaacatcagaagcatcttcggcaacgccgtgagcagagagctgatcgagatcggctgcgaggacaagaccctggccttcaagatgaacggctacatcagcaacgccaactacagcgtgaagaagtgcatcttcctgctgttcatcaaccacagactggtggagagcaccagcctgagaaaggccatcgagaccgtgtacgccgcctacctgcccaagaacacccaccccttcctgtacctgagcctggagatcagcccccagaacgtggacgtgaacgtgcaccccaccaagcacgaggtgcacttcctgcacgaggagagcatcctggagagagtgcagcagcacatcgagagcaagctgctgggcagcaacagcagcagaatgtacttcacccagaaggagaccagcggcagattctag

SEQ ID NO: 92652 - DNA, 2040 bp, Artificial Sequence
  derived and/or modified sequence
tgaagactggacgagaccgtggtgaacagaatcgccgccggcgaggtgatccagagacccgccaacgccatcaaggagatgatcgagaactgcctggacgccaagagcaccagcatccaggtgatcgtgaaggagggcggcctgaagctgatccagatccaggacaacggcaccggcatcagaaaggaggacctggacatcgtgtgcgagagattcaccaccagcaagctgcagagcttcgaggacctggccagcatcagcacctacggcttcagaggcgaggccctggccagcatcagccacgtggcccacgtgaccatcaccaccaagaccgccgacggcaagtgcgcctacagagccagctacagcgacggcaagctgaaggccccccccaagccctgcgccggcaaccagggcacccagatcaccgtggaggacctgttctacaacatcgccaccagaagaaaggccctgaagaaccccagcgaggagtacggcaagatcctggaggtggtgggcagatacagcgtgcacaacgccggcatcagcttcagcgtgaagaagcagggcgagaccgtggccgacgtgagaaccctgcccaacgccagcaccgtggacaacatcagaagcatcttcggcaacgccgtgagcagagagctgatcgagatcggctgcgaggacaagaccctggccttcaagatgaacggctacatcagcaacgccaactacagcgtgaagaagtgcatcttcctgctgttcatcaaccacagactggtggagagcaccagcctgagaaaggccatcgagaccgtgtacgccgcctacctgcccaagaacacccaccccttcctgtacctgagcctggagatcagcccccagaacgtggacgtgaacgtgcaccccaccaagcacgaggtgcacttcctgcacgaggagagcatcctggagagagtgcagcagcacatcgagagcaagctgctgggcagcaacagcagcagaatgtacttcacccagaccctgctgcccggcctggccggccccagcggcgagatggtgaagagcaccaccagcctgaccagcagcagcaccagcggcagcagcgacaaggtgtacgcccaccagatggtgagaaccgacagcagagagcagaagctggacgccttcctgcagcccctgagcaagcccctgagcagccagccccaggccatcgtgaccgaggacaagaccgacatcagcagcggcagagccagacagcaggacgaggagatgctggagctgcccgcccccgccgaggtggccgccaagaaccagagcctggagggcgacaccaccaagggcaccagcgagatgagcgagaagagaggccccaccagcagcaaccccagaaagagacacagagaggacagcgacgtggagatggtggaggacgacagcagaaaggagatgaccgccgcctgcacccccagaagaagaatcatcaacctgaccagcgtgctgagcctgcaggaggagatcaacgagcagggccacgaggtgctgagagagatgctgcacaaccacagcttcgtgggctgcgtgaacccccagtgggccctggcccagcaccagaccaagctgtacctgctgaacaccaccaagctgagcgaggagctgttctaccagatcctgatctacgacttcgccaacttcggcgtgctgagactgagcgagcccgcccccctgttcgacctggccatgctggccctggacagccccgagagcggctggaccgaggaggacggccccaaggagggcctggccgagtacatcgtggagttcctgaagaagaaggccgagatgctggccgactacttcagcctggagatcgacgagagcgaggtgcccggcagcatccccaacagctggaagtggaccgtggagcacatcgtgtacaaggccctgagaagccacatcctgccccccaagcacttcaccgaggacggcaacatcctgcagctggccaacctgcccgacctgtacaaggtgttcgagagatgctag

SEQ ID NO: 92653 - DNA, 843 bp, Artificial Sequence
  derived and/or modified sequence
atgatcgagaactgcctggacgccaagagcaccagcatccaggtgatcgtgaaggagggcggcctgaagctgatccagatccaggacaacggcaccggcatcagaaaggaggacctggacatcgtgtgcgagagattcaccaccagcaagctgcagagcttcgaggacctggccagcatcagcacctacggcttcagaggcgaggccctggccagcatcagccacgtggcccacgtgaccatcaccaccaagaccgccgacggcaagtgcgcctacagagccagctacagcgacggcaagctgaaggccccccccaagccctgcgccggcaaccagggcacccagatcaccgtggaggacctgttctacaacatcgccaccagaagaaaggccctgaagaaccccagcgaggagtacggcaagatcctggaggtggtgggcagatacagcgtgcacaacgccggcatcagcttcagcgtgaagaagcagggcgagaccgtggccgacgtgagaaccctgcccaacgccagcaccgtggacaacatcagaagcatcttcggcaacgccgtgagcagagagctgatcgagatcggctgcgaggacaagaccctggccttcaagatgaacggctacatcagcaacgccaactacagcgtgaagaagtgcatcttcctgctgttcatcaaccacagactggtggagagcaccagcctgagaaaggccatcgagaccgtgtacgccgcctacctgcccaagaacacccaccccttcctgtacctgagactgtgctaccaggacctgctggcccccctgggcagatggctgaacccccagcaggtgtag

SEQ ID NO: 92654 - DNA, 1656 bp, Artificial Sequence
  derived and/or modified sequence
aagcccctgttgaatcacgttctcgcaataaagggaccaaggtcacgatggagaacattctacaatatagcgacccgcagaaaggccctcaagaatccgagcgaggagtacggtaaaattctggaggtggtgggaagatactccgtgcataatgctggtattagtttcagcgttaaaaagcaaggggaaactgttgccgacgtgcgcactctgccaaatgctagtacagtcgataatatacggagcattttcggcaatgccgtatcccgcgagttaattgaaatcggctgtgaagataagactctggcgtttaagatgaacggttatataagcaatgccaactactctgttaagaaatgtatcttcttactgttcatcaatcacaggctggtcgaatctacctcactgcggaaagctatagaaacagtttacgccgcttatttaccaaagaatacccacccattcttgtatctgtccctggagatctcgcctcaaaatgtcgatgtcaacgtccaccctaccaagcatgaggtccattttctgcatgaggagagcattttagagcgtgtacagcagcatatcgagagtaaattgctaggaagcaactcctcaaggatgtacttcacgcagaccctcctgcccggcctcgctggaccatcgggggagatggtgaagagcacaactagtctgactagttctagcacttctggtagttcggataaggtctatgcccatcagatggtgcggaccgattcaagagaacagaaactcgacgcgtttttgcagccactgtcaaagcctctgtctagtcagccacaagccattgttacagaagataagacagatatttcttcagggagggcccgccagcaggatgaagaaatgctggagttgcctgcccccgccgaagtggcggccaagaaccagagcttagagggcgacaccacaaaaggcaccagcgaaatgtccgagaagcgcggacccaccagctcaaacccacgtaaacgccatcgggaagactcggacgtggagatggtggaggacgattccaggaaagagatgacggcggcttgtacacctagacgcagaatcataaacctaacaagtgtcctgagtctccaggaggaaattaacgagcagggccacgaagtcttacgggagatgctgcataaccattccttcgtgggatgtgttaatccacagtgggccctggctcagcatcagacaaagctgtacctgctcaacactactaaactctccgaggaattgttttaccaaatactgatctatgattttgcaaattttggggtcctgagattgtctgagcctgctcctctgttcgatctagctatgcttgccttagacagcccggaatcaggctggaccgaagaggatggtccgaaagagggtctggctgaatacatcgtggaattcctgaagaagaaagctgagatgctggccgattatttctcactggaaatcgatgagtcagaggttcctggctctatccccaattcatggaagtggacagtcgaacacattgtttataaagccctgcgctcgcatatcctcccaccgaagcacttcaccgaggatggtaacatactgcagctggcaaatctgccagacctatacaaggtgttcgaacgctgttag

SEQ ID NO: 92655 - DNA, 525 bp, Artificial Sequence
  derived and/or modified sequence
atgtcagagaagagagggcccacctcgtctaaccctcggaagaggcaccgagaggacagcgacgtagaaatggttgaggatgactccagaaaagaaatgacagctgcctgcactcctagacggaggatcattaacctgacgtctgtcctgagcctccaggaggaaatcaatgagcaggggcatgaggtcctacgcgagatgttacataatcactctttcgtgggatgcgtaaatccccagccgtggcacagcataaaacctagctatactttctccactcctccgtctttcagcgaggaactcttttatcagatcttgatctacgacttcgccaacttcggcgtgttacggctatcgtctgaagtcccagggtctatccctaacagctggaagtggacagtcgagcacatcgtttacaaggccctgcggagccacattctcccacccaagcatttcactgaggacggaaacatcctccagttggccaatctccccgatctctataaagtcttcgaacgctgctag

SEQ ID NO: 92656 - DNA, 960 bp, Artificial Sequence
  derived and/or modified sequence
atgattgagaactgccttgacgccaagtctacctccattcaggtgatcgttaaggaaggtggactgaagttaattcaaattcaggacaatggcacgggaattaggaaagaggacctagacatcgtttgtgaacggtttaccacctccaagttgcagagcttcgaagatctggctagcatctccacctatggtttccgcggagaagctctagcgagtatttcccacgtagcgcacgtgactattactactaagaccgcagatggcaagtgcgcatatcgggccagctactccgacggcaagctcaaggctccaccgaaaccctgcgccggaaatcaaggaacacaaattaccgtggaggatctgttctacaatattgcaacacgcaggaaagccctgaaaaacccttcagaggagtacggtaagattctggaagtagttggcagatattctgtccataatgctggtattagtttctctgtgaagaaacagggagaaactgttgccgacgtgcgtacgctcccgaacgcgtccactgtcgataacatacgatctattttcggcaacgcggttagtagggaactgatcgaaattgggtgcgaagacaagaccctggcgtttaaaatgaacggctacatcagtaacgctaattacagtgtgaagaaatgcatattccttctatttataaatcaccgccttgtggaatcaacctcccttcggaaggctatcgagactgtctacgctgcctacttgcctaaaaacacccaccctttcctgtatctgtccctggagataagccctcagaacgtggacgtaaacgtacatcctactaaacacgaggttcatttccttcacgaggagtcaattttggaacgcgtccaacagcacatcgagtcaaagttactgggttcgaatagctcccgaatgtacttcacacaaaaggaaacctctgggcgcttttag

SEQ ID NO: 92657 - DNA, 2040 bp, Artificial Sequence
  derived and/or modified sequence
tgaaggctggacgaaacagtcgttaatagaatcgccgcgggcgaagtgatacagcgtccggcaaatgcaattaaagagatgattgaaaactgtttagacgcaaaaagtacctctatccaggtaattgtgaaggagggcggactgaagctgatccagatccaggacaatgggacgggaattcgcaaagaagacctggatatcgtgtgcgaacggttcacgactagtaagttgcagtcctttgaagacctcgcttcgatttcaacatacggcttcaggggcgaggcgttggcctccattagccatgtggcacatgtcactatcactacaaagactgccgatggcaaatgtgcgtacagagcatcttacagcgatggaaagctgaaggctccccccaagccgtgtgcaggaaatcagggtacacagataaccgtagaagacctgttctacaacattgcaacaagaaggaaggctctcaaaaacccctccgaagaatatggcaagattctggaggtcgtaggaaggtacagtgtgcacaatgctggcatctccttctccgtgaagaaacaaggcgagactgtggcagatgttagaaccctgcccaacgcttctactgtagacaatatccgttccattttcggaaatgctgttagtagggagttgattgagattggctgtgaggacaaaacactagcattcaagatgaacgggtatatatccaatgcaaattactcagtgaaaaagtgtatctttctgctgtttattaaccatcgactggtcgagtctacctcgctgcggaaggccatcgagacagtgtacgctgcttacctgcccaagaacacgcacccattcctgtatctgagtctcgagatttccccacaaaatgttgacgtcaacgtgcaccccaccaagcacgaagtgcacttcttacacgaagagagcattctggagcgggttcagcagcatatcgagagtaagctcctgggttctaactcctcacgtatgtattttacacaaaccctcctccctgggctcgcaggccctagcggagaaatggttaagtcaaccaccagtctcacctcatctagtacgagcggctcaagcgataaagtttacgcacatcaaatggtccgcacggacagtagggagcagaagttggatgccttcctccagcccttgagtaagccactgtcatcacagccacaggccattgtaacagaggacaagaccgatatatcttccggccgggcccgtcagcaagatgaggaaatgttggaactgcctgcccctgctgaagtggcagcaaagaatcagagccttgaaggcgacacaactaagggaaccagcgagatgtctgaaaaaaggggcccaaccagcagcaacccgagaaaaagacaccgagaggattctgacgtggaaatggtagaggatgactctagaaaagagatgaccgcagcatgcacacctcggcgaaggataattaacctcacttccgtcttgtctctgcaagaagagatcaatgagcaaggacacgaagtccttcgggagatgctgcacaaccattccttcgtgggctgcgtcaacccgcagtgggcactggctcagcaccagacaaagttgtatctgctgaatacgactaaattgtccgaagaactgttttaccagatcctgatctacgatttcgcaaattttggagtgctgcgactgtccgaacctgctcctctttttgacctggcaatgctcgccctggactccccggagagcggctggacggaagaagacggcccaaaagaaggcctggcagaatacatcgtggaatttctgaaaaagaaagctgagatgctcgccgattattttagtttagagattgatgaaagcgaagtcccaggttcaatacccaattcctggaagtggactgtcgagcacatagtgtacaaagcccttaggtctcatattctgcctccaaaacactttactgaagatgggaacattctacagctggctaaccttcctgacttgtataaggttttcgaaaggtgctag

SEQ ID NO: 92658 - DNA, 843 bp, Artificial Sequence
  derived and/or modified sequence
atgattgagaattgcttggacgcgaagagcaccagtattcaggtgattgtgaaggaaggtggcttaaaactcattcagatacaagataacggcacaggcatacgaaaggaagaccttgacatcgtgtgtgagcgcttcacaaccagcaagttgcagagttttgaggacctggcctcaatatccacttatggctttcgcggcgaagctttggcaagtatttctcacgtcgcccacgtcaccataactacaaagacagcggatggaaaatgcgcgtacagagctagttatagcgacggcaagctgaaggcaccaccgaaaccttgtgcaggaaatcaagggacacaaattaccgtcgaggacctgttctacaacattgctactcggcggaaggcactcaagaacccatccgaggaatatggaaaaattcttgaagtagtgggccgctactctgtgcacaacgcagggatcagctttagtgtcaaaaagcagggagagaccgtcgccgatgtccgcacgcttccaaacgcttcaacagtggataacatcaggtcaatcttcgggaatgccgtatctagagagctaattgagattggctgtgaagataaaactcttgcctttaaaatgaatggttatataagtaacgctaactactccgtgaagaagtgcatttttttgctgttcatcaatcaccgtctggtcgagtccactagcctgagaaaggccattgagaccgtgtacgctgcatacttgcccaaaaacacacacccattcctgtacctgcgactctgttaccaggatctgctagcacccctgggcagatggttgaatccgcagcaggtttag

SEQ ID NO: 92659 - DNA, 1656 bp, Artificial Sequence
  derived and/or modified sequence
aagcccctgctgaaccacgtgctggccatcaagggccccaggagccgctggaggaccttctacaacatcgccaccaggaggaaggccctgaagaaccccagcgaggagtatggcaagatcctggaggtggtgggccgctacagcgtgcacaatgccggcatctccttctctgtgaagaagcagggcgagaccgtggctgatgtgaggaccctgcccaatgccagcacagtggacaacatccgcagcatctttggaaatgctgtgtcccgggagctgattgaaattggctgtgaggacaagaccctggccttcaagatgaatggctacatcagcaatgccaactacagcgtgaagaagtgcatcttcctgctcttcatcaaccaccggctggtggagagcaccagcctgaggaaggccatcgagaccgtgtatgctgcctacctgcccaagaacacccaccccttcctgtacctgagcctggagatcagcccccagaatgtggatgtgaatgtgcaccccaccaagcatgaggtgcacttcctgcacgaggagagcatcctggagcgggtgcagcagcacatcgagagcaagctgctgggcagcaacagcagcaggatgtacttcacccagaccctgctgcccggcctggccggccccagcggggagatggtgaagagcaccaccagcctgaccagcagcagcaccagcggcagcagtgacaaggtgtatgcccaccagatggtgaggacagacagccgggagcagaagctggatgccttcctgcagcccctgagcaagcccctgagcagccagccccaggccatcgtgacagaggacaagacagacatcagcagcggccgggcccggcagcaggatgaggagatgctggagctgcctgccccagctgaggtggccgccaagaaccagagcctggagggggacaccaccaagggcaccagcgagatgtctgagaagaggggccccaccagcagcaaccccaggaagaggcacagagaagattctgatgtggagatggtggaggatgacagcaggaaggagatgacagctgcctgcaccccaagaagacgcatcatcaacctgacctctgtgctgagcctgcaggaggagatcaatgagcagggccacgaggtgctgcgggagatgctgcacaaccacagctttgtgggctgtgtgaacccccagtgggccctggcccagcaccagaccaagctgtacctgctgaacaccaccaagctgtctgaggagctgttctaccagatcctgatctatgactttgccaactttggagtgctgcggctgtctgagcccgcccccctgtttgacctggccatgctggccctggacagccctgagagcggctggacagaggaggatggccccaaggagggcctggccgagtacatcgtggagttcctgaagaagaaggccgagatgctggccgactacttcagcctggagattgatgaaagtgaggtgcccggcagcatccccaacagctggaagtggacagtggagcacatcgtgtacaaggccctgcggagccacatcctgccccccaagcacttcacagaagatggcaacatcctgcagctggccaacctgcctgacctgtacaaggtgtttgagcgctgctag

SEQ ID NO: 92660 - DNA, 525 bp, Artificial Sequence
  derived and/or modified sequence
atgtctgagaagaggggccccaccagcagcaaccccaggaagaggcaccgggaggacagtgatgtggagatggtggaggatgacagcaggaaggagatgacagctgcctgcaccccccggcggcgcatcatcaacctgacctctgtgctgagcctgcaggaggagatcaatgagcagggccacgaggtgctgcgggagatgctgcacaaccacagctttgtgggctgtgtgaacccccagccctggcacagcatcaagcccagctacaccttcagcaccccacccagcttcagcgaggagctgttctaccagatcctgatctatgactttgccaactttggagtgctgcggctgagcagcgaggtgcccggcagcatccccaacagctggaagtggacagtggagcacatcgtgtacaaggccctgcggagccacatcctgccccccaagcacttcacagaagatggcaacatcctgcagctggccaacctgcctgacctgtacaaggtgtttgagcgctgctag

SEQ ID NO: 92661 - DNA, 960 bp, Artificial Sequence
  derived and/or modified sequence
atgattgagaactgcctggatgccaagagcaccagcatccaggtgattgtgaaggagggcggcctgaagctgatccagatccaggacaatggcaccggcatcagaaaagaagacctggacatcgtgtgtgagcgcttcaccaccagcaagctgcagagctttgaggacctggccagcatcagcacctacggcttccggggggaggccctggccagcatcagccacgtggcccacgtgaccatcaccaccaagacagcagatggaaaatgtgcctaccgggccagctacagtgatggcaagctgaaggccccacccaagccctgtgccggcaaccagggcacccagatcaccgtggaggacctcttctacaacatcgccaccaggaggaaggccctgaagaaccccagcgaggagtatggcaagatcctggaggtggtgggccgctacagcgtgcacaatgccggcatctccttctctgtgaagaagcagggcgagaccgtggctgatgtgaggaccctgcccaatgccagcacagtggacaacatccgcagcatctttggaaatgctgtgtcccgggagctgattgaaattggctgtgaggacaagaccctggccttcaagatgaatggctacatcagcaatgccaactacagcgtgaagaagtgcatcttcctgctcttcatcaaccaccggctggtggagagcaccagcctgaggaaggccatcgagaccgtgtatgctgcctacctgcccaagaacacccaccccttcctgtacctgagcctggagatcagcccccagaatgtggatgtgaatgtgcaccccaccaagcatgaggtgcacttcctgcacgaggagagcatcctggagcgggtgcagcagcacatcgagagcaagctgctgggcagcaacagcagcaggatgtacttcacccagaaggagaccagcggccgcttctag

SEQ ID NO: 92662 - DNA, 2040 bp, Artificial Sequence
  derived and/or modified sequence
tgaagactggatgagaccgtggtgaacagaattgctgctggggaggtgatccagaggcctgccaatgccatcaaggagatgattgagaactgcctggatgccaagagcaccagcatccaggtgattgtgaaggagggcggcctgaagctgatccagatccaggacaatggcaccggcatcagaaaagaagacctggacatcgtgtgtgagcgcttcaccaccagcaagctgcagagctttgaggacctggccagcatcagcacctacggcttccggggggaggccctggccagcatcagccacgtggcccacgtgaccatcaccaccaagacagcagatggaaaatgtgcctaccgggccagctacagtgatggcaagctgaaggccccacccaagccctgtgccggcaaccagggcacccagatcaccgtggaggacctcttctacaacatcgccaccaggaggaaggccctgaagaaccccagcgaggagtatggcaagatcctggaggtggtgggccgctacagcgtgcacaatgccggcatctccttctctgtgaagaagcagggcgagaccgtggctgatgtgaggaccctgcccaatgccagcacagtggacaacatccgcagcatctttggaaatgctgtgtcccgggagctgattgaaattggctgtgaggacaagaccctggccttcaagatgaatggctacatcagcaatgccaactacagcgtgaagaagtgcatcttcctgctcttcatcaaccaccggctggtggagagcaccagcctgaggaaggccatcgagaccgtgtatgctgcctacctgcccaagaacacccaccccttcctgtacctgagcctggagatcagcccccagaatgtggatgtgaatgtgcaccccaccaagcatgaggtgcacttcctgcacgaggagagcatcctggagcgggtgcagcagcacatcgagagcaagctgctgggcagcaacagcagcaggatgtacttcacccagaccctgctgcccggcctggccggccccagcggggagatggtgaagagcaccaccagcctgaccagcagcagcaccagcggcagcagtgacaaggtgtatgcccaccagatggtgaggacagacagccgggagcagaagctggatgccttcctgcagcccctgagcaagcccctgagcagccagccccaggccatcgtgacagaggacaagacagacatcagcagcggccgggcccggcagcaggatgaggagatgctggagctgcctgccccagctgaggtggccgccaagaaccagagcctggagggggacaccaccaagggcaccagcgagatgtctgagaagaggggccccaccagcagcaaccccaggaagaggcacagagaagattctgatgtggagatggtggaggatgacagcaggaaggagatgacagctgcctgcaccccaagaagacgcatcatcaacctgacctctgtgctgagcctgcaggaggagatcaatgagcagggccacgaggtgctgcgggagatgctgcacaaccacagctttgtgggctgtgtgaacccccagtgggccctggcccagcaccagaccaagctgtacctgctgaacaccaccaagctgtctgaggagctgttctaccagatcctgatctatgactttgccaactttggagtgctgcggctgtctgagcccgcccccctgtttgacctggccatgctggccctggacagccctgagagcggctggacagaggaggatggccccaaggagggcctggccgagtacatcgtggagttcctgaagaagaaggccgagatgctggccgactacttcagcctggagattgatgaaagtgaggtgcccggcagcatccccaacagctggaagtggacagtggagcacatcgtgtacaaggccctgcggagccacatcctgccccccaagcacttcacagaagatggcaacatcctgcagctggccaacctgcctgacctgtacaaggtgtttgagcgctgctag

SEQ ID NO: 92663 - DNA, 843 bp, Artificial Sequence
  derived and/or modified sequence
atgattgagaactgcctggatgccaagagcaccagcatccaggtgattgtgaaggagggcggcctgaagctgatccagatccaggacaatggcaccggcatcagaaaagaagacctggacatcgtgtgtgagcgcttcaccaccagcaagctgcagagctttgaggacctggccagcatcagcacctacggcttccggggggaggccctggccagcatcagccacgtggcccacgtgaccatcaccaccaagacagcagatggaaaatgtgcctaccgggccagctacagtgatggcaagctgaaggccccacccaagccctgtgccggcaaccagggcacccagatcaccgtggaggacctcttctacaacatcgccaccaggaggaaggccctgaagaaccccagcgaggagtatggcaagatcctggaggtggtgggccgctacagcgtgcacaatgccggcatctccttctctgtgaagaagcagggcgagaccgtggctgatgtgaggaccctgcccaatgccagcacagtggacaacatccgcagcatctttggaaatgctgtgtcccgggagctgattgaaattggctgtgaggacaagaccctggccttcaagatgaatggctacatcagcaatgccaactacagcgtgaagaagtgcatcttcctgctcttcatcaaccaccggctggtggagagcaccagcctgaggaaggccatcgagaccgtgtatgctgcctacctgcccaagaacacccaccccttcctgtacctgcggctgtgctaccaggacctgctggcccccctgggccgctggctgaacccccagcaggtgtag

SEQ ID NO: 92664 - DNA, 1656 bp, Artificial Sequence
  derived and/or modified sequence
aagcccctgctgaaccacgtgctggccatcaagggcccccggagcaggtggcgaactttctataatatcgcaacccgccgaaaggctttgaaaaatcctagtgaagagtacgggaaaattctcgaggtcgttggacgctatagtgtccacaacgctggcatcagcttctctgttaagaaacagggagagacagtggcggatgtgaggactctgccgaatgcgagcaccgtcgacaacataaggtccatttttggcaatgccgtatcacgggagctcattgagatcgggtgcgaggacaagaccttggcgttcaaaatgaatggctatattagcaacgccaattactccgtcaaaaagtgtatttttttgctgttcattaatcaccgattagtcgaatccaccagtctccgaaaagccatcgagaccgtttatgctgcttacctacccaagaatacccacccgttcctctacttgagccttgagatctccccacaaaacgttgacgtgaacgttcacccaaccaagcacgaagtgcatttcctgcatgaagaatctatcctcgagcgggtacaacagcacatcgaaagtaagctgttgggcagtaactcaagtcgaatgtattttacacagaccctgctccctggccttgccggtcctagtggcgagatggttaagtccacaacatccctgacgagctcctcaacctccggcagtagcgacaaggtctatgctcaccaaatggtacgtacagatagccgagaacagaagttggatgcttttctccaacctctgtccaagcccctctccagccagccccaagcaatcgtgactgaagacaaaacagacatttcctccgggcgggcgagacaacaggacgaagagatgctggagttgccggccccagcagaggtggccgccaaaaaccaatccctggagggggacaccaccaagggcacttccgaaatgtcagaaaagcggggccctacttcttccaatcccaggaaacgacatcgggaagactcggatgtggagatggttgaagacgacagccggaaagaaatgaccgccgcctgtacaccgaggcgtcgtataattaacctgacttccgtgctctccctccaggaggaaataaatgagcagggccatgaagtactgcgcgagatgctccacaaccacagtttcgtcggctgcgtgaacccacagtgggctttagcacagcaccagactaaattgtatcttctgaataccacaaagctgagtgaggagctcttctaccagatactgatttacgatttcgctaattttggtgtactccgactgtctgagcccgccccactattcgatctagcgatgctggctctggactctccagaatctggatggactgaagaggacggcccaaaagagggactagccgagtacatcgtagagtttctgaagaaaaaggctgaaatgcttgccgactatttctctcttgagatcgacgagagcgaggtacctggaagtatcccgaacagttggaagtggaccgtggaacacatcgtctataaagctctccgatcccacatcctgcccccaaagcactttaccgaggacggaaatattttgcagcttgctaatctgccagatttgtacaaagtgttcgaacgttgttag

SEQ ID NO: 92665 - DNA, 525 bp, Artificial Sequence
  derived and/or modified sequence
atgagcgagaagcggggccccaccagcagcaacccccggaagcggcacagagaggactctgatgtggagatggttgaagatgatagcaggaaggagatgacagccgcctgcaccccaagacggcgcattatcaacctgacatctgtactctccctgcaggaggagataaatgagcaaggccacgaggtgctacgagaaatgttacacaaccactcattcgttggctgtgtaaatcctcagccttggcattcaatcaaaccgagctacaccttctccacccctccttctttttccgaagaattgttctaccagatcctgatatacgactttgccaactttggggtacttcgactcagttccgaagtaccagggtcaatccctaactcctggaagtggaccgtggagcatattgtatataaagctctgaggagtcacattctccctcccaaacatttcacagaagatggcaacatcctgcagctagcgaatctgccagacctgtacaaagtgttcgaaaggtgttag

SEQ ID NO: 92666 - DNA, 960 bp, Artificial Sequence
  derived and/or modified sequence
atgatcgagaactgcctggacgccaagagcaccagcatccaggtgatcgttaaggagggtggcctgaaattgatccagatccaggacaatgggacggggattcgtaaggaggaccttgacatcgtgtgtgagcgatttacaacctccaagctgcagagttttgaggatctggcatcaatttctacctatgggttccggggcgaggcactggccagtataagtcacgtggcacacgtgacgatcacaacaaaaacagcagatggtaagtgtgcctacagggcctcttatagcgatggcaaacttaaggctccccctaagccatgcgcaggaaaccagggcacgcagatcactgttgaagatctgttctacaacatcgctaccagacgaaaagcactgaaaaatccgtccgaggagtacggtaagatcctcgaggttgtcgggcgctatagcgtgcataacgcaggcatctcattcagtgtgaaaaaacagggggaaacggttgccgatgtccggacccttccaaatgcctcaaccgtggataacatacggtctatctttggtaacgccgtgtctcgcgaactgatcgaaattggttgtgaggacaagaccctcgcttttaaaatgaacggatacataagtaacgcaaattactctgtcaagaagtgtatctttctactgtttataaatcacaggctcgtggagagtacctctttgcgaaaagccatagagacagtgtatgccgcctatctccccaaaaacacccacccgttcctttacctttccctggaaatctccccccaaaacgtcgacgtgaatgtacatcccactaaacatgaggtgcactttctgcatgaggagtcaatactggaaagggtgcaacagcacattgagtccaagttgttaggtagcaattcatctcgcatgtattttacacaaaaggagacaagcggacggttttag

SEQ ID NO: 92667 - DNA, 2040 bp, Artificial Sequence
  derived and/or modified sequence
tgacggctggacgagaccgtggtgaaccggatcgccgccggcgaggtcatccagagacccgcaaacgccatcaaggagatgatcgaaaattgcttggatgcaaaatccacatccattcaggtgatcgtgaaggaaggcggtttaaagttaattcagattcaagacaacggcactggtatacggaaagaggatctcgacatcgtttgcgagcgctttaccacttctaaactccagtcttttgaggacctggccagcatatcgacctacggtttcagaggcgaggccctggcctctatttcccacgtggcccacgtgacaatcacaaccaagacagccgacggtaagtgcgcatatagagccagctactctgacggcaagctgaaagctcctccgaagccttgcgccggtaatcagggcactcagatcacagtcgaagatctgttctataacatcgcaaccaggagaaaggcgctgaaaaatcccagcgaggagtatgggaaaatcctggaagtggttggtcggtactccgttcacaacgcaggtatctcatttagtgtgaagaagcaaggcgagaccgtcgccgatgtgagaaccctgcctaatgcatccaccgtggataatattagaagcatcttcggcaatgccgtatctcgcgaattgatcgagatcgggtgtgaagataagacattagccttcaaaatgaacggatatattagcaacgccaattactccgttaagaaatgcatttttctgcttttcattaatcaccggcttgtggaaagtacatctctgagaaaggctatcgagacagtttacgctgcctacctgcccaagaatacccatcccttcctctacctgtcattggaaatttccccacagaatgtggatgtgaatgtccacccgaccaaacacgaggtccactttctccacgaagagtcgatcctcgaaagagttcagcagcacatcgaaagtaagctactgggcagcaacagttcccggatgtacttcacacaaactctgctgccagggctggctggaccatccggcgagatggtcaaatcaactacatccttgactagttcctctacatcagggtcatccgataaagtctacgcccaccagatggtgcggaccgatagccgcgaacagaagctggatgcctttttacaaccgctgagtaaacctctgtccagccaacctcaagcaattgtgactgaggataagactgacattagttctggaagagccagacagcaggacgaggaaatgttggaactgcccgcacccgctgaggtggccgctaaaaatcagtctctcgagggggataccacgaaaggcacttcagagatgagcgagaaacggggcccaacctcttctaaccctagaaaacgacacagggaagattcagatgtggagatggttgaggatgattctcggaaagagatgactgccgcatgtacacctaggcggcgaatcattaatcttacatccgttctgtcactgcaggaggaaatcaatgaacaggggcatgaggtgttgcgcgaaatgctccacaatcacagcttcgtgggctgtgtaaaccctcagtgggcgcttgctcaacaccagacgaagctctacttgttaaataccactaagctgtctgaggagctgttttaccagattctgatctatgattttgcaaattttggcgttttgagattgagtgaacccgccccgctctttgatcttgcaatgctggcactggattccccagaaagcgggtggaccgaggaagatgggcccaaagaagggctggcggaatatattgtggagttcctcaagaagaaggctgagatgttagctgactatttcagcctagagatcgatgagagcgaagtgcctggatctatccctaactcctggaagtggactgtcgaacacatcgtttataaggctctgagaagccacatactgcctcctaagcattttacagaagatggaaatattctgcagctggctaacctccctgatctgtataaggtttttgagcgctgctag

SEQ ID NO: 92668 - DNA, 843 bp, Artificial Sequence
  derived and/or modified sequence
atgatcgagaactgcctggacgccaagagcaccagcatccaggtgatcgttaaggagggtgggttgaaactcattcagatccaggacaatggcaccggcattcgtaaggaggatttggatatcgtctgtgagcggtttactacctctaaattgcagtccttcgaggatctggcgagtatttctacttacgggttcaggggcgaggctctcgcctcgatcagtcacgttgcgcatgtgacgataactaccaaaacagccgatggtaagtgtgcttacagggcttcctactccgatggcaagctcaaagctcccccaaagccttgtgctgggaaccaggggactcagatcacagtcgaggatctcttttacaacatcgcaacccgccgtaaagctctgaaaaatcccagcgaggaatacggcaagatacttgaagtggttggaaggtatagtgtacataatgcaggtattagctttagcgttaagaaacagggagagaccgttgcagacgtcagaactctgcctaacgcctctactgttgacaacattcggagtatcttcgggaatgctgttagtagggagcttatcgagatcggttgcgaagacaagaccttggcttttaagatgaatggttatatcagcaacgccaattattcagtgaagaaatgtatattcttattgttcattaaccatcgcctggttgaaagtacctcacttcgcaaggccattgagacagtttatgccgcctacttaccaaaaaatacacacccctttctctaccttagactctgttatcaggacctgctggcccccttggggcgctggctcaaccctcaacaggtgtag

SEQ ID NO: 92669 - DNA, 2251 bp, Artificial Sequence
  derived and/or modified sequence
aaaatgtcgttcgtggcaggggttattcggcggctggacgagacagtggtgaaccgcatcgcggcgggggaagttatccagcggccagctaatgctatcaaagagatgattgagaactgtttagatgcaaaatccacaagtattcaagtgattgttaaagagggaggcctgaagttgattcagatccaagacaatggcaccgggatcaggaaagaagatctggatattgtatgtgaaaggttcactactagtaaactgcagtcctttgaggatttagccagtatttctacctatggctttcgaggtgaggctttggccagcataagccatgtggctcatgttactattacaacgaaaacagctgatggaaagtgtgcatacagagcaagttactcagatggaaaactgaaagcccctcctaaaccatgtgctggcaatcaagggacccagatcacggtggaggaccttttacaacatagccacgaggagaaaagctttaaaaaatccaagtgaagaatatgggaaaattttggaagttgttggcaggtattcagtacacaatgcaggcattagtttctcagttaaaaaacaaggagagacagtagctgatgttaggacactacccaatgcctcaaccgtggacaatattcgctccatctttggaaatgctgttagtcgagaactgatagaaattggatgtgaggataaaaccctagccttcaaaatgaatggttacatatccaatgcaaactactcagtgaagaagtgcatcttcttactcttcatcaaccatcgtctggtagaatcaacttccttgagaaaagccatagaaacagtgtatgcagcctatttgcccaaaaacacacacccattcctgtacctcagtttagaaatcagtccccagaatgtggatgttaatgtgcaccccacaaagcatgaagttcacttcctgcacgaggagagcatcctggagcgggtgcagcagcacatcgagagcaagctcctgggctccaattcctccaggatgtacttcacccagactttgctaccaggacttgctggcccctctggggagatggttaaatccacaacaagtctgacctcgtcttctacttctggaagtagtgataaggtctatgcccaccagatggttcgtacagattcccgggaacagaagcttgatgcatttctgcagcctctgagcaaacccctgtccagtcagccccaggccattgtcacagaggataagacagatatttctagtggcagggctaggcagcaagatgaggagatgcttgaactcccagcccctgctgaagtggctgccaaaaatcagagcttggagggggatacaacaaaggggacttcagaaatgtcagagaagagaggacctacttccagcaaccccagaaagagacatcgggaagattctgatgtggaaatggtggaagatgattcccgaaaggaaatgactgcagcttgtaccccccggagaaggatcattaacctcactagtgttttgagtctccaggaagaaattaatgagcagggacatgaggttctccgggagatgttgcataaccactccttcgtgggctgtgtgaatcctcagtgggccttggcacagcatcaaaccaagttataccttctcaacaccaccaagcttagtgaagaactgttctaccagatactcatttatgattttgccaattttggtgttctcaggttatcggagccagcaccgctctttgaccttgccatgcttgccttagatagtccagagagtggctggacagaggaagatggtcccaaagaaggacttgctgaatacattgttgagtttctgaagaagaaggctgagatgcttgcagactatttctctttggaaattgatgagagtgaagtgcctggctccattccaaactcctggaagtggactgtggaacacattgtctataaagccttgcgctcacacattctgcctcctaaacatttcacagaagatggaaatatcctgcagcttgctaacctgcctgatctatacaaagtctttgagaggtgttaaatatggttatttatgcactgtgggatgtgttcttctttctctgtattccgatacaaagtgttgtatcaaagtgtgatatacaaagtgtaccaacataagtgttggtagcacttaagacttatacttgccttctgatagtattcctttatacacagtggattgattataaataaatagatgtgtctt

SEQ ID NO: 92670 - DNA, 2024 bp, Artificial Sequence
  derived and/or modified sequence
aaaatgtcgttcgtggcaggggttattcggcggctggacgagacagtggtgaaccgcatcgcggcgggggaagttatccagcggccagctaatgctatcaaagagatgattgagaactgtttagatgcaaaatccacaagtattcaagtgattgttaaagagggaggcctgaagttgattcagatccaagacaatggcaccgggatcaggaaagaagatctggatattgtatgtgaaaggttcactactagtaaactgcagtcctttgaggatttagccagtatttctacctatggctttcgaggtgaggctttggccagcataagccatgtggctcatgttactattacaacgaaaacagctgatggaaagtgtgcatacagagcaagttactcagatggaaaactgaaagcccctcctaaaccatgtgctggcaatcaagggacccagatcacggtggaggaccttttttacaacatagccacgaggagaaaagctttaaaaaatccaagtgaagaatatgggaaaattttggaagttgttggcaggtattcagtacacaatgcaggcattagtttctcagttaaaaaacaaggagagacagtagctgatgttaggacactacccaatgcctcaaccgtggacaatattcgctccatctttggaaatgctgttagtcgagaactgatagaaattggatgtgaggataaaaccctagccttcaaaatgaatggttacatatccaatgcaaactactcagtgaagaagtgcatcttcttactcttcatcaaccatcgtctggtagaatcaacttccttgagaaaagccatagaaacagtgtatgcagcctatttgcccaaaaacacacacccattcctgtacctcagtttagaaatcagtccccagaatgtggatgttaatgtgcaccccacaaagcatgaagttcacttcctgcacgaggagagcatcctggagcgggtgcagcagcacatcgagagcaagctcctgggctccaattcctccaggatgtacttcacccagactttgctaccaggacttgctggcccctctggggagatggttaaatccacaacaagtctgacctcgtcttctacttctggaagtagtgataaggtctatgcccaccagatggttcgtacagattcccgggaacagaagcttgatgcatttctgcagcctctgagcaaacccctgtccagtcagccccaggccattgtcacagaggataagacagatatttctagtggcagggctaggcagcaagatgaggagatgcttgaactcccagcccctgctgaagtggctgccaaaaatcagagcttggagggggatacaacaaaggggacttcagaaatgtcagagaagagaggacctacttccagcaaccccagaaagagacatcgggaagattctgatgtggaaatggtggaagatgattcccgaaaggaaatgactgcagcttgtaccccccggagaaggatcattaacctcactagtgttttgagtctccaggaagaaattaatgagcagggacatgaggttctccgggagatgttgcataaccactccttcgtgggctgtgtgaatcctcagtgggccttggcacagcatcaaaccaagttataccttctcaacaccaccaagcttagagtgaagtgcctggctccattccaaactcctggaagtggactgtggaacacattgtctataaagccttgcgctcacacattctgcctcctaaacatttcacagaagatggaaatatcctgcagcttgctaacctgcctgatctatacaaagtctttgagaggtgttaaatatggttatttatgcactgtgggatgtgttcttctttctctgtattccgatacaaagtgttgtatcaaagtgtgatatacaaagtgtaccaacataagtgttggtagcacttaagacttatacttgccttctgatagtattcctttatacacagtggattgattataaataaatagatgtgtctt

SEQ ID NO: 92671 - DNA, 2085 bp, Artificial Sequence
  derived and/or modified sequence
aaaatgtcgttcgtggcaggggttattcggcggctggacgagacagtggtgaaccgcatcgcggcgggggaagttatccagcggccagctaatgctatcaaagagatgattgagaactgtttagatgcaaaatccacaagtattcaagtgattgttaaagagggaggcctgaagttgattcagatccaagacaatggcaccgggatcaggaaagaagatctggatattgtatgtgaaaggttcactactagtaaactgcagtcctttgaggatttagccagtatttctacctatggctttcgaggtgaggctttggccagcataagccatgtggctcatgttactattacaacgaaaacagctgatggaaagtgtgcatacagagcaagttactcagatggaaaactgaaagcccctcctaaaccatgtgctggcaatcaagggacccagatcacggtggaggaccttttttacaacatagccacgaggagaaaagctttaaaaaatccaagtgaagaatatgggaaaattttggaagttgttggcaggtattcagtacacaatgcaggcattagtttctcagttaaaaaacaaggagagacagtagctgatgttaggacactacccaatgcctcaaccgtggacaatattcgctccatctttggaaatgctgttagtcgagaactgatagaaattggatgtgaggataaaaccctagccttcaaaatgaatggttacatatccaatgcaaactactcagtgaagaagtgcatcttcttactcttcatcaaccatcgtctggtagaatcaacttccttgagaaaagccatagaaacagtgtatgcagcctatttgcccaaaaacacacacccattcctgtacctcagtttagaaatcagtccccagaatgtggatgttaatgtgcaccccacaaagcatgaagttcacttcctgcacgaggagagcatcctggagcgggtgcagcagcacatcgagagcaagctcctgggctccaattcctccaggatgtacttcacccagactttgctaccaggacttgctggcccctctggggagatggttaaatccacaacaagtctgacctcgtcttctacttctggaagtagtgataaggtctatgcccaccagatggttcgtacagattcccgggaacagaagcttgatgcatttctgcagcctctgagcaaacccctgtccagtcagccccaggccattgtcacagaggataagacagatatttctagtggcagggctaggcagcaagatgaggagatgcttgaactcccagcccctgctgaagtggctgccaaaaatcagagcttggagggggatacaacaaaggggacttcagaaatgtcagagaagagaggacctacttccagcaaccccagaaagagacatcgggaagattctgatgtggaaatggtggaagatgattcccgaaaggaaatgactgcagcttgtaccccccggagaaggatcattaacctcactagtgttttgagtctccaggaagaaattaatgagcagggacatgaggttctccgggagatgttgcataaccactccttcgtgggctgtgtgaatcctcagccttggcacagcatcaaaccaagttataccttctcaacaccaccaagtttcagtgaagaactgttctaccagatactcatttatgattttgccaattttggtgttctcaggttatcgagtgaagtgcctggctccattccaaactcctggaagtggactgtggaacacattgtctataaagccttgcgctcacacattctgcctcctaaacatttcacagaagatggaaatatcctgcagcttgctaacctgcctgatctatacaaagtctttgagaggtgttaaatatggttatttatgcactgtgggatgtgttcttctttctctgtattccgatacaaagtgttgtatcaaagtgtgatatacaaagtgtaccaacataagtgttggtagcacttaagacttatacttgccttctgatagtattcctttatacacagtggattgattataaataaatagatgtgtctt

SEQ ID NO: 92672 - DNA, 2089 bp, Artificial Sequence
  derived and/or modified sequence
aaaatgtcgttcgtggcaggggttattcggcggctggacgagacagtggtgaaccgcatcgcggcgggggaagttatccagcggccagctaatgctatcaaagagatgattgagaactgtttagatgcaaaatccacaagtattcaagtgattgttaaagagggaggcctgaagttgattcagatccaagacaatggcaccgggatcaggaaagaagatctggatattgtatgtgaaaggttcactactagtaaactgcagtcctttgaggatttagccagtatttctacctatggctttcgaggtgaggctttggccagcataagccatgtggctcatgttactattacaacgaaaacagctgatggaaagtgtgcatacagagcaagttactcagatggaaaactgaaagcccctcctaaaccatgtgctggcaatcaagggacccagatcacggtggaggaccttttttacaacatagccacgaggagaaaagctttaaaaaatccaagtgaagaatatgggaaaattttggaagttgttggcaggtattcagtacacaatgcaggcattagtttctcagttaaaaaacaaggagagacagtagctgatgttaggacactacccaatgcctcaaccgtggacaatattcgctccatctttggaaatgctgttagtcgagaactgatagaaattggatgtgaggataaaaccctagccttcaaaatgaatggttacatatccaatgcaaactactcagtgaagaagtgcatcttcttactcttcatcaaccatcgtctggtagaatcaacttccttgagaaaagccatagaaacagtgtatgcagcctatttgcccaaaaacacacacccattcctgtacctcagtttagaaatcagtccccagaatgtggatgttaatgtgcaccccacaaagcatgaagttcacttcctgcacgaggagagcatcctggagcgggtgcagcagcacatcgagagcaagctcctgggctccaattcctccaggatgtacttcacccagaaagagacatcgggaagattctgatgtggaaatggtggaagatgattcccgaaaggaaatgactgcagcttgtaccccccggagaaggatcattaacctcactagtgttttgagtctccaggaagaaattaatgagcagggacatgaggttctccgggagatgttgcataaccactccttcgtgggctgtgtgaatcctcagtgggccttggcacagcatcaaaccaagttataccttctcaacaccaccaagcttagtgaagaactgttctaccagatactcatttatgattttgccaattttggtgttctcaggttatcggagccagcaccgctctttgaccttgccatgcttgccttagatagtccagagagtggctggacagaggaagatggtcccaaagaaggacttgctgaatacattgttgagtttctgaagaagaaggctgagatgcttgcagactatttctctttggaaattgatgaggaagggaacctgattggattaccccttctgattgacaactatgtgccccctttggagggactgcctatcttcattcttcgactagccactgaggtgaattgggacgaagaaaaggaatgttttgaaagcctcagtaaagaatgcgctatgttctattccatccggaagcagtacatatctgaggagtcgaccctctcaggccagcagagtgaagtgcctggctccattccaaactcctggaagtggactgtggaacacattgtctataaagccttgcgctcacacattctgcctcctaaacatttcacagaagatggaaatatcctgcagcttgctaacctgcctgatctatacaaagtctttgagaggtgttaaatatggttatttatgcactgtgggatgtgttcttctttctctgtattccgatacaaagtgttgtatcaaagtgtgatatacaaagtgtaccaacataagtgttggtagcacttaagacttatacttgccttctgatagtattcctttatacacagtggattgattataaataaatagatgtgtctt

SEQ ID NO: 92673 - DNA, 2230 bp, Artificial Sequence
  derived and/or modified sequence
ggcggctggacgagacagtggtgaaccgcatcgcggcgggggaagttatccagcggccagctaatgctatcaaagagatgattgagaactgtttagatgcaaaatccacaagtattcaagtgattgttaaagagggaggcctgaagttgattcagatccaagacaatggcaccgggatcaggaaagaagatctggatattgtatgtgaaaggttcactactagtaaactgcagtcctttgaggatttagccagtatttctacctatggctttcgaggtgaggctttggccagcataagccatgtggctcatgttactattacaacgaaaacagctgatggaaagtgtgcatacagagcaagttactcagatggaaaactgaaagcccctcctaaaccatgtgctggcaatcaagggacccagatcacggtggaggaccttttttacaacatagccacgaggagaaaagctttaaaaaatccaagtgaagaatatgggaaaattttggaagttgttggcaggtattcagtacacaatgcaggcattagtttctcagttaaaaaacaaggagagacagtagctgatgttaggacactacccaatgcctcaaccgtggacaatattcgctccatctttggaaatgctgttagtcgagaactgatagaaattggatgtgaggataaaaccctagccttcaaaatgaatggttacatatccaatgcaaactactcagtgaagaagtgcatcttcttactcttcatcaaccatcgtctggtagaatcaacttccttgagaaaagccatagaaacagtgtatgcagcctatttgcccaaaaacacacacccattcctgtacctcagtttagaaatcagtccccagaatgtggatgttaatgtgcaccccacaaagcatgaagttcacttcctgcacgaggagagcatcctggagcgggtgcagcagcacatcgagagcaagctcctgggctccaattcctccaggatgtacttcacccagactttgctaccaggacttgctggcccctctggggagatggttaaatccacaacaagtctgacctcgtcttctacttctggaagtagtgataaggtctatgcccaccagatggttcgtacagattcccgggaacagaagcttgatgcatttctgcagcctctgagcaaacccctgtccagtcagccccaggccattgtcacagaggataagacagatatttctagtggcagggctaggcagcaagatgaggagatgcttgaactcccagcccctgctgaagtggctgccaaaaatcagagcttggagggggatacaacaaaggggacttcagaaatgtcagagaagagaggacctacttccagcaaccccagaaagagacatcgggaagattctgatgtggaaatggtggaagatgattcccgaaaggaaatgactgcagcttgtaccccccggagaaggatcattaacctcactagtgttttgagtctccaggaagaaattaatgagcagggacatgaggttctccgggagatgttgcataaccactccttcgtgggctgtgtgaatcctcagtgggccttggcacagcatcaaaccaagttataccttctcaacaccaccaagcttagtgaagaactgttctaccagatactcatttatgattttgccaattttggtgttctcaggttatcggagccagcaccgctctttgaccttgccatgcttgccttagatagtccagagagtggctggacagaggaagatggtcccaaagaaggacttgctgaatacattgttgagtttctgaagaagaaggctgagatgcttgcagactatttctctttggaaattgatgagagtgaagtgcctggctccattccaaactcctggaagtggactgtggaacacattgtctataaagccttgcgctcacacattctgcctcctaaacatttcacagaagatggaaatatcctgcagcttgctaacctgcctgatctatacaaagtctttgagaggtgttaaatatggttatttatgcactgtgggatgtgttcttctttctctgtattccgatacaaagtgttgtatcaaagtgtgatatacaaagtgtaccaacataagtgttggtagcacttaagacttatacttgccttctgatagtattcctttatacacagtggattgattataaataaatagatgtgtcttaacat

SEQ ID NO: 92674 - DNA, 1656 bp, Artificial Sequence
  derived and/or modified sequence
aaacctctcctcaatcatgttctggccatcaagggacccaggagcagatggaggactttttacaatattgcgacacggagaaaggccctgaagaacccgagtgaggagtatggcaagatacttgaggttgtgggccgatacagtgtacacaacgccggaatcagcttctccgtcaagaagcagggcgagacagtggctgacgtgagaactttgcccaacgcctctaccgtcgataatattcgttctatatttgggaacgccgtctctagagagctgattgaaattggctgtgaagataagacactggcttttaagatgaacggatatatctctaacgccaattacagcgtgaagaagtgtatttttctgctgttcatcaaccatcggctggttgagtctacttccctgcgcaaagccatcgaaaccgtgtatgcagcttacctgcccaagaacacacacccctttttgtacctgtcccttgagatctctccccaaaatgtggatgttaacgtgcacccaacaaaacatgaagtgcacttcctgcatgaggaaagtatcctggagagggtgcagcagcatatagagtccaagctcctagggagcaacagtagccgaatgtactttactcaaaccctgttgccaggactggccggtccctctggcgaaatggtcaaatccactacctccctcactagttctagtacttctggctcaagtgataaagtgtacgcccaccagatggtgcgaactgatagtcgagaacaaaagctggatgcatttctgcagcctctgtccaagcctctgtcgagccagccacaagccattgttaccgaggataaaacggacatttcctctggacgggctagacaacaggatgaagaaatgctcgagctgccggcacccgctgaggtcgccgctaaaaaccaaagtctggagggcgatacaaccaaaggaacttcagagatgtccgaaaaacgtggaccaacttcatctaatcctcgcaaaaggcaccgcgaagactccgacgtggagatggtcgaagatgattccaggaaagaaatgacagccgcatgcacccctcgtaggaggattataaacctgaccagtgttctcagcctgcaggaagagataaatgagcaggggcacgaggtattacgggagatgcttcataaccactctttcgtaggctgtgtaaacccgcagtgggctctcgcccaacatcaaactaagctgtaccttctgaataccactaaactgtctgaggaattattttaccagattctgatttacgactttgccaacttcggggtgctgaggctatcagaacctgcacctctctttgacctggcgatgctggccctggatagcccggaaagcggttggacagaagaggatggtccaaaagagggattagcagagtacatcgtagagtttttaaagaaaaaggccgagatgctcgcggattatttttcattagaaattgacgaaagcgaggtcccaggtagcattccaaactcatggaaatggaccgtcgaacacatcgtttacaaagccttgcgttctcatatcctacccccaaagcacttcactgaggacggtaatatcctgcagctggctaatctgcctgacctatacaaggtttttgaacggtgttag

SEQ ID NO: 92675 - DNA, 525 bp, Artificial Sequence
  derived and/or modified sequence
atgtcagaaaaacgtggcccaacatcaagcaatccacggaagaggcaccgcgaggattcagatgtggagatggtggaagacgactccagaaaggagatgacagctgcatgcacgcctagacgccgaatcatcaatttgacatcagtcctgagcctccaggaagagatcaacgagcaaggccacgaggttttacgagaaatgttgcacaatcacagctttgtggggtgcgtgaacccccaaccatggcattctatcaagcccagctacacattctctacacccccttcgttttcggaagagctgttttatcaaatcctgatctacgatttcgccaactttggagttctacgcctaagtagcgaggtgccgggatctatccccaactcatggaaatggactgtagaacacatcgtgtataaggccctgagaagtcacatactccccccaaagcacttcaccgaggatgggaacatcctccagctcgcaaatttgccagatctgtacaaagtcttcgagagatgctag

SEQ ID NO: 92676 - DNA, 960 bp, Artificial Sequence
  derived and/or modified sequence
atgattgaaaattgcctggacgccaagtccaccagcatccaggtaattgtgaaggaaggcggtctgaaattgatccaaattcaggacaatggaacgggtatccggaaggaggacctagatatagtgtgcgaacgcttcactacatccaagctacaaagttttgaggacctagcttccatctccacatacggatttaggggtgaggcactcgcaagcatctcgcacgtagcccacgtcacaattacgaccaaaactgcagatggaaaatgtgcctatagagcctcctactcagacggcaagctgaaggccccaccaaagccatgcgctggaaaccagggtactcagatcactgtggaagatctgttctacaacatcgccacaagacggaaggctttgaagaacccaagtgaagagtacggtaagatcctagaagtagtcggaagatacagtgtccacaatgcaggcatctcatttagcgtgaagaaacagggggagactgtagctgacgttcgcacactccctaacgcctccacagttgacaatatcaggtcgattttcggtaatgccgtaagtagagagttaatcgagattggctgcgaagataaaacgttagctttcaaaatgaatggctacatcagtaacgctaattattccgtgaaaaagtgcatatttctgttgttcatcaatcataggctggtagaaagtacctccctgcgaaaggcaattgagaccgtgtatgccgcatatctgccaaaaaatactcaccccttcttatacctttcccttgagattagtccccagaatgtggacgtcaacgtccaccccacaaaacacgaggttcatttcctgcacgaagaaagcatcctcgagcgagttcagcagcacatcgaaagtaagctgctggggtccaactctagccgaatgtacttcacacaaaaagagacaagtggtaggttctag

SEQ ID NO: 92677 - DNA, 2040 bp, Artificial Sequence
  derived and/or modified sequence
taaaggctcgatgaaaccgtggttaacaggattgccgcaggcgaggtgatacagcgcccagctaacgccattaaggagatgattgagaactgtctggacgccaagtcaacctcaatccaagtcatagtgaaggaggggggattaaagttgatacagatccaggacaatggcacgggaattcggaaggaggatctcgacattgtatgtgaacgctttacaacttcaaaattacagagttttgaggatctggcaagcatcagcacttatggattcaggggcgaagccctggcgtccatttcgcacgtcgctcatgtcactataaccaccaagaccgcagacggcaaatgcgcctacagagcctcgtatagcgacggaaagctgaaggctccacccaagccttgtgcaggaaaccagggcacccaaataactgtagaggacctattttacaatattgctaccaggagaaaggccttaaagaacccctccgaagagtacgggaaaatactcgaggttgtcggcaggtacagtgtccataacgcgggaattagtttttctgtaaaaaaacagggagagactgtggccgatgtcaggacccttccaaacgcctctaccgtggacaatatacgttccatattcggaaacgctgtctccagagagttgatcgaaatcggttgtgaggataaaacgcttgctttcaagatgaacggatacatttctaacgcaaactactccgtgaagaaatgcatttttctgctgtttatcaaccatcgcctcgtggagagtacatctctcagaaaggccatcgagacagtgtatgccgcatacctgccgaaaaacacccacccttttctttacctgagtctcgagataagtccccagaatgtggatgtcaatgtgcacccaaccaaacacgaggtacactttctacatgaggaaagcattttggaaagagtgcagcagcatatcgagtccaaattgctgggatccaactcctcccgaatgtactttactcaaacactattgcctggtctggctggaccctcgggcgaaatggtgaagtccactacgtcgctcacgagtagtagcacatccggtagctcagacaaggtctacgctcaccagatggtcaggactgactcccgagaacaaaagttagacgccttccttcagcctctgtcaaagcccctcagtagtcagccacaggccatcgtaaccgaggacaagactgatatcagctctggtcgagctaggcaacaggatgaggagatgcttgaactgccggcacctgctgaggtggccgctaaaaaccaaagcctcgagggagatacgaccaaaggaaccagcgagatgtctgagaaacgaggacctacatcctctaatccaagaaagcggcaccgcgaggatagcgatgtagaaatggtagaagacgacagccgaaaagagatgactgctgcgtgcacacctcggagacgtatcatcaacttaacaagcgttttatccctgcaggaagaaatcaatgaacagggacacgaggtgttgcgcgaaatgcttcataaccatagttttgtgggctgtgtcaacccccaatgggcgttggctcagcatcagaccaagctgtacttactgaacaccacaaaacttagcgaggaactgttctatcagatactgatctacgactttgctaacttcggggtcctgcggttaagtgaacctgctccactgtttgatttggccatgttggccctcgatagcccagagagtggctggacggaggaagacgggccaaaagaagggctggctgaatatattgtggagttcctgaaaaaaaaggcagaaatgttggcagactatttttccctggagattgacgagagtgaggttccaggctcaatccctaattcatggaagtggactgtcgagcacatcgtgtataaggcactccggtcccacattttgcctccgaaacattttacagaggacggtaacatactccagctagccaacctcccggacctgtataaggtcttcgaacgctgctag

SEQ ID NO: 92678 - DNA, 843 bp, Artificial Sequence
  derived and/or modified sequence
atgatcgaaaactgcctagacgccaagtccacaagtatccaagtgattgtcaaagagggtggcttgaagttgattcaaattcaggataacggcaccggcattcggaaggaagatctcgacatcgtctgtgagagattcaccacctcaaaactccagagtttcgaggatctggcttctatctccacttatggcttccggggagaggccctggcctcaatttcccacgtcgcacacgtcaccattactacaaagacggccgatggaaaatgtgcttacagggctagctattcggacgggaagctgaaggcgcctcccaagccgtgtgctggaaaccagggcacgcaaatcacagtggaggatctattctacaatattgcaacccgcagaaaagcactgaagaatccttccgaagaatacggaaagatcctcgaagtggtgggtcgctacagtgttcataacgccggaattagtttttctgttaagaaacagggcgaaaccgtcgcagatgtccgtacgctgccgaatgcgtccaccgtggacaacattcgcagcatcttcggtaatgcagtgagtcgagagctgatcgaaatcgggtgtgaagacaagacactggcgtttaaaatgaatgggtatatctccaacgcgaactattccgttaaaaagtgtatcttcctcctgttcatcaatcaccgcctggtagagtccaccagtctccgtaaagcaattgagaccgtttacgcagcgtatctgcctaaaaatacccacccgtttctgtaccttcgcctgtgttaccaggacctactggctccgttaggacgatggcttaatccacagcaggtgtag

SEQ ID NO: 92679 - DNA, 1548 bp, Artificial Sequence
  derived and/or modified sequence
atgaacggctacatcagcaacgccaactacagcgtgaagaagtgcatcttcctgctgttcatcaaccacagactggtggagagcaccagcctgagaaaggccatcgagaccgtgtacgccgcctacctgcccaagaacacccaccccttcctgtacctgagcctggagatcagcccccagaacgtggacgtgaacgtgcaccccaccaagcacgaggtgcacttcctgcacgaggagagcatcctggagagagtgcagcagcacatcgagagcaagctgctgggcagcaacagcagcagaatgtacttcacccagaccctgctgcccggcctggccggccccagcggcgagatggtgaagagcaccaccagcctgaccagcagcagcaccagcggcagcagcgacaaggtgtacgcccaccagatggtgagaaccgacagcagagagcagaagctggacgccttcctgcagcccctgagcaagcccctgagcagccagccccaggccatcgtgaccgaggacaagaccgacatcagcagcggcagagccagacagcaggacgaggagatgctggagctgcccgcccccgccgaggtggccgccaagaaccagagcctggagggcgacaccaccaagggcaccagcgagatgagcgagaagagaggccccaccagcagcaaccccagaaagagacacagagaggacagcgacgtggagatggtggaggacgacagcagaaaggagatgaccgccgcctgcacccccagaagaagaatcatcaacctgaccagcgtgctgagcctgcaggaggagatcaacgagcagggccacgaggtgctgagagagatgctgcacaaccacagcttcgtgggctgcgtgaacccccagtgggccctggcccagcaccagaccaagctgtacctgctgaacaccaccaagctgagcgaggagctgttctaccagatcctgatctacgacttcgccaacttcggcgtgctgagactgagcgagcccgcccccctgttcgacctggccatgctggccctggacagccccgagagcggctggaccgaggaggacggccccaaggagggcctggccgagtacatcgtggagttcctgaagaagaaggccgagatgctggccgactacttcagcctggagatcgacgaggagggcaacctgatcggcctgcccctgctgatcgacaactacgtgccccccctggagggcctgcccatcttcatcctgagactggccaccgaggtgaactgggacgaggagaaggagtgcttcgagagcctgagcaaggagtgcgccatgttctacagcatcagaaagcagtacatcagcgaggagagcaccctgagcggccagcagagcgaggtgcccggcagcatccccaacagctggaagtggaccgtggagcacatcgtgtacaaggccctgagaagccacatcctgccccccaagcacttcaccgaggacggcaacatcctgcagctggccaacctgcccgacctgtacaaggtgttcgagagatgctag

SEQ ID NO: 92680 - DNA, 1383 bp, Artificial Sequence
  derived and/or modified sequence
atgaacggctacatcagcaacgccaactacagcgtgaagaagtgcatcttcctgctgttcatcaaccacagactggtggagagcaccagcctgagaaaggccatcgagaccgtgtacgccgcctacctgcccaagaacacccaccccttcctgtacctgagcctggagatcagcccccagaacgtggacgtgaacgtgcaccccaccaagcacgaggtgcacttcctgcacgaggagagcatcctggagagagtgcagcagcacatcgagagcaagctgctgggcagcaacagcagcagaatgtacttcacccagaccctgctgcccggcctggccggccccagcggcgagatggtgaagagcaccaccagcctgaccagcagcagcaccagcggcagcagcgacaaggtgtacgcccaccagatggtgagaaccgacagcagagagcagaagctggacgccttcctgcagcccctgagcaagcccctgagcagccagccccaggccatcgtgaccgaggacaagaccgacatcagcagcggcagagccagacagcaggacgaggagatgctggagctgcccgcccccgccgaggtggccgccaagaaccagagcctggagggcgacaccaccaagggcaccagcgagatgagcgagaagagaggccccaccagcagcaaccccagaaagagacacagagaggacagcgacgtggagatggtggaggacgacagcagaaaggagatgaccgccgcctgcacccccagaagaagaatcatcaacctgaccagcgtgctgagcctgcaggaggagatcaacgagcagggccacgaggtgctgagagagatgctgcacaaccacagcttcgtgggctgcgtgaacccccagtgggccctggcccagcaccagaccaagctgtacctgctgaacaccaccaagctgagcgaggagctgttctaccagatcctgatctacgacttcgccaacttcggcgtgctgagactgagcgagcccgcccccctgttcgacctggccatgctggccctggacagccccgagagcggctggaccgaggaggacggccccaaggagggcctggccgagtacatcgtggagttcctgaagaagaaggccgagatgctggccgactacttcagcctggagatcgacgaggagggcaacctgatcggcctgcccctgctgatcgacaactacgtgccccccctggagggcctgcccatcttcatcctgagactggccaccgaggtgaactgggacgaggagaaggagtgcttcgagagcctgagcaaggagtgcgccatgttctacagcatcagaaagcagtacatcagcgaggagagcaccctgagcggccagcagtag

SEQ ID NO: 92681 - DNA, 1548 bp, Artificial Sequence
  derived and/or modified sequence
atgaatggttacatcagtaacgctaactattctgtcaagaagtgcatcttcctcttattcatcaatcatcgacttgtggaatccacatcactaagaaaggcgattgaaacggtgtatgctgcttaccttcctaagaatacccatccgtttttgtacctttctctcgagatatcaccccagaacgtggatgttaatgttcatccaactaagcacgaggtccattttctgcacgaggagagcatcttagaacgcgtgcaacaacacattgagagcaagctgctgggatctaatagctcaagaatgtacttcacgcagacgttactcccagggctggccggcccatccggcgagatggtgaaaagcactacttcacttacaagtagcagcacctcagggagctccgacaaagtctacgcccaccagatggtgaggactgactcaagggagcaaaaactcgatgcattcctgcagcccttgtcaaagccattatcctcacagccacaggctattgtgactgaggacaaaaccgacattagctcaggccgggcccgccagcaagacgaggaaatgctagagttgcccgcgccagcggaggtggcagctaagaatcagtcactggagggagatactactaaagggacctccgagatgagtgagaaaaggggacccacaagctcgaatccccgcaaaagacaccgagaggatagcgacgtggaaatggtggaagatgactctaggaaggagatgacagccgcatgcaccccccggagaaggatcattaacttaacatctgtattatctctgcaggaggagattaatgagcagggacatgaggttctgcgagaaatgctgcacaaccattcatttgtaggctgcgtcaaccctcagtgggccctggctcaacaccaaacaaagctgtacctgctgaacacgacaaaactgtctgaggaactgttttatcaaatcctgatttacgatttcgccaattttggggtgctgcgattgagcgagcccgcaccgctctttgatctagctatgctcgcactggacagccccgagagtgggtggaccgaggaagacgggcccaaggagggactcgccgagtatatcgtagagttcttgaaaaagaaagctgaaatgcttgctgactatttcagcttggagattgacgaagagggtaatcttatcggtctacctctgcttatcgacaactacgtgccgcctctcgaaggtttacccattttcattcttcggctggccacggaggtgaactgggacgaggagaaggaatgctttgaaagcttatccaaagaatgcgccatgttttacagcatccggaagcagtatatatcagaagagtccacactcagcgggcagcaatccgaggtacctggatccatccccaactcctggaagtggactgtagagcacatagtatataaggctttgaggagtcatatcctcccacccaaacatttcaccgaggatggcaacattttacagctggccaacctcccagacctgtataaggtcttcgagcgctgctag

SEQ ID NO: 92682 - DNA, 1548 bp, Artificial Sequence
  derived and/or modified sequence
atgaatggctacataagtaatgctaactattcagtaaagaagtgtatctttttgctgttcatcaatcatagacttgtggaaagcacctcccttagaaaggccatcgagaccgtgtatgccgcttatctgcccaagaatacacatccttttctgtacctgagtctggaaataagccctcagaatgtcgatgttaacgtgcatccgaccaagcacgaagttcacttcctgcacgaagagtctatcctggagcgcgtacagcagcacatcgaaagtaaactgcttggcagtaattcttctagaatgtattttacccagacattgttgcccggcctggccggacctagcggggaaatggtgaaatcaactacctctttgacgtcatcatcaacaagcgggtccagtgacaaagtgtatgcacatcaaatggtcagaactgacagccgcgagcagaagttggacgcctttttgcaaccattgtctaaaccactcagcagccagccacaggcaatcgtgactgaagataaaaccgacatttcttcgggacgagcccgccagcaggacgaggagatgctggaattgcctgccccagcagaagttgcggcgaaaaaccagtctttggaaggtgatactacaaaaggaactagcgagatgtccgaaaagcgaggacccacaagcagcaatccacgcaagaggcaccgcgaggatagcgatgtggagatggttgaggacgactcccgcaaagagatgacagccgcctgtacccctcgtcgaaggatcataaacttaacaagcgtgttgtccctccaggaggaaattaacgagcaggggcacgaggtgctgagggagatgctgcataaccatagcttcgtgggctgcgtgaatccccagtgggcccttgcacagcaccaaaccaagctgtacctgctcaatacgactaagctaagtgaggaactgttctaccagattctaatttacgacttcgccaattttggtgtacttaggctgtctgagccagcacccctgtttgatctggctatgctggcgctcgactcccctgagtctggatggaccgaagaagacggaccaaaagaaggactggccgagtacattgtcgagtttctgaagaagaaagccgagatgttagcggactacttttcgctggagattgacgaggagggaaatctcatcgggcttcccctgctgatcgataactatgttcccccacttgagggcctgccgatcttcattctacgcctggcaaccgaggtgaattgggacgaggaaaaggagtgtttcgagtcactgtctaaggagtgtgcgatgttctactcgatcaggaaacagtatatctctgaagagtccacattatcggggcagcagagcgaggtgccggggtctatccccaatagctggaagtggaccgtggagcacattgtgtacaaagccctccgcagccacatactccctcccaagcacttcacagaagacggcaacatccttcaactcgcaaacctcccagatttgtacaaagtcttcgaaagatgctag

SEQ ID NO: 92683 - DNA, 1383 bp, Artificial Sequence
  derived and/or modified sequence
atgaatggttatatcagcaacgcaaactactccgtcaagaagtgcatatttcttctttttattaaccatcgcctggttgagtcgactagcctgcggaaagccatcgagacagtttatgcggcctacttgcccaagaacacgcaccctttcttatacctgtcattggagatctcgccgcagaacgtggacgttaatgttcatcccaccaagcacgaggtgcacttcctccatgaagagtcaatcctggaaagagtccaacagcacatagagtccaaactgctgggatccaattcctcccggatgtacttcacacagacattgctgccgggcctcgcaggaccatcaggcgaaatggtgaagtctaccacatctctgacttctagcagcactagtgggtccagtgataaagtctatgcccatcaaatggtgcgaaccgactccagagagcagaagctggacgctttcctgcagcctcttagtaaaccacttagctctcagccccaggctatcgtgaccgaggataaaaccgatatctccagcggccgtgcgcgacagcaggacgaggagatgctcgagttgcccgcccctgccgaagtagcagcaaagaaccagtcactggaaggagataccacgaaaggtacgtccgaaatgagcgagaaacgagggcctacctcaagtaatccaaggaagcgacaccgagaagatagcgacgtggaaatggtggaggacgactccagaaaggaaatgaccgcggcatgcacgccaagacgccgaatcatcaacctgacatcagtgcttagcctgcaggaagaaatcaacgaacaggggcatgaggtgctgagagaaatgctccacaaccacagttttgtaggatgcgtcaacccgcaatgggcattggcacagcaccagacaaagctgtatctgctgaataccactaagctgtccgaagaacttttctaccagatcttgatatatgactttgcaaattttggcgtgctgaggctcagtgaacccgctccattatttgacctggcgatgctggcattagactcccctgaatccggctggacagaggaagacgggccgaaggaggggttagcagagtacattgtggaatttcttaaaaaaaaagccgaaatgctggccgactattttagccttgagattgacgaggagggcaaccttatcggcctccccctactgattgataactacgtgccgccacttgaaggcctgccaattttcattctccgcctggccacagaggttaattgggatgaagaaaaggagtgtttcgaatccctgtccaaagaatgtgccatgttttacagtatccgcaagcagtatatctccgaagagtccactttaagcgggcagcagtag

SEQ ID NO: 92684 - DNA, 1548 bp, Artificial Sequence
  derived and/or modified sequence
atgaatggctacatcagcaacgccaactattccgtcaaaaaatgcatcttccttctatttattaatcatagacttgtggagtcaacatcactccgaaaggcgatcgaaaccgtgtatgctgcgtacctcccgaagaatacccatccctttctgtacctctccctagagatttctccacagaatgtcgacgtgaatgtgcatccgactaaacacgaggtgcatttcttgcatgaagaatctatcttagagcgggtccagcagcatattgagagtaaactcttgggaagtaattcctcccgcatgtatttcacccaaactctgctgcctggtctcgcaggacctagcggggagatggtgaaaagcacgacatccctgaccagcagctctaccagcggaagctcagacaaggtctatgcccatcagatggtgcgcacggacagccgggagcagaagctggatgcattcttacagcccctgagcaaaccactctccagccaaccccaggcaatagttacagaggacaagacggacatctctagcggccgcgcaaggcagcaagacgaggaaatgctcgagctccctgcgcccgcagaagttgccgctaagaaccaatcgctggagggggatactacaaagggaacatctgagatgtcagagaaacgcggtcccacctccagcaacccccgaaaaaggcatcgcgaagacagtgacgtcgaaatggtagaggatgactcgagaaaagaaatgacagctgcttgtaccccccgccggcgtatcatcaacttgaccagcgtactgagccttcaggaagagatcaacgagcaggggcatgaggtccttagggaaatgctgcacaatcactcttttgtggggtgtgtgaatcctcagtgggccctagcccagcatcagaccaaactatatctgcttaataccaccaaactgtccgaagagctgttttatcagatattgatatatgacttcgcaaacttcggggtgctgaggctgagcgaaccggcaccgctgtttgatctcgccatgctagctttggactctcctgagagtggatggacggaagaggatggtccaaaagaaggactggcagaatacatcgtcgagtttctgaagaaaaaggccgagatgctggcggattacttctcattggagatcgatgaagagggtaacctgattggactcccactcctaatagacaattacgttcccccactggagggcctgcctatctttattctgcggctggcaactgaagttaattgggacgaggaaaaagagtgcttcgaatctctgtcaaaagagtgcgctatgttctattccattcggaagcagtacatctcagaagaaagtacactgtccggtcagcaatcggaggtacccggaagtatcccaaactcctggaaatggaccgttgagcacatcgtttacaaggcactgaggagtcacatcctaccgcctaagcacttcacagaggatgggaatatcctgcagcttgctaacctgcccgacctgtataaagttttcgaacgttgctag

SEQ ID NO: 92685 - DNA, 1548 bp, Artificial Sequence
  derived and/or modified sequence
atgaatggctacatcagcaatgccaactacagcgtgaagaagtgcatcttcctgctcttcatcaaccaccggctggtggagagcaccagcctgaggaaggccattgaaacagtgtatgctgcctacctgcccaagaacacccaccccttcctgtacctgagcctggagatcagcccccagaatgtggatgtgaatgtgcaccccaccaagcatgaggtgcacttcctgcacgaggagagcatcctggagcgggtgcagcagcacatcgagagcaagctgctgggcagcaacagcagcaggatgtacttcacccagaccctgctgcccggcctggccggccccagcggggagatggtgaagagcaccaccagcctgaccagcagcagcaccagcggcagcagtgacaaggtgtatgcccaccagatggtgaggacagacagccgggagcagaagctggatgccttcctgcagcccctgagcaagcccctgagcagccagccccaggccatcgtgacagaggacaagacagacatcagcagcggccgggcccggcagcaggatgaggagatgctggagctgcctgccccagctgaggtggccgccaagaaccagagcctggagggggacaccaccaagggcaccagcgagatgtctgagaagaggggccccaccagcagcaaccccaggaagaggcaccgggaggacagtgatgtggagatggtggaggatgacagcaggaaggagatgacagctgcctgcaccccccggcggcgcatcatcaacctgacctctgtgctgagcctgcaggaggagatcaatgagcagggccacgaggtgctgcgggagatgctgcacaaccacagctttgtgggctgtgtgaacccccagtgggccctggcccagcaccagaccaagctgtacctgctgaacaccaccaagctgtctgaggagctgttctaccagatcctgatctatgactttgccaactttggagtgctgcggctgtctgagcccgcccccctgtttgacctggccatgctggccctggacagccctgagagcggctggacagaagaagatggccccaaggagggcctggccgagtacatcgtggagttcctgaagaagaaggccgagatgctggccgactacttcagcctggagattgatgaggagggcaacctgattggcctgcccctgctgattgacaactacgtgccccccctggagggcctgcccatcttcatcctgcggctggccacagaggtgaactgggatgaggagaaggagtgctttgagagcctgagcaaagaatgtgccatgttctacagcatcaggaagcagtacatcagcgaggagagcaccctgagcggccagcagagcgaggtgcccggcagcatccccaacagctggaagtggacagtggagcacatcgtgtacaaggccctgcggagccacatcctgccccccaagcacttcacagaagatggcaacatcctgcagctggccaacctgcctgacctgtacaaggtgtttgagcgctgctag

SEQ ID NO: 92686 - DNA, 1383 bp, Artificial Sequence
  derived and/or modified sequence
atgaatggctacatcagcaatgccaactacagcgtgaagaagtgcatcttcctgctcttcatcaaccaccggctggtggagagcaccagcctgaggaaggccattgaaacagtgtatgctgcctacctgcccaagaacacccaccccttcctgtacctgagcctggagatcagcccccagaatgtggatgtgaatgtgcaccccaccaagcatgaggtgcacttcctgcacgaggagagcatcctggagcgggtgcagcagcacatcgagagcaagctgctgggcagcaacagcagcaggatgtacttcacccagaccctgctgcccggcctggccggccccagcggggagatggtgaagagcaccaccagcctgaccagcagcagcaccagcggcagcagtgacaaggtgtatgcccaccagatggtgaggacagacagccgggagcagaagctggatgccttcctgcagcccctgagcaagcccctgagcagccagccccaggccatcgtgacagaggacaagacagacatcagcagcggccgggcccggcagcaggatgaggagatgctggagctgcctgccccagctgaggtggccgccaagaaccagagcctggagggggacaccaccaagggcaccagcgagatgtctgagaagaggggccccaccagcagcaaccccaggaagaggcaccgggaggacagtgatgtggagatggtggaggatgacagcaggaaggagatgacagctgcctgcaccccccggcggcgcatcatcaacctgacctctgtgctgagcctgcaggaggagatcaatgagcagggccacgaggtgctgcgggagatgctgcacaaccacagctttgtgggctgtgtgaacccccagtgggccctggcccagcaccagaccaagctgtacctgctgaacaccaccaagctgtctgaggagctgttctaccagatcctgatctatgactttgccaactttggagtgctgcggctgtctgagcccgcccccctgtttgacctggccatgctggccctggacagccctgagagcggctggacagaagaagatggccccaaggagggcctggccgagtacatcgtggagttcctgaagaagaaggccgagatgctggccgactacttcagcctggagattgatgaggagggcaacctgattggcctgcccctgctgattgacaactacgtgccccccctggagggcctgcccatcttcatcctgcggctggccacagaggtgaactgggatgaggagaaggagtgctttgagagcctgagcaaagaatgtgccatgttctacagcatcaggaagcagtacatcagcgaggagagcaccctgagcggccagcagtag

SEQ ID NO: 92687 - DNA, 1548 bp, Artificial Sequence
  derived and/or modified sequence
atgaacggctacatcagcaacgccaactacagcgtgaagaagtgcattttcttgttatttatcaatcaccgattagtggaatctacttccttgcgcaaagctatagagactgtgtacgccgcttatcttccaaagaacacccatcccttcctgtacctgtctctggagatctctcctcaaaacgtggacgtcaatgtacatcctacaaagcacgaggtccattttttacatgaggaatctattttagaaagggtgcaacagcacatcgaaagtaagcttttggggtccaactcatcccggatgtattttacgcagaccctgctccccggattagcaggaccaagcggcgagatggtgaagtctacaacctccctcacctcctcgtccacctctggttctagcgacaaggtatacgcgcaccagatggtgaggacagatagccgagaacagaagctggacgcctttcttcagccactcagtaaaccactgagctctcagccacaagcaatcgtgaccgaggacaagacagatatatcatccggaagagcaaggcagcaggacgaggaaatgcttgagctgcccgctcctgctgaggtcgctgctaagaaccaatcgttggagggcgataccaccaaagggacaagcgagatgtctgagaagaggggacccacaagttctaacccaagaaagcgacatcgggaagactcagacgtcgaaatggttgaagatgacagtaggaaggagatgaccgccgcgtgcaccccaaggcgacgcatcatcaatcttacttcagtcctctctctgcaggaagaaatcaacgagcaggggcacgaggtgctccgagagatgctgcacaatcactcttttgtgggttgtgttaacccccagtgggccctggctcagcatcagacgaaattgtacctgctcaatacgacaaagctatccgaggaactcttttaccagatcctcatttatgatttcgccaattttggggtgctgaggttaagcgaaccggctcccttgttcgatctggctatgcttgctctggactcgcctgagtcagggtggaccgaagaggatggcccgaaggaaggtctggccgaatatattgttgaatttctgaaaaagaaggccgaaatgctggcagactacttctctttagaaattgatgaagaaggaaacctcatcgggctcccactgctgattgacaattacgtaccccccttggaaggtctccctatattcatcctgcgcctggccaccgaagtcaactgggacgaggagaaagagtgctttgagagcctctcaaaggaatgtgccatgttctactccatacgtaagcagtacatctcggaagagagtacactctccggacaacagagtgaggtcccgggttccatacctaatagctggaaatggaccgtcgagcacatcgtctataaggccctgagaagtcacatcctgcctccaaaacatttcactgaggatggaaatatcctccagctggcaaatcttccagacctatataaggtattcgaacggtgctag

SEQ ID NO: 92688 - DNA, 1548 bp, Artificial Sequence
  derived and/or modified sequence
atgaacggctacatcagcaacgccaactacagcgtgaagaagtgcatttttctgctgtttatcaatcacaggctcgttgagagcacatccctcagaaaagccatcgagactgtgtacgcagcttacctccccaaaaatacccacccttttctgtacctgagcctcgaaatctccccccaaaacgttgatgttaatgtgcatcctacaaaacatgaagtgcacttcctacacgaggaaagcatcctagagagggtgcaacaacatatcgagagcaaactcctggggtctaatagcagtagaatgtattttacacagacactcttgccagggctggcagggcctagcggagagatggtcaaatctaccacatcactgacctcctcctccacttcagggagctctgacaaggtatacgcccaccagatggtgagaactgactctcgcgaacaaaaacttgacgcttttcttcagccactatctaagccgctttccagtcagccccaggcaatcgtgacagaagacaagaccgatatatccagcgggcgcgcacggcagcaagatgaagagatgcttgaactgcccgctcccgctgaggtagccgctaaaaaccaaagcctcgagggggacaccaccaaaggtaccagcgagatgagcgagaaacggggaccaacttccagcaacccccggaagcgtcacagggaagatagcgacgttgagatggtggaggatgactcccggaaggaaatgacagcggcctgcaccccgcggagaaggattatcaacctcacttcggtgctgtccctgcaggaggagattaatgagcagggccatgaagtcctgcgtgagatgctgcacaaccacagtttcgtgggctgcgttaacccacagtgggctctcgctcagcaccagactaagttgtacctgctgaatacgactaaacttagcgaagagctgttttaccaaattctaatttacgacttcgctaactttggcgttctgcgcctgtccgagccggcccccttattcgacctagcgatgctagctcttgactccccagagtcggggtggaccgaagaagacggccccaaggaaggcctggccgaatacattgtggaattcttgaaaaaaaaagctgagatgttggcagactatttcagcctagagatcgacgaggaggggaacttgattggtctcccactacttattgataactatgtaccccccctggaggggctcccgatatttatcctgcgtctggccacagaggtgaattgggatgaggagaaggagtgttttgagagtcttagtaaggagtgcgctatgttctatagtatcagaaaacagtatataagcgaggaaagtaccctctcagggcaacagtccgaagtgccaggtagcatccctaactcctggaaatggactgtggaacatattgtttataaggctcttaggtcccatattcttccacccaagcattttaccgaggatggtaacattctccagctggccaaccttccagacttatacaaagtattcgaacgatgctag

SEQ ID NO: 92689 - DNA, 1383 bp, Artificial Sequence
  derived and/or modified sequence
atgaacggctacatcagcaacgccaactacagcgtgaagaagtgcatattcctcctgtttatcaatcaccggctcgtggagtctacgtcgctgcggaaggctattgagaccgtttacgccgcttacctaccaaaaaatacccatccgttcctctacctttcactggaaatctccccccaaaacgtggatgtcaatgtgcatccaacaaaacatgaggtccactttctgcacgaggaaagtattctggagagagtgcaacaacatatagagtccaagttgctcggtagtaactcttcacggatgtactttacgcagacgttgctgccaggcctggccggacccagtggtgagatggtcaaatccactacctcactcacctccagcagcacaagcggtagctccgataaggtgtatgcccaccagatggttcgtactgatagcagggaacaaaagctggatgcatttctgcagccattgtccaagcctctctcgagccagccacaggctatcgtgactgaggacaagaccgatatctccagcggcagggccagacaacaggacgaggaaatgctcgaactgcctgcccccgccgaagtggcggccaaaaaccagtctttggaaggggacactactaagggtaccagcgaaatgagtgagaagcgaggcccaacatcctctaacccgagaaagagacatcgggaagactccgatgtggagatggtggaagacgattcccggaaagagatgaccgccgcctgcacgcctcgaaggagaattataaacttaacatcggtcctaagcctccaggaggagatcaatgagcagggccacgaagttttacgcgagatgctccacaaccattcttttgttggctgtgtcaaccctcagtgggccctcgcgcagcaccagaccaaactgtatctcctgaataccacaaaactcagcgaggagctgttttaccagatccttatatatgatttcgccaactttggcgttttgaggctatctgaacccgctccactttttgacctggccatgctagcccttgactctcctgagagcggctggaccgaggaagatgggcccaaagaaggcctggccgagtacatcgtggagtttttaaagaaaaaggctgaaatgcttgctgattatttctctctggaaatcgatgaggagggaaaccttataggactccccctgcttattgataactatgtccctccactggaaggcctgccaatattcatcctgcgcctggcaacagaggtcaactgggacgaagaaaaagagtgcttcgaaagccttagcaaggaatgcgctatgttctattctattaggaagcagtacatttcagaggagtcaactctgagcgggcagcagtag

SEQ ID NO: 92690 - DNA, 1548 bp, Artificial Sequence
  derived and/or modified sequence
atgaacggctacatcagcaacgccaactacagcgtgaagaagtgcatcttcctcctgttcatcaaccatcgcttggtcgagtctaccagtctgcggaaggcgattgagacagtttatgccgcttacctgcccaaaaatactcatccatttttgtacctcagtctggagatatccccccagaacgtggacgtgaatgtgcacccaaccaagcacgaagttcacttccttcatgaggagagcatcctggagcgcgtccagcagcatattgaatctaaactcctcggatccaatagctcccgcatgtatttcacacagaccttattgcccggccttgcggggcccagtggggaaatggtgaagtctaccactagtctaacctcttccagcacgtctggatctagcgacaaggtctatgcgcaccagatggtgcgaacagactcacgggagcagaaactggacgcatttctccagcccttgagtaaaccgctaagcagtcagccacaggcaatagtgaccgaagataaaacagacataagttctgggagggccaggcagcaggacgaagagatgctagaattgcccgctccggcggaagtagcagccaagaatcagtcacttgagggcgacacaactaaaggaacttctgagatgtctgaaaagagagggccgacatcttctaatcctagaaagcgccatcgcgaggactcggacgtggaaatggtagaggatgattctcggaaggagatgacggcggcctgtactccacgcagacgcatcatcaatctgacttccgtgctgtctctccaagaggagattaacgagcaagggcatgaagtccttagggaaatgcttcacaaccattcttttgtgggatgtgttaatcctcagtgggcgctcgcccagcatcaaacaaagctgtatcttttaaacacgaccaaacttagtgaagagttgttttaccagatcttgatctacgactttgctaacttcggagtgctaaggttgtctgagccagcacccttattcgatttagctatgctggctcttgatagcccagaaagtggatggacagaagaagacggccctaaagaggggcttgccgagtacattgtcgagtttctgaaaaaaaaggcagagatgctggccgactactttagtctagaaattgacgaggaggggaatctgataggactgcccctgctgatcgacaactacgtcccaccactggaaggactacccattttcatcctcagactggccacggaggttaactgggacgaggagaaggaatgctttgagtccttatctaaggagtgcgctatgttctacagcatccgtaagcaatatatctcagaagagtcaactctgtctggtcaacaatccgaagttccaggtagcatcccaaactcatggaaatggaccgtcgaacatatcgtctacaaggctcttagaagtcatatactccctcccaagcatttcacagaggacgggaatatcctgcagctcgctaacctgcccgacctgtacaaggtcttcgagcgctgctag

SEQ ID NO: 92691 - DNA, 1548 bp, Artificial Sequence
  derived and/or modified sequence
atgaatggatacatctcaaatgctaactacagtgtcaagaaatgtatcttcttactattcatcaaccatcggctggtggagtccaccagcctacgtaaggccatagagactgtttacgctgcgtatttgcctaagaatactcacccttttttgtacctcagtcttgagatttcaccacagaacgttgatgtaaacgtgcatccaaccaagcatgaggtgcactttctgcacgaggaatcaatcttggagcgcgttcagcagcacatagaatccaagctgctgggtagcaactcatctagaatgtacttcacccaaacacttcttcccggtctggctggacctagtggagagatggtgaaaagcacaacctctctcactagtagctccactagcgggtcatcagacaaggtatatgctcaccaaatggttcgcaccgactcaagggagcagaagcttgacgctttcttgcaaccattgagcaagccactttcatcgcaaccccaggcgattgttacggaagataagacagatatctcatcaggcagagcacggcagcaggacgaggagatgctggagctcccggctcccgctgaagttgctgctaaaaatcagtccttggaaggggacacgactaaaggtacgtcagagatgtccgagaagcgcggtcccacttcctccaacccgcgtaaacgacatcgcgaagacagcgacgttgaaatggtggaggacgactcgcgaaaagagatgaccgcagcttgcacaccaagacgccgtatcatcaatttgacgagtgtattaagcctccaggaagaaatcaacgagcaaggtcacgaggtgctgagggaaatgctacataatcatagttttgtaggctgcgtgaacccccagtgggctctcgcacagcaccagacgaaactctacctgttgaataccaccaagttatccgaggagctgttctatcaaattctgatctacgattttgcaaactttggagtgttgcgcttgagcgaaccagctccactcttcgacttggcaatgctggcactggactcccctgagagtggatggacagaagaagacggccctaaagagggccttgcagaatacatcgtcgagttcttgaagaagaaggcggagatgctggccgattacttcagccttgagattgacgaggaaggaaatttaatcggcctgccgctcctcatcgataactacgtcccgccattagaggggctccccatcttcattctgcggttggccacggaggtgaactgggacgaggaaaaggagtgttttgagagcttatcaaaggaatgtgccatgttctattccatacgcaaacagtatataagtgaagaaagtacgctgagtgggcagcaatctgaagtccctgggagcatccccaattcatggaaatggacagtggagcacatcgtgtataaggccctgcggagccacatcctcccgccaaaacacttcactgaagacggcaacattctccagctcgcaaatctccctgacctgtataaggtgttcgaacgctgttag

SEQ ID NO: 92692 - DNA, 1548 bp, Artificial Sequence
  derived and/or modified sequence
atgaacggatacatttccaatgccaattatagcgtgaaaaagtgtattttcctactgttcataaatcatagactggttgagagtactagcttgagaaaggcaattgaaacagtttacgccgcatacctgcccaaaaatacacacccctttctgtacttgtcactcgaaattagcccgcagaatgttgacgtgaacgtacatcccaccaagcatgaggttcactttcttcacgaagagtccatactggaacgagtccagcaacatatagaaagtaaactcctgggcagtaatagttctcgtatgtatttcacacagacgctcttgccaggcttagcaggtccaagcggggaaatggtcaagagtaccacctccctcacttcttcctccacgagtggcagtagcgataaggtgtacgcacaccagatggttagaaccgacagcagggagcaaaaactggatgccttcctgcagccccttagtaagcctctgagctctcagccccaggcaatagtgacagaggacaaaacagacatttcttccggccgtgccaggcaacaggacgaggaaatgctggagctgcctgctcccgcagaagtggcagcaaagaatcagtccctggaaggggacactaccaagggaacgtcagagatgtctgagaagcgcggacctacttcatccaatccacgcaaacgccaccgcgaggattccgatgtcgaaatggtcgaggatgacagcaggaaggaaatgacagctgcctgcactcctcgtcgtcggattatcaatctcacctctgttctgtctctgcaagaggagatcaatgagcaggggcacgaagtgctgagagaaatgcttcacaaccactccttcgttggttgtgtcaatcctcagtgggccctcgcacagcatcagaccaagctgtacctcctgaacactactaaactgtccgaggagctgttctaccagatcctgatttacgattttgctaactttggcgtgttgagactgtccgaacccgctccactgtttgacctcgccatgctggctctggactcgccagagtccggatggactgaagaagatggacctaaagaaggtctggctgagtatatcgtggagttcctgaaaaaaaaggccgaaatgctggccgattacttttccctggagattgacgaagagggaaatctgattgggttacctctcctcatcgataattacgtgcctcctcttgaggggcttccaattttcatactacgcctcgccaccgaggtcaattgggatgaggaaaaagaatgcttcgagtcattgtccaaggagtgcgcgatgttttacagcataagaaaacagtacatctcggaggagagtaccctttcagggcaacagtccgaggttccaggttcgatccctaactcttggaagtggactgttgagcatatcgtttacaaggcactgagaagccatatcctaccaccaaagcattttactgaagacggtaatattttgcagcttgcaaacctgccggatctgtacaaggtctttgagcgatgttag

SEQ ID NO: 92693 - DNA, 1383 bp, Artificial Sequence
  derived and/or modified sequence
atgaacggctacatctctaacgccaattactctgtgaagaaatgcatatttttattgtttatcaatcaccggcttgtagaatctacgtctcttcgcaaggcaatcgagacagtctatgcagcttatctccctaaaaatacgcaccctttcctgtatctctccttagagatctcccctcaaaatgttgacgtcaatgtgcatcctacaaaacatgaagttcactttcttcacgaggagagcatactggagcgagtgcagcagcatatcgagtcaaagctgctaggctctaattcctcaagaatgtacttcacacagaccctgctccccggactggctgggccatccggagagatggtgaagtcaactacttccctcaccagttcctccacctccggcagcagtgataaagtctacgctcatcagatggtgagaaccgatagtcgggagcaaaagctggatgctttcctgcagcctctgagtaagcccctatccagccagccccaggctatcgtaaccgaagataaaacagatatcagctcaggcagggccagacaacaagacgaggagatgctcgaactgcccgctcctgcagaggtggccgctaagaaccaatctttggagggtgacacgacgaaaggaacctccgagatgagcgagaaaagaggcccaacatcctccaaccccagaaagcggcacagagaggactccgacgtagaaatggtggaggacgactccagaaaggaaatgactgctgcatgcacgcccagacgcaggatcattaacctaaccagtgtgctcagtctacaggaagagatcaatgagcaggggcatgaagtcctacgagaaatgcttcataatcattccttcgtgggatgcgttaatcctcagtgggccttggcccaacaccagacaaaattatatcttctgaacaccactaaactctctgaagaactgttctaccaaatcctgatatatgactttgcaaacttcggagtactgagactttccgaacccgcaccgttatttgatctagcaatgctggccctcgattcccctgagagcggctggacggaagaggatggacccaaggaaggcttggctgaatacattgttgagtttctcaaaaagaaagcagagatgttggctgactactttagtctggagattgacgaggaaggcaacctgattggcctgccgctgctaatcgataactatgtgccgcctttggaggggctgcctatcttcatcttgcgcttagctacggaagtgaactgggacgaggagaaggaatgcttcgagagcctgtctaaggagtgtgccatgttctattctatccgaaagcagtacatctccgaggagagtaccttgagcgggcagcaatag

SEQ ID NO: 92694 - DNA, 1548 bp, Artificial Sequence
  derived and/or modified sequence
atgaatgggtacatctctaacgctaactattctgtaaaaaagtgcatttttcttctcttcattaatcacaggctcgtggagagcacctcattaagaaaagcaatagagactgtgtatgccgcttacctgcccaaaaatacccatccattcttgtatttgagcctggagatctcccctcagaatgttgatgtgaatgttcatccaacaaaacacgaggtccattttctccatgaggaatctatcctcgagcgggttcaacaacacattgaaagcaagctgctgggaagcaactcttcacgcatgtatttcacccagacactgctccccggtcttgctggtccaagcggtgagatggtgaagtcaactaccagcctcaccagtagcagcacgtcaggatctagcgataaggtctatgcccaccaaatggtccggacagactccagggaacagaagcttgacgctttcttacagcctctgtctaagcccctgagcagccagcctcaggccatcgtgaccgaagacaaaacggatattagctccggtagggcccgacagcaagatgaggagatgctggagctacccgctcctgctgaggtcgcagctaaaaaccagtctctggagggcgacacaacaaaaggaaccagtgagatgagcgagaaaaggggtcctacaagctctaaccctaggaaaaggcaccgagaggacagcgatgtcgaaatggtagaagacgattcccgcaaggagatgactgccgcttgcacacctcggaggaggatcatcaatttaacaagcgtgcttagcttacaggaggaaattaacgagcagggacatgaagtacttcgggagatgttacataatcatagcttcgtggggtgcgtgaacccccagtgggccctggcgcagcaccagacgaagctctatctcctaaacaccaccaagctgtccgaagagctgttctaccagatactgatatatgattttgctaacttcggggtcctccggctgagtgagccagccccacttttcgatctcgccatgctagcgctggactcaccagagtctggctggactgaggaagacggcccaaaggaaggcctggctgaatacatcgtcgagttcttaaaaaagaaggccgaaatgttggccgactacttttctttagaaatcgatgaggaaggtaacctgattggtctccctctgctgatcgacaactacgtacctccactggagggactccctatcttcatcctacgacttgccaccgaagtgaattgggatgaggaaaaagaatgtttcgagagtctgagcaaggaatgtgctatgttttactccatacgcaagcaatatataagcgaagagtccacactttctggtcaacagtctgaggtgcctgggtctatcccgaatagttggaaatggaccgttgagcacatagtctacaaggccctgaggtcccatatcctccctcccaagcatttcaccgaggacgggaacatccttcagctggctaatctgcccgatttgtataaggtgtttgaaaggtgttag

SEQ ID NO: 92695 - protein, 491 aa, Artificial Sequence
  derived and/or modified sequence
MIATGGVITGLAALKRQDSARSQQHVNLSPSPATQEKKPIRRRPRADVVVVRGKIRLYSPSGFFLILGVLISIIGIAMAVLGYWPQKEHFIDAETTLSTNETQVIRNEGGVVVRFFEQHLHSDKMKMLGPFTMGIGIFIFICANAILHENRDKETKIIHMRDIYSTVIDIHTLRIKEQRQMNGMYTGLMGETEVKQNGSSCASRLAANTIASFSGFRSSFRMDSSVEEDELMLNEGKSSGHLMPPLLSDSSVSVFGLYPPPSKTTDDKTSGSKKCETKSIVSSSISAFTLPVIKLNNCVIDEPSIDNITEDADNLKSRSRNLSMDSLVVPLPNTSESFQPVSTVLPRNNSIGESLSSQYKSSMALGPGAGQLLSPGAARRQFGSNTSLHLLSSHSKSLDLDRGPSTLTVQAEQRKHPSWPRLDRNNSKGYMKLENKEDPMDRLLVPQVAIKKDFTNKEKLLMISRSHNNLSFEHDEFLSNNLKRGTSETRF

SEQ ID NO: 92696 - DNA, 1476 bp, Artificial Sequence
  derived and/or modified sequence
atgatcgccaccggcggcgtgatcaccggcctggccgccctgaagagacaggacagcgccagaagccagcagcacgtgaacctgagccccagccccgccacccaggagaagaagcccatcagaagaagacccagagccgacgtggtggtggtgagaggcaagatcagactgtacagccccagcggcttcttcctgatcctgggcgtgctgatcagcatcatcggcatcgccatggccgtgctgggctactggccccagaaggagcacttcatcgacgccgagaccaccctgagcaccaacgagacccaggtgatcagaaacgagggcggcgtggtggtgagattcttcgagcagcacctgcacagcgacaagatgaagatgctgggccccttcaccatgggcatcggcatcttcatcttcatctgcgccaacgccatcctgcacgagaacagagacaaggagaccaagatcatccacatgagagacatctacagcaccgtgatcgacatccacaccctgagaatcaaggagcagagacagatgaacggcatgtacaccggcctgatgggcgagaccgaggtgaagcagaacggcagcagctgcgccagcagactggccgccaacaccatcgccagcttcagcggcttcagaagcagcttcagaatggacagcagcgtggaggaggacgagctgatgctgaacgagggcaagagcagcggccacctgatgccccccctgctgagcgacagcagcgtgagcgtgttcggcctgtaccccccccccagcaagaccaccgacgacaagaccagcggcagcaagaagtgcgagaccaagagcatcgtgagcagcagcatcagcgccttcaccctgcccgtgatcaagctgaacaactgcgtgatcgacgagcccagcatcgacaacatcaccgaggacgccgacaacctgaagagcagaagcagaaacctgagcatggacagcctggtggtgcccctgcccaacaccagcgagagcttccagcccgtgagcaccgtgctgcccagaaacaacagcatcggcgagagcctgagcagccagtacaagagcagcatggccctgggccccggcgccggccagctgctgagccccggcgccgccagaagacagttcggcagcaacaccagcctgcacctgctgagcagccacagcaagagcctggacctggacagaggccccagcaccctgaccgtgcaggccgagcagagaaagcaccccagctggcccagactggacagaaacaacagcaagggctacatgaagctggagaacaaggaggaccccatggacagactgctggtgccccaggtggccatcaagaaggacttcaccaacaaggagaagctgctgatgatcagcagaagccacaacaacctgagcttcgagcacgacgagttcctgagcaacaacctgaagagaggcaccagcgagaccagattctag

SEQ ID NO: 92697 - DNA, 1476 bp, Artificial Sequence
  derived and/or modified sequence
atgatagcaactggtggagtaatcactggacttgccgcgcttaaacgccaggattctgctcgatctcagcagcatgtgaatctgagccccagtcctgctactcaggagaaaaagcccatccgtagaaggccacgtgctgacgtcgtggtcgttcgaggcaaaatccgactgtacagcccctcggggtttttcctgatcctcggcgtgttaataagtataataggaattgcaatggcggtgctggggtattggccccagaaggagcactttattgacgcggaaacaaccttgtctacgaacgaaacacaagtgatcagaaatgaggggggtgtcgtggtgcgcttctttgaacagcatctgcactctgacaagatgaaaatgctggggccattcaccatgggcataggaatcttcatttttatctgtgccaacgccatactccacgagaatcgcgacaaggagactaagatcatccacatgcgagatatttactcgacagtgatcgacattcatactctcagaatcaaggagcagaggcagatgaatgggatgtacacaggcctgatgggcgaaacagaagttaagcagaacggctcgtcctgcgcaagccgcctcgccgctaacaccattgccagtttctcaggatttagatcctcctttcgcatggattcgtctgtggaggaagacgagctgatgctgaacgaagggaaatccagcggccatctgatgccgcccctactgtccgatagttcagtgtctgtttttgggctttatccaccaccctctaaaaccaccgacgataaaactagcgggtctaaaaaatgcgagaccaaatcaatcgtaagcagctcaatcagtgcctttaccctccctgtgatcaagctgaataattgtgttatcgacgagccgagtattgacaatatcacagaagacgccgataatctgaagagcaggagcaggaatctatctatggatagcctggtcgttcccctcccaaatacaagtgagagctttcagccagttagcaccgtcctgccccgaaataatagcataggcgaaagcttgtcaagccaatacaagagcagcatggccctaggcccaggggctggccaactcctgagtccaggagctgctcggagacagtttggctcgaacacatcccttcatttactgtctagccactccaaatcccttgatctagatcgtgggccaagtacactcacggtccaggcggagcagcgcaaacatcccagttggccccggcttgaccggaacaactctaaaggctacatgaaactggaaaacaaggaagatcctatggaccgcttactcgtgccccaggtggcaatcaagaaggactttacaaacaaggagaaactgctgatgatttccaggtctcacaataatctgagtttcgagcacgacgaattcctgagtaataatctgaaacgtggaactagcgaaactagattttag

SEQ ID NO: 92698 - DNA, 1476 bp, Artificial Sequence
  derived and/or modified sequence
atgatcgctaccgggggagttatcactggtctggctgcccttaagagacaagacagtgcacgctcacaacagcacgtgaatctctcaccctctccagctacgcaagagaaaaagcccatcaggcggcgccccagggcagatgtcgttgtggttcgggggaagatcaggctctatagtccctcaggcttcttcctgatactcggcgtcctcatcagcatcataggaatcgccatggcagtcttaggctactggccacagaaggagcacttcatagatgcagaaacaactctgtcaacgaacgagacacaagtgatcaggaacgaggggggggtggtggttcggttcttcgagcaacatttgcactcagacaaaatgaagatgctgggaccctttaccatggggatcggtatttttatttttatttgtgctaacgccatcctgcatgagaatagagacaaggagaccaagatcattcacatgagagatatctattccacagtgatcgacatacacaccctgaggattaaagaacagcggcagatgaatggcatgtacacggggcttatgggtgagacagaggtcaaacagaatggctcctcttgcgcctcgcgcttagccgcgaacacaatagcttcttttagcggattcaggagtagttttcgcatggactcaagcgtcgaagaggacgagctaatgctcaacgagggcaaaagcagtggccacctaatgcccccactcttgagcgactcctcagtgagtgtgttcggcctgtaccctccaccaagcaagacaaccgacgataagacatccggttctaaaaagtgtgaaaccaagtcaatcgtatcatcatcgatcagcgccttcacgttgcctgtgatcaaacttaacaactgtgttatcgacgagccctctattgataatattacagaagacgccgacaatctaaagagtcgcagtagaaacttgtctatggattcactcgtcgtccctctgcctaatacctccgagagcttccagccagttagtaccgtgctgccaaggaacaactctattggcgaaagcttatcaagtcaatataagtcttcaatggctctcggcccgggtgcaggtcagcttctgtcccctggagccgcgagacgacagtttggctccaacacctccctgcacctgctgtcctcacactcaaagtccctcgatcttgaccgcggaccttcaacactgaccgttcaagctgagcagaggaagcacccttcatggcctcgcctcgatcgtaataactctaaaggctatatgaagcttgagaataaagaggaccccatggaccgtttgctggtgccgcaggtggctataaaaaaggattttaccaacaaagaaaaactgcttatgatctctcggagccataataatttatccttcgaacatgacgaattcttgtctaataatctgaaaagggggacaagtgagacccgcttttag

SEQ ID NO: 92699 - DNA, 1476 bp, Artificial Sequence
  derived and/or modified sequence
atgatcgctacgggcggcgtaatcacagggcttgccgccctgaaacgccaggactcagctcgaagccagcaacacgtaaatttaagtcctagccccgccacacaggaaaagaaacccattcggcgaagacccagggccgacgtggtcgtcgtgagagggaagatccgtctatattcccctagtggcttctttctgatcctaggggtcctcatttctataattggcatcgccatggccgtcttgggctactggccccaaaaagagcatttcattgacgccgagacaaccctatctactaatgaaactcaagtgattaggaatgaagggggcgtcgtagtacgcttctttgagcaacatctacactctgacaagatgaagatgcttgggcctttcactatgggcatcggaatcttcatctttatctgtgccaatgcaattcttcacgagaacagagacaaagagactaagatcattcacatgagagacatctattccaccgtgattgacatccacactctccggatcaaagagcagaggcagatgaacggaatgtataccggtctgatgggcgagaccgaagtcaaacaaaatggatccagctgcgctagtcggctcgccgcaaacactatagcgagcttctccggattcaggtcgtcatttagaatggattcttctgtggaggaggacgagttgatgctaaatgaggggaagagcagcggccatttgatgccacccctcctgtcggatagctccgtgagcgtgttcggtttgtatccacctccatcaaagacaactgacgacaagacatctggctcaaagaagtgtgagacaaagtcaatcgtgtccagtagcatttccgctttcaccctgccagtgatcaagctcaacaattgcgtgatcgatgagccaagcatcgataacataactgaggacgccgacaatcttaagtctaggtcaagaaacctcagtatggacagtctggttgtaccactgcccaacacgtcagaatctttccagcccgtgagcactgtattgcccaggaataacagtataggagaatctctgtcgagtcagtataaatcatccatggcattgggccccggcgcaggccaactgttgtcaccaggcgccgccaggcgccagtttggctcaaatacatccttgcacctattatcctctcattccaagagcctggacttagatcgaggcccgtctacacttacagttcaggccgaacagaggaagcacccttcctggccgagactggacagaaataatagcaaggggtacatgaaactcgagaacaaagaagatcccatggataggttgctcgtgccacaagttgctatcaaaaaggattttacaaataaggagaaattgcttatgatcagtcgctcccataacaatctgtcatttgagcatgacgagtttctctccaataatttaaagcgcgggacaagtgagacacggttttag

SEQ ID NO: 92700 - DNA, 1476 bp, Artificial Sequence
  derived and/or modified sequence
atgattgccaccggcggcgtcatcaccggcctggccgccctgaagaggcaggacagcgcccggagccagcagcacgtgaacctgagccccagccctgccacccaggagaagaagcccatcagaagaagacccagggcagatgtggtggtggtgcggggcaagatccggctgtacagccccagcggcttcttcctgatcctgggcgtgctgatcagcatcatcggcatcgccatggctgtgctgggctactggccccagaaggagcacttcattgatgctgagaccaccctgagcaccaatgagacccaggtgatcagaaatgaaggaggagtggtggtgcgcttctttgagcagcacctgcacagcgacaagatgaagatgctgggccccttcaccatgggcatcggcatcttcatcttcatctgtgccaatgccatcctgcatgaaaatagagacaaggagaccaagatcatccacatgagggacatctacagcaccgtcatcgacatccacaccctgcgcatcaaggagcagaggcagatgaatggcatgtacacaggcctgatgggagaaacagaggtgaagcagaatggcagcagctgtgccagccggctggccgccaacaccatcgccagcttcagcggcttccgcagcagcttcaggatggacagctctgtggaggaggatgagctgatgctgaatgaaggcaagagcagcggccacctgatgccacccctgctgagtgacagctctgtgtctgtgtttggcctgtaccccccacccagcaagaccacagatgacaagaccagcggcagcaagaagtgtgagaccaagagcatcgtgagcagcagcatcagcgccttcaccctgcctgtgatcaagctgaacaactgtgtgattgatgagcccagcattgacaacatcacagaagatgctgacaacctgaagagccgcagcaggaacctgtccatggacagcctggtggtgcccctgcccaacaccagcgagagcttccagcctgtgtccacagtgctgcccaggaacaacagcattggagagagcctgagcagccagtacaagagctccatggccctgggccctggagctggccagctgctgagccctggagctgcccggcggcagtttggcagcaacaccagcctgcacctgctgagcagccacagcaagagcctggacctggaccggggccccagcaccctgactgtgcaggccgagcagaggaagcaccccagctggccccggctggacaggaacaacagcaagggctacatgaagctggagaacaaggaggaccccatggaccggctgctggtgccccaggtggccatcaagaaggacttcaccaacaaggagaagctgctgatgatcagccgcagccacaacaacctgagctttgaacatgatgagttcctgagcaacaacctgaagaggggcaccagcgagacccgcttctag

SEQ ID NO: 92701 - DNA, 1476 bp, Artificial Sequence
  derived and/or modified sequence
atgatcgccaccggcggcgtgatcaccggcctggccgccctgaagcgccaagattccgcaaggtcccagcaacatgtcaacttgagcccatcacctgccactcaggaaaagaaacctataaggaggagacccagagcagacgtggtggtcgtgagaggcaaaattcgcctgtactcaccttccggctttttccttattctcggcgtacttatttcgattattgggatagctatggcggtcctcgggtattggccccaaaaagaacattttatcgacgccgaaaccacgttatccactaacgagacccaagttatccgaaacgaaggaggtgtcgtggtaagatttttcgagcagcatttgcactcagataagatgaagatgctgggcccattcaccatgggaatcggcattttcatcttcatttgcgcaaatgcaatactccacgagaaccgggacaaggaaactaagattatccacatgagagatatttactctaccgtgatcgacattcataccctcagaatcaaagaacagcggcaaatgaacgggatgtacaccggtctgatgggcgagaccgaggtcaaacaaaacgggtcatcttgcgcctctagattggccgcaaatacaatcgccagtttttccggattcagaagttcctttagaatggacagctctgttgaagaagacgagctgatgctcaatgagggcaagtcctccggtcatctgatgccacctcttctctctgattcatctgtgtccgtctttggcctgtacccaccgccctcaaagacgacagatgataaaactagcggctccaagaagtgtgaaactaagtcaattgtgtcatctagtatttcagcattcacactgcccgtaatcaaactgaacaattgcgtcatcgatgaaccctcaatcgataatattactgaggacgccgataatctgaaaagccgtagtcgcaacttgagcatggactctctggttgtccctctaccaaatacaagcgaatcctttcagcccgtgtccaccgtgttaccacggaataatagtataggggagtcgctctcctcccagtataaaagttccatggccctgggtcctggcgccggccagctgttatctcccggggctgctagaaggcagttcggctccaatacctctctccatctgctgagctctcactccaaatctctggatctggatcgagggcccagcacgctaactgttcaggccgagcagcggaagcatccgtcgtggccacgcctcgacaggaacaactccaaggggtatatgaagctggagaataaagaggaccctatggacagattgcttgtgccccaggtcgctataaaaaaggattttaccaacaaagaaaaattgctgatgatttctaggtctcacaacaacctctcttttgaacatgatgagtttctgtccaataacctcaagcgggggacgagcgaaaccaggttttag

SEQ ID NO: 92702 - DNA, 1476 bp, Artificial Sequence
  derived and/or modified sequence
atgatcgccaccggcggcgtgatcaccggcctggccgccctgaagcgccaggattccgctcgatcccaacaacacgttaacttgtcccctagcccagcaacccaggaaaaaaagccaataagaagacgccccagggcagacgtcgtcgtggtgagaggaaagattcggctttactcaccaagcgggtttttcttgatcttgggggtccttatctcgattatcggaattgccatggctgttctaggttattggccacagaaagagcacttcatcgatgccgaaacaacgttgtccaccaacgagacacaggtgattcggaatgaggggggggttgtagtcagattttttgagcagcatctccactcagacaagatgaagatgttggggccgttcaccatgggcattgggatttttattttcatctgcgccaacgccatcctgcacgaaaacagggacaaggaaaccaaaataatccatatgcgagacatctacagcacagtgatcgacattcatactctgaggatcaaggaacagcggcagatgaacggcatgtataccggcctcatgggcgaaaccgaggttaagcagaatggatcatcgtgtgcgagtaggcttgctgctaataccatcgcaagtttttctggctttagaagcagcttccggatggactcatccgtggaggaagacgagctcatgcttaatgaagggaaaagctctggtcatctcatgccaccacttttatccgactcatctgtttctgttttcggactgtacccccccccttctaaaactacggatgataaaacctctgggtccaaaaagtgcgagacaaagtccatcgtgtcctcaagcatttcagcctttactctgcccgtcatcaagctcaacaattgcgttatcgatgaaccttctattgacaatatcactgaggacgcagacaatctgaaatccaggtctaggaatctatctatggattcgttagtggtgcctctgcccaacacaagcgagtcattccagccggtttccacagtcctaccccggaataacagcattggggagtccctgagtagtcaatacaagtcctcaatggctttaggacctggcgcgggacagctccttagcccaggggcagctaggcgacagtttggaagtaacactagcctgcacctgctcagttcacactccaagtcccttgatctcgataggggcccctctaccttgactgtacaggcagaacagcgcaaacacccaagctggccgaggctggaccgcaataactccaagggttatatgaaactcgaaaataaggaggaccccatggatcggttacttgttccacaggtcgctatcaagaaagattttactaacaaagagaagctacttatgattagccgctcccacaacaatctgtctttcgagcacgacgaatttctgtccaacaatctgaaaaggggcacctcagagactagattttag

SEQ ID NO: 92703 - DNA, 1476 bp, Artificial Sequence
  derived and/or modified sequence
atgatcgccaccggcggcgtgatcaccggcctggccgccctgaagagacaggactctgcccggtcccagcaacacgttaacttatccccctcacccgcaacccaggagaagaagcccattcgtagacgaccccgcgccgatgttgtagtggtcagaggtaaaatcaggttgtactccccatctggcttctttcttattctcggcgtgttgatctcaattatcggaattgcaatggccgtcctcgggtattggccgcagaaggagcacttcattgatgccgagacgactttgtccaccaatgagacacaggtaattagaaacgaaggtggcgtggtggtaagattttttgaacagcatctgcacagcgataaaatgaagatgttggggccattcaccatgggcatcgggatcttcatattcatctgtgcaaatgccatcctacacgagaatcgagataaagaaaccaagatcatccacatgagggatatttactctacggtcatcgacattcataccctgcgtattaaagagcagcgccagatgaacgggatgtacacggggctgatgggcgaaacagaggtcaaacagaacgggtctagctgtgcctccagactagcagccaatactatagcaagttttagtggatttcgttcctccttccgcatggatagctcagtggaggaggatgagctgatgctcaatgagggcaagtcaagcggccatcttatgccgccactcctttccgactcctccgtgtctgtctttggtttgtacccaccaccatcgaagaccacagatgacaaaacatcgggcagcaaaaagtgtgaaactaaaagcatagtctcctcgagtatcagcgcttttactctgccagtgatcaagctaaataactgtgtgatcgatgagccttccattgataacattactgaggacgccgacaacttgaagtctaggagcaggaacctctctatggactccctggtggtgccgctgccgaatacctcagagagcttccagcctgtcagtacagtactcccgagaaacaatagcattggcgagagcctgtccagtcagtacaaaagctccatggcccttggccccggagcaggccagctgctgtctcccggcgccgcccgaaggcagttcgggagcaatacgagcctgcatctccttagttcgcatagtaagtccctcgacctggaccgtgggcctagtacgcttacagtccaagccgaacagaggaagcatccatcttggcctcgactagatcggaataattcaaaagggtatatgaaattagaaaataaagaagatccaatggatagactactcgtcccccaggtcgcaatcaaaaaggattttaccaacaaggagaagctgttaatgatctcccgctcgcacaacaatttgagtttcgaacacgatgagttcctgagcaataatcttaaaaggggaacaagcgagacacgtttctag

SEQ ID NO: 92704 - DNA, 1476 bp, Artificial Sequence
  derived and/or modified sequence
atgatcgccactgggggtgtgataaccggcctggcggctctgaaacgccaggattccgcccgaagccagcaacacgtgaatttgagcccttccccagccactcaggaaaaaaagcccattcgcaggcgccctcgcgctgatgttgtagtcgtccgaggcaaaatcaggctatatagtccctcgggtttcttcctgatcctcggggttcttatctctattatcggtatcgccatggccgttctggggtactggccccagaaggagcatttcatagacgccgaaacaaccctaagcacaaacgaaacgcaggtaattcgaaatgagggaggcgtggtcgtgaggttcttcgagcagcatttgcatagtgacaagatgaaaatgctaggacctttcacaatggggatcggaatattcatttttatctgtgctaatgccattctgcacgagaatagagataaggaaacgaaaatcatacatatgagagatatatacagtactgtcatcgacatccataccctccgaattaaggagcagagacagatgaacggaatgtacacggggctgatgggtgagaccgaggttaaacagaacgggtcttcgtgcgcttcgaggctcgcagccaatactatagccagtttctccggctttcgatcatcctttaggatggattccagtgtcgaggaggacgaactgatgttaaatgagggtaagtccagtgggcatctgatgccaccactgttgtccgattcttctgtttcggtcttcgggttgtatcccccaccctccaagacaacagatgataaaacaagcggctctaaaaaatgtgagaccaaaagtatcgtaagctcaagcatctccgcttttacactgcccgtgatcaaacttaacaactgcgtgatagacgagccttcaattgacaatatcaccgaggacgcggacaacctcaagtctagaagcaggaatttgtctatggattcgcttgtcgtgccgctgccaaacactagcgagtctttccagccagtgtcaactgtactgccccgaaataatagcatcggcgagtccctttccagccaatataaatcaagtatggcattaggacccggagccggacaattgctaagcccgggagcagcacgacgccagttcggctccaacacctcactccatctcctctcctcacactctaaatctttggaccttgatcgcggaccttccactctcacagtgcaagcagaacagcgcaagcatcctagctggcctcggctggatagaaacaactcaaagggatacatgaagctcgaaaataaagaggacccaatggatagactgctagtcccacaagtggcaattaagaaagatttcacaaataaagagaaactgttgatgataagtaggtcgcacaacaacctgtcattcgagcatgatgagttcctgtccaacaatcttaagcgcggaacctccgaaactagattctag

SEQ ID NO: 92705 - DNA, 1476 bp, Artificial Sequence
  derived and/or modified sequence
atgattgctaccggcggagtgataaccggtctggccgctttaaaacgccaggacagcgctcgcagccagcagcacgtaaatctaagccccagtcccgcaacacaggaaaagaagcccattaggcgtcgaccccgagccgacgtggtcgtggtcagaggcaagattaggctctattccccctctggcttttttctgattctaggcgtgttaataagtataatcggcattgctatggctgtgctaggatattggccacagaaagagcacttcatcgatgcagagacaacgctgagcactaatgaaacacaggtcatccgcaacgaaggaggcgtcgtcgttaggttctttgaacagcatttgcatagcgacaaaatgaagatgctggggccattcaccatgggaattgggatctttatcttcatttgcgctaatgctattctccacgagaaccgggacaaagagacaaaaattatccacatgcgggatatttacagcacagttattgatattcacactcttaggatcaaggagcagaggcagatgaacgggatgtacactggtctgatgggagagaccgaggtgaagcagaacggatcgtcgtgtgcaagtcgtctggcagctaacactatagcttcatttagcggattcaggtccagtttcagaatggactcaagcgtagaggaagacgagttgatgctgaacgagggcaagagcagcggacatctgatgccaccactcctgtcagattctagtgtatcagtgttcggactgtacccccctccttctaagacgactgatgacaaaacctccggatctaaaaaatgcgaaaccaagtctatcgtgtcatcctctatttccgcattcacccttccagtaattaaactgaacaattgcgtcatcgatgagccctccatcgataacattactgaggacgctgataacctcaagagccggtctcgtaatctgagcatggacagcctggtagttcccctccccaacacttcagagagtttccagcctgtgagtactgtgttgccacgaaataactccatcggtgagagcctgtctagccagtataagagttctatggctctaggacccggagctggccagttgctgagccctggagccgcacgtcgtcaatttgggtctaacacctccctccacttactgtcatctcatagtaaatcattggacctggatcgcggacccagtacgttaacggtccaggcagaacagcgcaagcacccctcttggccgcgtctggacagaaataacagtaagggatatatgaaactagagaataaagaggaccccatggaccggctgctggtgccacaagtcgcaattaaaaaggatttcacaaacaaggaaaagctgctgatgattagtaggagccacaataacctttcattcgagcacgacgagtttttatctaataatcttaaacggggaaccagtgaaacccggttttag

SEQ ID NO: 92706 - DNA, 1476 bp, Artificial Sequence
  derived and/or modified sequence
atgattgcaacggggggagttatcacagggctcgccgctctgaaaagacaagattctgcccgtagtcagcagcatgtaaatctctcccctagtcctgcgactcaagagaaaaaacctattcgtcgtcggcctcgtgccgatgttgttgtcgtgagaggaaagattcgcctgtattcccctagtggattttttctcatactcggagtgctgatttccatcatcgggatagctatggccgtcctgggctactggccacagaaggaacactttatcgacgctgagacgaccttgagcacgaatgagacacaagtgatcagaaatgaaggcggtgtggtagtgagatttttcgagcagcacctgcacagcgataaaatgaagatgcttggcccatttactatgggcatcggcatcttcatttttatctgtgctaatgccattttgcacgagaatcgggacaaggagaccaaaataatccacatgcgcgacatctacagtacagtgattgatatccatacattgaggataaaggagcaaagacagatgaatggcatgtatactggactgatgggagaaaccgaagtgaagcagaacggatcgtcttgtgctagccggcttgcggcaaatacaattgcaagcttcagtggattccggtcctccttccgaatggattcatcggtggaggaggatgaactgatgcttaacgaaggaaaaagcagcggacacctgatgcctccattgctgagtgactccagtgtcagtgtgtttggactgtatcctccaccctccaaaacaacagatgacaagacaagtggctcgaagaagtgcgaaacaaagtccattgtgagctcatccatcagcgcattcaccctgcccgtgataaaattgaataattgcgtgatcgacgaacccagcatagacaacatcactgaggatgccgacaatctgaaatcacgcagccgcaacctgagtatggactcccttgtagtgcccctgcccaatactagcgagtccttccaacctgtttccactgtccttccaagaaacaattccataggcgagtcactttcctctcagtacaaaagctcaatggcactgggccctggtgccggtcagctgctctcaccgggtgccgcaaggcgtcagttcggatctaacacatctttgcatctgttgtcaagccattctaaaagtctggacctcgacaggggaccctctacactcaccgtgcaggccgaacagagaaaacaccctagctggccaagactggacagaaacaactccaaaggttatatgaagctggaaaataaggaggacccgatggatcggttattagttccgcaggtggctatcaaaaaagattttacaaacaaagaaaagttactcatgatctctcgttcccacaacaatttgtccttcgaacacgatgagtttctctccaataacctcaaacgcggtacttctgaaacccgtttttag

SEQ ID NO: 92707 - DNA, 3512 bp, Artificial Sequence
  derived and/or modified sequence
ccaaagatgggttttgtctgcgggtgatttgggctctcgaagtgcaactttgtggccgggacgcggatcggccggcctgggctcctgcagagcagatcctgtctgcgtcctccaggaggagtgggtggcaggactggggtttcccacaggttttggggcggcggcgagattggcacggtccggggtcgcaggcgcgcagccacgcccctggaagtccgccccggcccccgcccccaacccgcctcttcggggctttatggcgtgaggtttggggctgggatccatctggagccgagcagaaaacttttcccctcccgttcccggtcccttttgtctttcttggacgcggtggcggcgccgcctgagcggcgactccctctcccctgcccggcttgctgcgcccggtgccctccgagggcaggcgcgcctggactctgcgcccggatggcggcggccctctgtgagcaccggcagcggcgcatcccctgccccgaggcctccggtgcccccccggcgcgggcataggggcgcccccaccctccgtccgcttgcaccccttgccacccgccccctcgcctgactcatccgcccgcggtggccgcccgagccctgggatggggagggagaccgcggctgcccgcggcggccgagattcccgctgacgcccccgaccctgccgccttcttcgtccgcctccagaggcgcccgacgtcccgacagctcctggagtgagaccaggactgagaacagggagaggcgacccgacccccagggcccggtgctcaggacagcacacagagccgctgaaaacgactgaagagagcaagggatttcctgggacatctggctctggagagtaaaaggccaagctatgatagcaactggtggagtgataactggcctggccgccttgaaaaggcaagactctgccagatcacagcagcatgtcaacctcagcccgtctcctgctacccaagagaagaagcccatcaggcgccggccccgggcagatgttgtggttgttcgtggcaaaatccggctttattccccatctggtttttttcttattttaggagtgctcatctccattataggaattgctatggccgttcttggatattggccccaaaaagaacattttattgatgctgaaacaacactgtcaacaaatgaaactcaggtcattcggaatgaaggcggtgtggtggttcgcttctttgagcagcatttgcattctgataagatgaaaatgcttggcccattcaccatggggattggcattttcattttcatttgtgctaatgccattcttcatgaaaaccgtgacaaagagaccaaaatcatacacatgagggatatctattccacagtcattgacattcacacgctaagaatcaaggagcaaaggcaaatgaacggcatgtacactggtttgatgggagaaacagaagtaaaacagaatgggagctcctgtgcctcgagattggcagcaaatacgatcgcctctttctcgggttttcggagcagttttcgaatggacagctccgtggaggaggatgaacttatgttaaatgaaggtaagagttctgggcatcttatgccccctttgctctctgacagctctgtgtctgtctttggcctctatccacctccttccaagacaactgatgataagaccagcggctctaagaaatgtgaaaccaagtcaattgtgtcatcgtccatcagtgcttttacattgcctgtgatcaaacttaataactgtgttattgatgagcccagtatagataacatcactgaagatgctgacaacctcaaaagtaggtcaaggaatttgtcaatggattcccttgtggttcctttgcccaacaccagtgaatccttccagcccgtcagcacagtgctaccaaggaataattccattggggagtcgttgtcgagtcagtacaagtcatctatggctctcggacctggggctggacagctcttgtctcctggggctgccagaagacagtttgggtccaatacatccttgcatttgctctcgtcacactcaaagtccttggacttagaccggggtccctccactctaactgttcaggcagaacaacggaaacatccaagttggcctaggttggatcggaacaacagcaagggatatatgaaactagagaacaaagaagacccgatggataggttgcttgtgccccaagttgccatcaaaaaggactttaccaataaggagaagcttcttatgatttcaagatctcacaataatttgagttttgaacatgatgagtttttgagtaacaacctaaagaggggaacttctgaaacaaggttttaatgttaaaagaatatatcattttacaagggtatatattttaaaacgattttcactggtgtttccttcttaaagtattggctgtaagcctttttaatcaaatggtttgtagtgtattagaattggctgcttagttctgtaatgaagatggttgtatgtttgggttacttgtgactgcagtactctatgttaccacacatgattttatttttctcttcctttgaaagcatgatctcttttattaatatgaatgcaaaatgcttgcatccaaattaaagcttattttctttacttttaagttctttgattgccctattcataaaatgaaatgtccagtatggaaaacatagggtaccaaagtgtggaccaggagtacaaattcagtcccaatactcaatacgtattatagatgactatgagtgcaaaccttaggatgtgattttctgaataattgttctttgtaggatttggttacattatttaaaatgaaaaagatctagttttagtgtgagctcagtaatgttaattggttaagttcattgtgaatcttgagttttagataagtagttatttttttcaatatcacttctgtttttagtgatattatatcaagaaacaacgtattcaagagccatggctgacagtgccagatatacttagggataaacatcaaaatgcaattatagttgctataacgttagatactcggaatcaaaatttatttgcaagctgacttgataaactaaatgaaccaataaaatttgtagaaatgctatcctgaaataattatatacatgaagacaatgttgactaatgaattaagatacattatatactagttaatgctaactagtctcagtacctgtttttagccatctgttactgtccaatagcacctcattcccacattctattttcccccggtattctttagatcctagtatttggaaaacaatcggctaaccttgacatttctttttaccttcatatgccactatctcggtagttcaaaaaaatttagttcttgataaattgccttgaagtttaccttgtgctggagagccttatgataactccaaagactttcttacggtataatacatgttgtttaggattgtgtttcttagtcactgaagataataaatattaaaatggatgttttcatcag

SEQ ID NO: 92708 - DNA, 5017 bp, Artificial Sequence
  derived and/or modified sequence
gcaagcatttaggaatagcatttgccaactcccaagacttggctgtccctctcgctctggccttacttacctaactgacctcctgtagtactgagttgtgtgctggccaagttcctattcctggactgctttctttcccttgaccttccttgaaatactgctaacctgacttttgactgtgatctatgtgctatctcctgtgtgaagcctaatgaaaggtccttctctaatggaaactttcattctaggagttacctcattctgttttatgtggatctgttagctccttcattaggtttcaagctgtttgaaacagtgattgaatttgctcacctttgctttcctctcagggtctacattgggaccctgagtgataatagagccttctgtagtattgaattgctttaaacagaattaaaggacattggcaccaaatgtgattttgccaatccttgggagtcttggtgcctctgtctgggcttgaccagggtagaatggctgaagaaaatgtgattcctccacccattaaattctttatttctcaactactctggaagtttttgcctctttttgtttctatccattttcatacttttaagatacccttttttactttaagataccttttttcttcctaacgtttctttacatgctcacatgcaagcccagtcatccatctctctttttcacctttctgtcctcatatatttttcttaaaatatcttttctcatctaatctcctttcctctatcaatcagcctcctaagcgaaaatggtagtgctaatgttttaaaaagtgggggaggactagaaatctgtatggaatgtaattcacttttattgcttttaaattaaatgaaacgtttttgcccttgtttccattctactcagaaggatttcagactaaatccttaagcctgccatatggaaataactgggctagagggctgctatctaatctaagcatttaattcaaacatttgaaatggtttttgcttcaagaaaacataggttgacactaagctttattttagcaaaggtttgggaaaggttctaatctgcagtatgtacactttgataaatttcatagactagagcaacagattacaatttagtttgttcttccaacataaaactattttaatcctagttataatttcactgaaggctggatttactcactggcttgttaaaactgtagataacaaccacaagcctgttatttaaacacaattcagaaatcataaatagaaattcaaaaggagagctcaatgctgcaagatgagatttgatgccctgaagaaactctctctgaaatttgccaaagaccttgtggaacttaaaatatcttcttgtttcctaccagctagatatggcagcttgagaactatttattatgaatcaagatagatattttaccaactcagaaaatgttgctttttgtttggatattaatcttgtttgttcatatttttaactaggaaagttagtacagtaatatggtggtcatccaacagaccacaagaagagaatttgtccctcattcagcattttagcaaatatttcttgaacactagccatgtgcaaggtattacagtgagtgtttctgctaataaaaatatgaattaaatttgatgtttgatcataagtagaagaactgtgatactataatattgtaagtgccatagaaaacttgctattataaaatgctgtaaggagttaatgcttgcatagggtgcagtgggtcagctagagaaggctttataaagaaagtggaatatgagctttgatgcctagccagatgtgggtatgtgaagaacagggcagggcagtggggagtgggtggattctggacagctgaaacattgttaacaaaatctcagaaatggtacaaaatggaatatgaatgagaaatacagaacatttgttaggttttatttttatgcaaattaaagagaagagttagagacaaagttaaagtcaatgggtctagaatttcagctaaaactttggtaggtagtggagaatattttatcattattctgctctttaaacaacttcagagatgattgattaatcttgattgtaaaggaagagaaattctttggaagaccagttagggggttatcatatggtctagtaaaagttaataagatctgcacaaggctgggaagagtaggattagaacagaggggtggaattaaaggacatcgtatattggaaatttctaggatttagaacctgattggaagaggaagaagaaagggaggagttaaaaataactgtaaagagccaaatctgagaactgaccctgctaaaaaagtcagacaagtcaagtggtgcagctggtgtgtgctagaagagtaaaaggccaagctatgatagcaactggtggagtgataactggcctggccgccttgaaaaggcaagactctgccagatcacagcagcatgtcaacctcagcccgtctcctgctacccaagagaagaagcccatcaggcgccggccccgggcagatgttgtggttgttcgtggcaaaatccggctttattccccatctggtttttttcttattttaggagtgctcatctccattataggaattgctatggccgttcttggatattggccccaaaaagaacattttattgatgctgaaacaacactgtcaacaaatgaaactcaggtcattcggaatgaaggcggtgtggtggttcgcttctttgagcagcatttgcattctgataagatgaaaatgcttggcccattcaccatggggattggcattttcattttcatttgtgctaatgccattcttcatgaaaaccgtgacaaagagaccaaaatcatacacatgagggatatctattccacagtcattgacattcacacgctaagaatcaaggagcaaaggcaaatgaacggcatgtacactggtttgatgggagaaacagaagtaaaacagaatgggagctcctgtgcctcgagattggcagcaaatacgatcgcctctttctcgggttttcggagcagttttcgaatggacagctccgtggaggaggatgaacttatgttaaatgaaggtaagagttctgggcatcttatgccccctttgctctctgacagctctgtgtctgtctttggcctctatccacctccttccaagacaactgatgataagaccagcggctctaagaaatgtgaaaccaagtcaattgtgtcatcgtccatcagtgcttttacattgcctgtgatcaaacttaataactgtgttattgatgagcccagtatagataacatcactgaagatgctgacaacctcaaaagtaggtcaaggaatttgtcaatggattcccttgtggttcctttgcccaacaccagtgaatccttccagcccgtcagcacagtgctaccaaggaataattccattggggagtcgttgtcgagtcagtacaagtcatctatggctctcggacctggggctggacagctcttgtctcctggggctgccagaagacagtttgggtccaatacatccttgcatttgctctcgtcacactcaaagtccttggacttagaccggggtccctccactctaactgttcaggcagaacaacggaaacatccaagttggcctaggttggatcggaacaacagcaagggatatatgaaactagagaacaaagaagacccgatggataggttgcttgtgccccaagttgccatcaaaaaggactttaccaataaggagaagcttcttatgatttcaagatctcacaataatttgagttttgaacatgatgagtttttgagtaacaacctaaagaggggaacttctgaaacaaggttttaatgttaaaagaatatatcattttacaagggtatatattttaaaacgattttcactggtgtttccttcttaaagtattggctgtaagcctttttaatcaaatggtttgtagtgtattagaattggctgcttagttctgtaatgaagatggttgtatgtttgggttacttgtgactgcagtactctatgttaccacacatgattttatttttctcttcctttgaaagcatgatctcttttattaatatgaatgcaaaatgcttgcatccaaattaaagcttattttctttacttttaagttctttgattgccctattcataaaatgaaatgtccagtatggaaaacatagggtaccaaagtgtggaccaggagtacaaattcagtcccaatactcaatacgtattatagatgactatgagtgcaaaccttaggatgtgattttctgaataattgttctttgtaggatttggttacattatttaaaatgaaaaagatctagttttagtgtgagctcagtaatgttaattggttaagttcattgtgaatcttgagttttagataagtagttatttttttcaatatcacttctgtttttagtgatattatatcaagaaacaacgtattcaagagccatggctgacagtgccagatatacttagggataaacatcaaaatgcaattatagttgctataacgttagatactcggaatcaaaatttatttgcaagctgacttgataaactaaatgaaccaataaaatttgtagaaatgctatcctgaaataattatatacatgaagacaatgttgactaatgaattaagatacattatatactagttaatgctaactagtctcagtacctgtttttagccatctgttactgtccaatagcacctcattcccacattctattttcccccggtattctttagatcctagtatttggaaaacaatcggctaaccttgacatttctttttaccttcatatgccactatctcggtagttcaaaaaaatttagttcttgataaattgccttgaagtttaccttgtgctggagagccttatgataactccaaagactttcttacggtataatacatgttgtttaggattgtgtttcttagtcactgaagataataaatattaaaatggatgttttcatc

SEQ ID NO: 92709 - DNA, 1817 bp, Artificial Sequence
  derived and/or modified sequence
agtggctctcaaacctcagcaggcatcagaatcacctggaggacttatgaaaccagtttgctgggcccgcttggtccagcgcttctgattcagtagggagaagtggaaccatgaatttgcattcccgacaagctcacaggttataccagtgttgctggcccgaggattgtattttgggcagcattactccatctgaactcttcttgttctcttacctccttacgtcccaagactcgcggatgttagtttattctcagagtaaaaggccaagctatgatagcaactggtggagtgataactggcctggccgccttgaaaaggcaagactctgccagatcacagcagcatgtcaacctcagcccgtctcctgctacccaagagaagaagcccatcaggcgccggccccgggcagatgttgtggttgttcgtggcaaaatccggctttattccccatctggtttttttcttattttaggagtgctcatctccattataggaattgctatggccgttcttggatattggccccaaaaagaacattttattgatgctgaaacaacactgtcaacaaatgaaactcaggtcattcggaatgaaggcggtgtggtggttcgcttctttgagcagcatttgcattctgataagatgaaaatgcttggcccattcaccatggggattggcattttcattttcatttgtgctaatgccattcttcatgaaaaccgtgacaaagagaccaaaatcatacacatgagggatatctattccacagtcattgacattcacacgctaagaatcaaggagcaaaggcaaatgaacggcatgtacactggtttgatgggagaaacagaagtaaaacagaatgggagctcctgtgcctcgagattggcagcaaatacgatcgcctctttctcgggttttcggagcagttttcgaatggacagctccgtggaggaggatgaacttatgttaaatgaaggtaagagttctgggcatcttatgccccctttgctctctgacagctctgtgtctgtctttggcctctatccacctccttccaagacaactgatgataagaccagcggctctaagaaatgtgaaaccaagtcaattgtgtcatcgtccatcagtgcttttacattgcctgtgatcaaacttaataactgtgttattgatgagcccagtatagataacatcactgaagatgctgacaacctcaaaagtaggtcaaggaatttgtcaatggattcccttgtggttcctttgcccaacaccagtgaatccttccagcccgtcagcacagtgctaccaaggaataattccattggggagtcgttgtcgagtcagtacaagtcatctatggctctcggacctggggctggacagctcttgtctcctggggctgccagaagacagtttgggtccaatacatccttgcatttgctctcgtcacactcaaagtccttggacttagaccggggtccctccactctaactgttcaggcagaacaacggaaacatccaagttggcctaggttggatcggaacaacagcaagggatatatgaaactagagaacaaagaagacccgatggataggttgcttgtgccccaagttgccatcaaaaaggactttaccaataaggagaagcttcttatgatttcaagatctcacaataatttgagttttgaacatgatgagtttttgagtaacaacctaaagaggggaacttctgaaacaaggttttaatgttaaaagaatatatcattttacaagggtatatattttaaaacgattttcactggtgtttccttctt

SEQ ID NO: 92710 - protein, 720 aa, Artificial Sequence
  derived and/or modified sequence
MIGIWHIRLLLAISLSLKTFSLVTMICQLPLVLWVLKCPQLMARDMGKLRQIIQRGGILITERKKADFSTKDIYQDLNRLLKGKKGEQMNSAVLPEMENQGSVEDTTGSQSLAALLNKCKTPQGQRLVNQWIKQPLMDKNRIEERLNLVEAFVEDAELRQTLQEDLLRRFPDLNRLAKKFQRQAANLQDCYRLYQGINQLPNVIQALEKHEGKHQKLLLAVFVTPLTDLRSDFSKFQEMIETTLDMDQVENHEFLVKPSFDPNLSELREIMNDLEKKMQSTLISAARDLGLDPGKQIKLDSSAQFGYYFRVTCKEEKVLRNNKNFSTVDIQKNGVKFTNSKLTSLNEEYTKNKTEYEEAQDAIVKEIVNISSGYVEPMQTLNDVLAQLDAVVSFAHVSNGAPVPYVRPAILEKGQGRIILKASRHACVEVQDEIAFIPNDVYFEKDKQMFHIITGPNMGGKSTYIRQTGVIVLMAQIGCFVPCESAEVSIVDCILARVGAGDSQLKGVSTFMAEMLETASILRSATKDSLIIIDELGRGTSTYDGFGLAWAISEYIATKIGAFCMFATHFHELTALANQIPTVNNLHVTALTTEETLTMLYQVKKGVCDQSFGIHVAELANFPKHVIECAKQKALELEEFQYIGESQGYDIMEPAAKKCYLEREQGEKIIQEFLSKVKQMPFTEMSEENITIKLKQLKAEVIAKNNSFVNEIISRIKVTT

SEQ ID NO: 92711 - protein, 868 aa, Artificial Sequence
  derived and/or modified sequence
MGPAGAKNLQSVVLSKMNFESFVKDLLLVRQYRVEVYKNRAGNKASKENDWYLAYKASPGNLSQFEDILFGNNDMSASIGVVGVKMSAVDGQRQVGVGYVDSIQRKLGLCEFPDNDQFSNLEALLIQIGPKECVLPGGETAGDMGKLRQIIQRGGILITERKKADFSTKDIYQDLNRLLKGKKGEQMNSAVLPEMENQVAVSSLSAVIKFLELLSDDSNFGQFELTTFDFSQYMKLDIAAVRALNLFQGSVEDTTGSQSLAALLNKCKTPQGQRLVNQWIKQPLMDKNRIEERLNLVEAFVEDAELRQTLQEDLLRRFPDLNRLAKKFQRQAANLQDCYRLYQGINQLPNVIQALEKHEGKHQKLLLAVFVTPLTDLRSDFSKFQEMIETTLDMDQVENHEFLVKPSFDPNLSELREIMNDLEKKMQSTLISAARDLGLDPGKQIKLDSSAQFGYYFRVTCKEEKVLRNNKNFSTVDIQKNGVKFTNSKLTSLNEEYTKNKTEYEEAQDAIVKEIVNISSGYVEPMQTLNDVLAQLDAVVSFAHVSNGAPVPYVRPAILEKGQGRIILKASRHACVEVQDEIAFIPNDVYFEKDKQMFHIITGPNMGGKSTYIRQTGVIVLMAQIGCFVPCESAEVSIVDCILARVGAGDSQLKGVSTFMAEMLETASILRSATKDSLIIIDELGRGTSTYDGFGLAWAISEYIATKIGAFCMFATHFHELTALANQIPTVNNLHVTALTTEETLTMLYQVKKGVCDQSFGIHVAELANFPKHVIECAKQKALELEEFQYIGESQGYDIMEPAAKKCYLEREQGEKIIQEFLSKVKQMPFTEMSEENITIKLKQLKAEVIAKNNSFVNEIISRIKVTT

SEQ ID NO: 92712 - DNA, 2163 bp, Artificial Sequence
  derived and/or modified sequence
atgatcggcatctggcacatcagactgctgctggccatcagcctgagcctgaagaccttcagcctggtgaccatgatctgccagctgcccctggtgctgtgggtgctgaagtgcccccagctgatggccagagacatgggcaagctgagacagatcatccagagaggcggcatcctgatcaccgagagaaagaaggccgacttcagcaccaaggacatctaccaggacctgaacagactgctgaagggcaagaagggcgagcagatgaacagcgccgtgctgcccgagatggagaaccagggcagcgtggaggacaccaccggcagccagagcctggccgccctgctgaacaagtgcaagaccccccagggccagagactggtgaaccagtggatcaagcagcccctgatggacaagaacagaatcgaggagagactgaacctggtggaggccttcgtggaggacgccgagctgagacagaccctgcaggaggacctgctgagaagattccccgacctgaacagactggccaagaagttccagagacaggccgccaacctgcaggactgctacagactgtaccagggcatcaaccagctgcccaacgtgatccaggccctggagaagcacgagggcaagcaccagaagctgctgctggccgtgttcgtgacccccctgaccgacctgagaagcgacttcagcaagttccaggagatgatcgagaccaccctggacatggaccaggtggagaaccacgagttcctggtgaagcccagcttcgaccccaacctgagcgagctgagagagatcatgaacgacctggagaagaagatgcagagcaccctgatcagcgccgccagagacctgggcctggaccccggcaagcagatcaagctggacagcagcgcccagttcggctactacttcagagtgacctgcaaggaggagaaggtgctgagaaacaacaagaacttcagcaccgtggacatccagaagaacggcgtgaagttcaccaacagcaagctgaccagcctgaacgaggagtacaccaagaacaagaccgagtacgaggaggcccaggacgccatcgtgaaggagatcgtgaacatcagcagcggctacgtggagcccatgcagaccctgaacgacgtgctggcccagctggacgccgtggtgagcttcgcccacgtgagcaacggcgcccccgtgccctacgtgagacccgccatcctggagaagggccagggcagaatcatcctgaaggccagcagacacgcctgcgtggaggtgcaggacgagatcgccttcatccccaacgacgtgtacttcgagaaggacaagcagatgttccacatcatcaccggccccaacatgggcggcaagagcacctacatcagacagaccggcgtgatcgtgctgatggcccagatcggctgcttcgtgccctgcgagagcgccgaggtgagcatcgtggactgcatcctggccagagtgggcgccggcgacagccagctgaagggcgtgagcaccttcatggccgagatgctggagaccgccagcatcctgagaagcgccaccaaggacagcctgatcatcatcgacgagctgggcagaggcaccagcacctacgacggcttcggcctggcctgggccatcagcgagtacatcgccaccaagatcggcgccttctgcatgttcgccacccacttccacgagctgaccgccctggccaaccagatccccaccgtgaacaacctgcacgtgaccgccctgaccaccgaggagaccctgaccatgctgtaccaggtgaagaagggcgtgtgcgaccagagcttcggcatccacgtggccgagctggccaacttccccaagcacgtgatcgagtgcgccaagcagaaggccctggagctggaggagttccagtacatcggcgagagccagggctacgacatcatggagcccgccgccaagaagtgctacctggagagagagcagggcgagaagatcatccaggagttcctgagcaaggtgaagcagatgcccttcaccgagatgagcgaggagaacatcaccatcaagctgaagcagctgaaggccgaggtgatcgccaagaacaacagcttcgtgaacgagatcatcagcagaatcaaggtgaccacctag

SEQ ID NO: 92713 - DNA, 507 bp, Artificial Sequence
  derived and/or modified sequence
atggacaagaacagaatcgaggagagactgaacctggtggaggccttcgtggaggacgccgagctgagacagaccctgcaggaggacctgctgagaagattccccgacctgaacagactggccaagaagttccagagacaggccgccaacctgcaggactgctacagactgtaccagggcatcaaccagctgcccaacgtgatccaggccctggagaagcacgagggcaagcaccagaagctgctgctggccgtgttcgtgacccccctgaccgacctgagaagcgacttcagcaagttccaggagatgatcgagaccaccctggacatggaccaggtggagaaccacgagttcctggtgaagcccagcttcgaccccaacctgagcgagctgagagagatcatgaacgacctggagaagaagatgcagagcaccctgatcagcgccgccagagacctgggcggcagcctgcagcccagaagcagcagactggcctgcgccacctag

SEQ ID NO: 92714 - DNA, 2607 bp, Artificial Sequence
  derived and/or modified sequence
atgggccccgccggcgccaagaacctgcagagcgtggtgctgagcaagatgaacttcgagagcttcgtgaaggacctgctgctggtgagacagtacagagtggaggtgtacaagaacagagccggcaacaaggccagcaaggagaacgactggtacctggcctacaaggccagccccggcaacctgagccagttcgaggacatcctgttcggcaacaacgacatgagcgccagcatcggcgtggtgggcgtgaagatgagcgccgtggacggccagagacaggtgggcgtgggctacgtggacagcatccagagaaagctgggcctgtgcgagttccccgacaacgaccagttcagcaacctggaggccctgctgatccagatcggccccaaggagtgcgtgctgcccggcggcgagaccgccggcgacatgggcaagctgagacagatcatccagagaggcggcatcctgatcaccgagagaaagaaggccgacttcagcaccaaggacatctaccaggacctgaacagactgctgaagggcaagaagggcgagcagatgaacagcgccgtgctgcccgagatggagaaccaggtggccgtgagcagcctgagcgccgtgatcaagttcctggagctgctgagcgacgacagcaacttcggccagttcgagctgaccaccttcgacttcagccagtacatgaagctggacatcgccgccgtgagagccctgaacctgttccagggcagcgtggaggacaccaccggcagccagagcctggccgccctgctgaacaagtgcaagaccccccagggccagagactggtgaaccagtggatcaagcagcccctgatggacaagaacagaatcgaggagagactgaacctggtggaggccttcgtggaggacgccgagctgagacagaccctgcaggaggacctgctgagaagattccccgacctgaacagactggccaagaagttccagagacaggccgccaacctgcaggactgctacagactgtaccagggcatcaaccagctgcccaacgtgatccaggccctggagaagcacgagggcaagcaccagaagctgctgctggccgtgttcgtgacccccctgaccgacctgagaagcgacttcagcaagttccaggagatgatcgagaccaccctggacatggaccaggtggagaaccacgagttcctggtgaagcccagcttcgaccccaacctgagcgagctgagagagatcatgaacgacctggagaagaagatgcagagcaccctgatcagcgccgccagagacctgggcctggaccccggcaagcagatcaagctggacagcagcgcccagttcggctactacttcagagtgacctgcaaggaggagaaggtgctgagaaacaacaagaacttcagcaccgtggacatccagaagaacggcgtgaagttcaccaacagcaagctgaccagcctgaacgaggagtacaccaagaacaagaccgagtacgaggaggcccaggacgccatcgtgaaggagatcgtgaacatcagcagcggctacgtggagcccatgcagaccctgaacgacgtgctggcccagctggacgccgtggtgagcttcgcccacgtgagcaacggcgcccccgtgccctacgtgagacccgccatcctggagaagggccagggcagaatcatcctgaaggccagcagacacgcctgcgtggaggtgcaggacgagatcgccttcatccccaacgacgtgtacttcgagaaggacaagcagatgttccacatcatcaccggccccaacatgggcggcaagagcacctacatcagacagaccggcgtgatcgtgctgatggcccagatcggctgcttcgtgccctgcgagagcgccgaggtgagcatcgtggactgcatcctggccagagtgggcgccggcgacagccagctgaagggcgtgagcaccttcatggccgagatgctggagaccgccagcatcctgagaagcgccaccaaggacagcctgatcatcatcgacgagctgggcagaggcaccagcacctacgacggcttcggcctggcctgggccatcagcgagtacatcgccaccaagatcggcgccttctgcatgttcgccacccacttccacgagctgaccgccctggccaaccagatccccaccgtgaacaacctgcacgtgaccgccctgaccaccgaggagaccctgaccatgctgtaccaggtgaagaagggcgtgtgcgaccagagcttcggcatccacgtggccgagctggccaacttccccaagcacgtgatcgagtgcgccaagcagaaggccctggagctggaggagttccagtacatcggcgagagccagggctacgacatcatggagcccgccgccaagaagtgctacctggagagagagcagggcgagaagatcatccaggagttcctgagcaaggtgaagcagatgcccttcaccgagatgagcgaggagaacatcaccatcaagctgaagcagctgaaggccgaggtgatcgccaagaacaacagcttcgtgaacgagatcatcagcagaatcaaggtgaccacctag

SEQ ID NO: 92715 - DNA, 2163 bp, Artificial Sequence
  derived and/or modified sequence
atgatcgggatatggcacattcgcctgctgttggcaatcagcctgagcttgaagaccttttctctcgtcactatgatctgtcagcttccgctcgtcctctgggtgctcaagtgtccccagcttatggcgcgagatatgggcaaactgcgacaaattatacaacgcggcggaattctaattaccgagcgtaagaaagccgatttcagcacaaaagatatctaccaggacctgaatcgcttgctcaagggtaagaaaggggaacagatgaacagcgccgtgttaccagaaatggagaatcaggggagcgttgaggatacgacaggcagccaaagcctagccgcgctccttaacaagtgtaagaccccccagggccagaggctcgtcaatcagtggattaagcagcccctgatggataaaaacaggatcgaggagcgcttgaacctcgtggaggccttcgttgaagatgcagagcttagacagaccttacaagaagatcttttacggaggttccctgacctgaataggctcgcaaaaaagtttcagcggcaggccgctaatctacaggactgttacagattataccaagggatcaatcagttgccaaacgtcatccaagctctcgaaaagcacgaaggcaagcaccagaagttgctgctcgctgtctttgtgacacctttgaccgatctgcgcagtgatttttccaagtttcaagaaatgatagagactaccctggatatggatcaagtggagaaccacgaatttcttgttaaaccctctttcgacccaaacctgtctgagctgagggaaataatgaatgacctcgaaaaaaagatgcagagcacactgatttcagctgcacgggatctcgggcttgatcccggcaaacagataaagctggacagttctgctcagttcggctactacttcagagtaacctgtaaggaagagaaggtactgcggaataataaaaactttagcaccgttgacatacagaagaatggtgttaagttcactaactccaaactcacgagtctgaacgaggaatacactaaaaacaaaactgaatatgaggaggctcaggacgcaatagttaaagagattgtcaacattagttccggctacgtcgaaccgatgcagactcttaatgatgtgttggcccagttagacgctgttgtgtcttttgctcatgtgagtaacggcgctcccgttccctacgtgcgtcccgctatactggaaaaaggccagggaaggattattctaaaagctagccgccatgcctgcgtggaggttcaagacgaaatcgcatttatcccgaacgacgtctatttcgagaaggacaagcaaatgttccacattattactggccccaatatggggggaaagtccacatacattcgtcagactggagtgatcgtgttgatggcccagattgggtgcttcgtgccttgtgagtctgctgaggtgagtatagttgattgcatcttggcccgtgtcggcgccggcgattcccagctgaaaggcgtcagcacttttatggctgaaatgttggagacagcctccatcctgaggtcggccaccaaagattccttgatcatcattgacgagcttggacgcggaacctctacgtacgatggctttgggctcgcctgggccatctcagagtatatcgccaccaagattggcgccttctgtatgttcgccacacatttccatgaactcactgctctagcgaatcaaatcccgaccgtcaacaatttacatgtcactgcgttaacaactgaagagacattaaccatgctataccaagtcaaaaaaggggtatgtgaccagtcgttcggcatacatgtggctgaactggccaacttccccaaacatgtgatagaatgcgccaaacagaaagccctggagttggaggagttccagtatatcggcgagtctcaggggtacgacattatggaacctgcagccaaaaagtgttatttagaaagagagcagggagagaagatcatccaggaattccttagtaaggtaaagcagatgcccttcaccgaaatgagcgaggaaaatatcactattaagttaaagcagctgaaagccgaagtgattgccaaaaacaactcctttgtgaatgaaatcatcagcagaataaaagtgactacctag

SEQ ID NO: 92716 - DNA, 507 bp, Artificial Sequence
  derived and/or modified sequence
atggataagaacagaatcgaggagagactgaatctggtggaggcttttgtagaagatgctgagctacggcagactctgcaggaagacctgctgagaaggtttcctgacttaaatcgcctggctaaaaaatttcagaggcaagctgcgaatctgcaggattgttaccgactgtatcaaggcatcaaccaactgccaaatgtgatacaggccctggagaaacacgaaggaaagcatcaaaagctcctgctcgcagtattcgttacacctctgactgatttgcgaagcgactttagtaagtttcaggaaatgatcgagacaacgctggacatggatcaggtcgagaaccatgagttcttggtgaaaccttctttcgaccccaatctgagtgaacttagggaaattatgaatgatctagagaaaaagatgcaatcaacgctcatcagcgctgctcgcgacctgggcggatcgctccagcctagatccagcaggctcgcgtgcgcgacatag

SEQ ID NO: 92717 - DNA, 2607 bp, Artificial Sequence
  derived and/or modified sequence
atgggcccagccggcgccaagaacctccagtctgttgttttatctaaaatgaacttcgaatctttcgttaaggatcttttacttgttaggcagtatcgcgtcgaggtttacaaaaaccgggcagggaacaaggcgtcaaaggaaaatgattggtacctagcctataaggcgagcccaggcaacctctcacagtttgaggacatcctgtttggtaataatgacatgagcgcctcaatcggggtggtgggagtgaagatgtcagctgtggatggccagcgacaggtgggggtcggatacgttgactctatccagcgcaaactgggactgtgtgagttccctgataatgaccagttttctaacctggaagcgcttcttattcaaattggcccaaaagaatgcgttctccccggtggtgagaccgcgggcgatatggggaaactccgccaaatcattcagaggggaggcatcctgattacagagcgtaagaaagccgatttctctaccaaggacatataccaggacctaaacagattgttaaaggggaagaaaggggaacagatgaatagcgcggtgctgcccgagatggagaatcaggtcgccgtctcctccctgagcgccgttatcaaatttctggaactgctcagcgacgatagtaacttcggccagtttgagcttaccacttttgacttctcccagtacatgaaactcgatatcgctgcggttagagcactgaacttgttccaaggtagcgtcgaagacacaactggatcccagtctttggccgcccttctcaataaatgtaaaacacctcaggggcagaggctggtcaaccagtggatcaaacagccactgatggacaaaaatcgtattgaggagaggcttaatctcgtggaagcctttgtcgaagacgccgagctccgccagaccctccaagaggacctgctgcgcaggttccctgacctgaacagactggcaaaaaagtttcaaagacaggcggccaatttacaggattgctacaggttgtatcagggtatcaaccagctgcccaatgttatccaggctcttgaaaaacatgaaggaaaacaccagaagctgcttttagccgtgttcgtcacaccactgactgaccttcgctcagatttctctaaatttcaggagatgattgaaacaaccctcgacatggaccaggtcgaaaatcacgagttcctcgtgaaaccttcatttgaccccaacctctctgagctgagagagattatgaacgacttagagaaaaaaatgcaaagcaccctaatttccgcagccagagacttagggctcgaccccggcaaacagattaagctggattcttcagcccagttcgggtactacttcagagtgacgtgcaaagaagagaaggtcttgcgaaacaacaaaaatttcagcaccgttgacatacagaaaaatggtgtgaaattcaccaactcgaagttgacatctctaaatgaggaatataccaaaaacaaaactgaatacgaagaggcccaggacgcgattgtgaaggaaatagtcaacattagctccggctacgttgagcctatgcagaccctcaacgacgtcctagcgcagctggatgccgtcgtctccttcgcccacgtgtccaacggcgccccagtaccttatgtgcgaccagctatcctggagaaaggccaggggcgcatcatcctcaaggcttcaagacacgcctgcgtagaagttcaagacgaaattgcctttattccgaacgatgtatatttcgagaaggataagcagatgttccacattataactgggccaaatatggggggaaagtccacctatatccgtcagactggagtcatcgtgttgatggcccagattggatgttttgtgccgtgtgagagcgccgaagtctcgatcgttgattgcatcctggccagagtcggtgctggcgactcgcaactgaagggggtgtctacattcatggctgaaatgctagagacagccagtatactcagatctgccacgaaggacagcctcattataattgacgagcttggtcgtggaacgtcaacttatgatggctttggactggcctgggctatttccgaatatatagccaccaagattggggccttctgcatgtttgcaactcatttccacgagctaacggcccttgcaaatcaaattccaacagtcaacaatttacacgtgaccgcactcactacagaggaaacactgactatgctgtaccaagtgaagaagggcgtgtgcgaccagagcttcggtattcatgtcgcagaattagccaactttcccaaacacgtcattgagtgtgctaagcagaaggcactcgaattagaagagttccaatacattggtgagagccagggctacgatataatggagcccgcagccaaaaaatgttatctcgagcgcgaacagggtgaaaaaatcatccaggaatttctgtctaaagttaagcaaatgcccttcacagaaatgagtgaggagaacatcacaataaaactgaagcagcttaaggccgaggtgatcgccaagaataattcgtttgtgaacgagattatctctcgaataaaggtaactacctag

SEQ ID NO: 92718 - DNA, 2163 bp, Artificial Sequence
  derived and/or modified sequence
atgattggcatctggcacatccggctgctgctggccatcagcctgagcctgaagaccttcagcctggtgaccatgatctgccagctgcccctggtgctgtgggtgctgaagtgcccccagctgatggcccgggacatgggcaagctgcggcagatcatccagaggggcggcatcctgatcacagagaggaagaaggctgacttcagcaccaaggacatctaccaggacctgaaccggctgctgaagggcaagaagggggagcagatgaacagcgctgtgctgcctgagatggagaaccagggctctgtggaggacaccaccggcagccagagcctggccgccctgctgaacaagtgcaagaccccccagggccagaggctggtgaaccagtggatcaagcagcccctgatggacaagaaccgcatcgaggagcggctgaacctggtggaggcctttgtggaggatgctgagctgcggcagaccctgcaggaggacctgctgcggcgcttcccagacctgaaccggctggccaagaagttccagaggcaggccgccaacctgcaggactgctaccgcctgtaccagggcatcaaccagctgcccaacgtcatccaggccctggagaagcatgagggcaagcaccagaagctgctgctggccgtgtttgtgacccccctgacagacctgcggagtgacttcagcaagttccaggagatgattgagaccaccctggacatggaccaggtggagaaccacgagttcctggtgaagcccagctttgaccccaacctgtctgagctgcgggagatcatgaatgacctggagaagaagatgcagagcaccctcatctctgctgcccgggacctgggcctggaccccgggaagcagatcaagctggacagcagcgcccagtttggctactacttccgggtgacctgcaaggaggagaaggtgctgaggaacaacaagaacttcagcacagtggacatccagaagaatggagtgaagttcaccaacagcaagctgaccagcctgaatgaggagtacaccaagaacaagacagaatatgaggaggcccaggatgccatcgtgaaggagatcgtgaacatcagcagcggctacgtggagcccatgcagaccctgaatgatgtgctggcccagctggatgctgtggtgtcctttgcccacgtgtccaatggagcccctgtgccctacgtgcggcctgccatcctggagaagggccagggccgcatcatcctgaaggccagcagacatgcctgtgtggaggtgcaggatgagatcgccttcatccccaatgatgtgtactttgagaaggacaagcagatgttccacatcatcaccggccccaacatgggcggcaagagcacctacatccggcagacaggagtgattgtgctgatggcccagatcggctgctttgtgccctgtgagagcgctgaggtgtccatcgtggactgcatcctggcccgggtgggcgctggggacagccagctgaagggcgtgtccaccttcatggccgagatgctggagacagccagcatcctgcggagcgccaccaaggacagcctcatcatcattgatgagctgggccggggcaccagcacctatgatggcttcggcctggcctgggccatcagcgagtacatcgccaccaagatcggggccttctgcatgtttgccacccacttccacgagctgacagccctggccaaccagatccccaccgtgaacaacctgcacgtgacagccctgaccacagaggagaccctgaccatgctgtaccaggtgaagaagggcgtgtgtgaccagagctttggcatccacgtggccgagctggccaacttccccaagcacgtgattgaatgtgccaagcagaaggccctggagctggaggagttccagtacatcggggagagccagggctatgacatcatggagcctgctgccaagaagtgctacctggagcgggagcagggcgagaagatcatccaggagttcctgagcaaggtgaagcagatgcccttcacagagatgtctgaggagaacatcaccatcaagctgaagcagctgaaggccgaggtgattgccaagaacaacagctttgtgaatgagatcatcagccgcatcaaggtgaccacctag

SEQ ID NO: 92719 - DNA, 507 bp, Artificial Sequence
  derived and/or modified sequence
atggacaagaaccgcatcgaggagcggctgaacctggtggaggcctttgtggaggatgctgagctgcggcagaccctgcaggaggacctgctgcggcgcttcccagacctgaaccggctggccaagaagttccagaggcaggccgccaacctgcaggactgctaccgcctgtaccagggcatcaaccagctgcccaacgtcatccaggccctggagaagcatgagggcaagcaccagaagctgctgctggccgtgtttgtgacccccctgacagacctgcggagtgacttcagcaagttccaggagatgattgagaccaccctggacatggaccaggtggagaaccacgagttcctggtgaagcccagctttgaccccaacctgtctgagctgcgggagatcatgaatgacctggagaagaagatgcagagcaccctcatctctgctgcccgggacctgggcggcagcctgcagcccaggagcagccggctggcctgtgccacctag

SEQ ID NO: 92720 - DNA, 2607 bp, Artificial Sequence
  derived and/or modified sequence
atgggccctgctggggccaagaacctgcagagcgtggtgctgagcaagatgaactttgagagctttgtgaaggacctgctgctggtgcggcagtacagagtggaggtgtacaagaacagagctggcaacaaggccagcaaagaaaatgactggtacctggcctacaaggccagccctggcaacctgagccagtttgaggacatcctgtttggaaataatgacatgtctgccagcattggagtggtgggcgtgaagatgtctgctgtggatggccagaggcaggtgggcgtgggctacgtggacagcatccagaggaagctgggcctgtgtgagttcccagacaatgaccagttcagcaacctggaggccctgctgatccagatcggccccaaggaatgtgtgctgcccggcggggagacagctggggacatgggcaagctgcggcagatcatccagaggggcggcatcctgatcacagagaggaagaaggctgacttcagcaccaaggacatctaccaggacctgaaccggctgctgaagggcaagaagggggagcagatgaacagcgctgtgctgcctgagatggagaaccaggtggccgtgagcagcctgtctgctgtgatcaagttcctggagctgctgagtgatgacagcaactttggccagtttgagctgaccacctttgacttcagccagtacatgaagctggacattgctgctgtgcgggccctgaacctcttccagggctctgtggaggacaccaccggcagccagagcctggccgccctgctgaacaagtgcaagaccccccagggccagaggctggtgaaccagtggatcaagcagcccctgatggacaagaaccgcatcgaggagcggctgaacctggtggaggcctttgtggaggatgctgagctgcggcagaccctgcaggaggacctgctgcggcgcttcccagacctgaaccggctggccaagaagttccagaggcaggccgccaacctgcaggactgctaccgcctgtaccagggcatcaaccagctgcccaacgtcatccaggccctggagaagcatgagggcaagcaccagaagctgctgctggccgtgtttgtgacccccctgacagacctgcggagtgacttcagcaagttccaggagatgattgagaccaccctggacatggaccaggtggagaaccacgagttcctggtgaagcccagctttgaccccaacctgtctgagctgcgggagatcatgaatgacctggagaagaagatgcagagcaccctcatctctgctgcccgggacctgggcctggaccccgggaagcagatcaagctggacagcagcgcccagtttggctactacttccgggtgacctgcaaggaggagaaggtgctgaggaacaacaagaacttcagcacagtggacatccagaagaatggagtgaagttcaccaacagcaagctgaccagcctgaatgaggagtacaccaagaacaagacagaatatgaggaggcccaggatgccatcgtgaaggagatcgtgaacatcagcagcggctacgtggagcccatgcagaccctgaatgatgtgctggcccagctggatgctgtggtgtcctttgcccacgtgtccaatggagcccctgtgccctacgtgcggcctgccatcctggagaagggccagggccgcatcatcctgaaggccagcagacatgcctgtgtggaggtgcaggatgagatcgccttcatccccaatgatgtgtactttgagaaggacaagcagatgttccacatcatcaccggccccaacatgggcggcaagagcacctacatccggcagacaggagtgattgtgctgatggcccagatcggctgctttgtgccctgtgagagcgctgaggtgtccatcgtggactgcatcctggcccgggtgggcgctggggacagccagctgaagggcgtgtccaccttcatggccgagatgctggagacagccagcatcctgcggagcgccaccaaggacagcctcatcatcattgatgagctgggccggggcaccagcacctatgatggcttcggcctggcctgggccatcagcgagtacatcgccaccaagatcggggccttctgcatgtttgccacccacttccacgagctgacagccctggccaaccagatccccaccgtgaacaacctgcacgtgacagccctgaccacagaggagaccctgaccatgctgtaccaggtgaagaagggcgtgtgtgaccagagctttggcatccacgtggccgagctggccaacttccccaagcacgtgattgaatgtgccaagcagaaggccctggagctggaggagttccagtacatcggggagagccagggctatgacatcatggagcctgctgccaagaagtgctacctggagcgggagcagggcgagaagatcatccaggagttcctgagcaaggtgaagcagatgcccttcacagagatgtctgaggagaacatcaccatcaagctgaagcagctgaaggccgaggtgattgccaagaacaacagctttgtgaatgagatcatcagccgcatcaaggtgaccacctag

SEQ ID NO: 92721 - DNA, 2163 bp, Artificial Sequence
  derived and/or modified sequence
atgatcggcatctggcacatccggctgctgctggccatcagcctgtctttaaaaacttttagcctcgtgacgatgatatgccagttacctcttgtcttgtgggttcttaagtgccctcaactaatggcaagagacatgggtaagcttaggcagattatacagcggggcggtattcttattactgagagaaagaaagcagatttcagtacaaaggacatatatcaggatttgaataggctcttgaaggggaagaagggcgagcaaatgaactcagcagtactgcctgagatggagaatcaggggtctgttgaagacaccaccggtagtcaatcgttggcggcactcctgaacaagtgcaaaaccccacagggccagagactcgttaaccagtggatcaaacagccactgatggataagaatcggattgaggagcgattaaacctagtggaggccttcgtcgaggacgccgaacttaggcagacactgcaagaggaccttcttaggaggttccccgatctgaaccgccttgctaaaaaatttcagcgacaagcagccaaccttcaggattgctataggctctaccaggggattaaccaactcccgaacgtgatacaggccctggaaaaacatgaaggaaagcatcagaaactcttgctggccgtcttcgtgactcctctcactgacctgcgcagcgacttttcgaaattccaggaaatgatagagaccaccctagatatggatcaagtggaaaatcacgagtttctggttaagcccagcttcgatcccaatttgtccgagttgagagaaattatgaatgatctcgagaaaaaaatgcagagcaccctaatctccgccgcccgggatctagggctcgacccgggaaagcagatcaaattagatagtagtgctcagttcggttactatttcagagtgacctgtaaggaagaaaaggtgctgcgaaacaataaaaattttagcacggtggatatccaaaaaaatggggtaaagtttactaatagcaagctgaccagcctgaatgaagaatacactaagaacaagacagagtacgaggaggctcaggacgctatcgtgaaagagattgtgaacatctccagcggctacgtcgaacccatgcagaccctaaatgacgtgttggcacagctggacgcggttgtgagtttcgcacacgttagtaacggtgcaccagtcccatacgtgcgtcctgcaatactggagaagggacagggcaggattattctcaaggcctctcgccacgcgtgcgtcgaagtccaggatgagatcgcctttattccaaatgatgtgtacttcgagaaagataaacagatgtttcatattatcacgggaccaaacatgggagggaagtctacttacatccgtcagacaggggtgatagtgcttatggcacagatcggttgttttgtgccttgcgaatccgccgaagtttctattgtagactgcatcttagctcgcgttggggctggggactctcagcttaagggtgtgtctactttcatggctgagatgctggagacggcatcaatcctgcggtccgccactaaggattccctgattattatagacgagcttggaagaggaacttctacttatgacggatttggtctggcttgggctattagcgagtatatcgccacaaaaataggagctttctgtatgtttgcaacccactttcacgagttgaccgccctcgcgaaccagattcccacggtgaataatctgcacgtcaccgccttaacaacagaggagacactcaccatgctgtatcaggtgaagaagggggtttgcgatcagtcatttggaatccacgtggcagagcttgccaactttcccaagcacgtgatcgagtgcgccaaacaaaaagccctggagcttgaggagttccagtatatcggtgagagtcaaggatacgatatcatggagcccgctgctaagaaatgttatctggaacgagaacagggagagaagattatacaggaatttttgtcaaaagttaaacagatgccgttcactgagatgagtgaagaaaacataactatcaagttaaaacagttgaaagccgaagtgattgctaagaataattctttcgtgaacgagattattagtcggatcaaagtgacaacttag

SEQ ID NO: 92722 - DNA, 507 bp, Artificial Sequence
  derived and/or modified sequence
atggacaagaaccggatcgaggagcggctgaacctggtggaggccttcgttgaggatgctgagctcaggcagactctccaggaggaccttcttcgcagattccccgatctgaaccggctagccaagaagtttcagcgtcaggcagctaacttgcaggactgttaccggctgtaccagggcattaaccagctgcctaacgtgattcaagccttagagaagcacgagggtaagcatcaaaaactcctattggctgttttcgtgactccactgaccgatctccgttccgattttagtaagttccaggagatgatcgagaccaccctcgacatggaccaggtggagaaccacgagtttctcgtcaagccctcctttgaccctaacctgtctgagttaagagagatcatgaacgacctcgaaaagaagatgcagagcactttgatttctgccgcaagggatctggggggatctctgcagcctagaagctctaggcttgcctgcgcaacctag

SEQ ID NO: 92723 - DNA, 2607 bp, Artificial Sequence
  derived and/or modified sequence
atgggccccgccggcgccaagaacctgcagagcgtggtgctgagcaaaatgaatttcgaatccttcgtgaaggacctgcttctagtgcgccagtatcgcgtcgaggtgtacaagaatagagccggcaacaaggcctcaaaggaaaacgactggtaccttgcgtacaaagcctctcccggcaatttgtcacagttcgaagacatcctgttcggcaataacgacatgtccgcatctataggagtggtgggggtgaagatgtcagcagtagacggtcagcgtcaggtcggcgtggggtatgtggattctattcagcgaaagttagggctgtgcgaatttcccgataacgatcagttttctaacctagaagctctgctgatccagattggaccaaaagaatgtgtgctgccaggaggcgaaacagctggggatatgggtaagcttagacagataatacagaggggtgggatcctgatcacggagcgtaagaaagccgacttttccactaaggatatctaccaggacctgaatcgcctgcttaaggggaaaaagggagagcaaatgaatagtgcggtattgccggagatggagaaccaggtggccgtctctagtttgtctgcagtcattaagttcctggagctgctgtccgatgactccaacttcgggcagtttgaactgacgactttcgacttctcgcaatacatgaagctcgatatcgctgccgttagggcattgaacctatttcagggctctgtggaggacactactggcagtcagagcctcgcggccttattgaataaatgcaaaaccccccagggacagcggctggtcaaccagtggatcaagcagccattaatggataagaatcggatagaggaacggctgaacctggtggaggcattcgtggaggacgccgaactgcgtcagaccttgcaggaggatcttctaaggcgattccctgatttgaaccggctcgcaaagaagtttcagcggcaggccgcaaaccttcaagactgctataggctttatcaagggattaatcaactgcccaatgtgattcaagcccttgaaaagcacgaaggcaagcatcagaagctgctcctggccgtctttgtgactccactcacagacctcagaagcgacttcagcaagtttcaggaaatgatcgagacaaccttggacatggatcaagtcgaaaaccatgaattcctggtcaagccctctttcgacccaaacctgtctgagctgcgcgagattatgaatgatctggaaaagaagatgcagagtacattgataagtgcagcccgcgacttggggcttgatcctgggaaacagataaagctagattcgagcgcacagtttggatattatttccgtgtcacgtgcaaggaagaaaaagttctgagaaacaacaaaaacttctccaccgtggacatccagaaaaacggggtgaaattcactaactcgaagttgacctccctgaacgaagagtatacaaagaacaagaccgagtacgaggaagcccaggatgccatagttaaagaaatcgtaaacatcagttctggatatgtagagccgatgcagaccctgaacgatgtactggcccagctcgatgccgtagtatcctttgcccacgtgagcaacggggcacctgtgccatatgtgagaccagctatcctggagaagggacagggaagaatcattctcaaagctagccgccacgcctgcgtggaggtccaggacgaaattgcgtttattccaaacgacgtgtactttgagaaagacaagcagatgttccacatcattaccgggcctaatatgggaggcaagtcaacctatattagacagacaggcgtgatcgtgttgatggctcagattggctgcttcgtcccatgcgaaagcgctgaggtgtcgattgtagattgtatcctggcaagagtgggggcaggcgactcccagttgaaaggggtgtccacctttatggcagagatgttggagacagcaagcatcctgcgttctgccactaaggacagtctcattattattgacgaactgggccggggaacatccacctacgacggttttggtttggcctgggcaataagcgagtacattgccacgaaaattggcgctttttgcatgtttgccacacattttcacgagctaactgcacttgcaaaccagattccaaccgtgaacaacctccacgtcacagctttgaccacagaggaaactctgaccatgctgtatcaggtgaagaagggggtgtgtgatcagagcttcgggattcacgtggcagagctggcaaattttccaaaacacgtgatcgagtgtgccaagcagaaggctctggaacttgaagaatttcagtacattggcgaatcacaggggtacgatatcatggaacctgccgctaagaagtgttacctggagagggaacagggcgagaaaattatacaggagttcctgtccaaggtaaaacagatgccttttaccgagatgtcggaggaaaatattaccataaagttgaaacagctcaaggccgaggtaattgccaaaaacaattcttttgtgaacgagatcatttctaggatcaaagtcacgacgtag

SEQ ID NO: 92724 - DNA, 2917 bp, Artificial Sequence
  derived and/or modified sequence
tcgcgcattttcttcaaccaggaggtgaggaggtttcgacatggcggtgcagccgaaggagacgctgcagttggagagcgcggccgaggtcggcttcgtgcgcttctttcagggcatgccggagaagccgaccaccacagtgcgccttttcgaccggggcgacttctatacggcgcacggcgaggacgcgctgctggccgcccgggaggtgttcaagacccagggggtgatcaagtacatggggccggcaggagcaaagaatctgcagagtgttgtgcttagtaaaatgaattttgaatcttttgtaaaagatcttcttctggttcgtcagtatagagttgaagtttataagaatagagctggaaataaggcatccaaggagaatgattggtatttggcatataaggcttctcctggcaatctctctcagtttgaagacattctctttggtaacaatgatatgtcagcttccattggtgttgtgggtgttaaaatgtccgcagttgatggccagagacaggttggagttgggtatgtggattccatacagaggaaactaggactgtgtgaattccctgataatgatcagttctccaatcttgaggctctcctcatccagattggaccaaaggaatgtgttttacccggaggagagactgctggagacatggggaaactgagacagataattcaaagaggaggaattctgatcacagaaagaaaaaaagctgacttttccacaaaagacatttatcaggacctcaaccggttgttgaaaggcaaaaagggagagcagatgaatagtgctgtattgccagaaatggagaatcaggttgcagtttcatcactgtctgcggtaatcaagtttttagaactcttatcagatgattccaactttggacagtttgaactgactacttttgacttcagccagtatatgaaattggatattgcagcagtcagagcccttaacctttttcagggttctgttgaagataccactggctctcagtctctggctgccttgctgaataagtgtaaaacccctcaaggacaaacttgttaaccagtggattaagcagcctctcatggataagaacagaatagaggagagattgaatttagtggaagcttttgtagaagatgcagaattgaggcagactttacaagaagatttacttcgtcgattcccagatcttaaccgacttgccaagaagtttcaaagacaagcagcaaacttacaagattgttaccgactctatcagggtataaatcaactacctaatgttatacaggctctggaaaaacatgaaggaaaacaccagaaattattgttggcagtttttgtgactcctcttactgatcttcgttctgacttctccaagtttcaggaaatgatagaaacaactttagatatggatcaggtggaaaaccatgaattccttgtaaaaccttcatttgatcctaatctcagtgaattaagagaaataatgaatgacttggaaaagaagatgcagtcaacattaataagtgcagccagagatcttggcttggaccctggcaaacagattaaactggattccagtgcacagtttggatattactttcgtgtaacctgtaaggaagaaaaagtccttcgtaacaataaaaactttagtactgtagatatccagaagaatggtgttaaatttaccaacagcaaattgacttctttaaatgaagagtataccaaaaataaaacagaatatgaagaagcccaggatgccattgttaaagaaattgtcaatatttcttcaggctatgtagaaccaatgcagacactcaatgatgtgttagctcagctagatgctgttgtcagctttgctcacgtgtcaaatggagcacctgttccatatgtacgaccagccattttggagaaaggacaaggaagaattatattaaaagcatccaggcatgcttgtgttgaagttcaagatgaaattgcatttattcctaatgacgtatactttgaaaaagataaacagatgttccacatcattactggccccaatatgggaggtaaatcaacatatattcgacaaactggggtgatagtactcatggcccaaattgggtgttttgtgccatgtgagtcagcagaagtgtccattgtggactgcatcttagcccgagtaggggctggtgacagtcaattgaaaggagtctccacgttcatggctgaaatgttggaaactgcttctatcctcaggtctgcaaccaaagattcattaataatcatagatgaattgggaagaggaacttctacctacgatggatttgggttagcatgggctatatcagaatacattgcaacaaagattggtgctttttgcatgtttgcaacccattttcatgaacttactgccttggccaatcagataccaactgttaataatctacatgtcacagcactcaccactgaagagaccttaactatgctttatcaggtgaagaaaggtgtctgtgatcaaagttttgggattcatgttgcagagcttgctaatttccctaagcatgtaatagagtgtgctaaacagaaagccctggaacttgaggagtttcagtatattggagaatcgcaaggatatgatatcatggaaccagcagcaaagaagtgctatctggaaagagagcaaggtgaaaaaattattcaggagttcctgtccaaggtgaaacaaatgccctttactgaaatgtcagaagaaaacatcacaataaagttaaaacagctaaaagctgaagtaatagcaaagaataatagctttgtaaatgaaatcatttcacgaataaaagttactacgtgaaaaatcccagtaatggaatgaaggtaatattgataagctattgtctgtaatagttttatattgttttatattaa

SEQ ID NO: 92725 - DNA, 2537 bp, Artificial Sequence
  derived and/or modified sequence
gtaaaatgaattttgaatcttttgtaaaagatcttcttctggttcgtcagtatagagttgaagtttataagaatagagctggaaataaggcatccaaggagaatgattggtatttggcatataaggcttctcctggcaatctctctcagtttgaagacattctctttggtaacaatgatatgtcagcttccattggtgttgtgggtgttaaaatgtccgcagttgatggccagagacatggggaaactgagacagataattcaaagaggaggaattctgatcacagaaagaaaaaaagctgacttttccacaaaagacatttatcaggacctcaaccggttgttgaaaggcaaaaagggagagcagatgaatagtgctgtattgccagaaatggagaatcagggttctgttgaagataccactggctctcagtctctggctgccttgctgaataagtgtaaaacccctcaaggacaaagacttgttaaccagtggattaagcagcctctcatggataagaacagaatagaggagagattgaatttagtggaagcttttgtagaagatgcagaattgaggcagactttacaagaagatttacttcgtcgattcccagatcttaaccgacttgccaagaagtttcaaagacaagcagcaaacttacaagattgttaccgactctatcagggtataaatcaactacctaatgttatacaggctctggaaaaacatgaaggaaaacaccagaaattattgttggcagtttttgtgactcctcttactgatcttcgttctgacttctccaagtttcaggaaatgatagaaacaactttagatatggatcaggtggaaaaccatgaattccttgtaaaaccttcatttgatcctaatctcagtgaattaagagaaataatgaatgacttggaaaagaagatgcagtcaacattaataagtgcagccagagatcttggcttggaccctggcaaacagattaaactggattccagtgcacagtttggatattactttcgtgtaacctgtaaggaagaaaaagtccttcgtaacaataaaaactttagtactgtagatatccagaagaatggtgttaaatttaccaacagcaaattgacttctttaaatgaagagtataccaaaaataaaacagaatatgaagaagcccaggatgccattgttaaagaaattgtcaatatttcttcaggctatgtagaaccaatgcagacactcaatgatgtgttagctcagctagatgctgttgtcagctttgctcacgtgtcaaatggagcacctgttccatatgtacgaccagccattttggagaaaggacaaggaagaattatattaaaagcatccaggcatgcttgtgttgaagttcaagatgaaattgcatttattcctaatgacgtatactttgaaaaagataaacagatgttccacatcattactggccccaatatgggaggtaaatcaacatatattcgacaaactggggtgatagtactcatggcccaaattgggtgttttgtgccatgtgagtcagcagaagtgtccattgtggactgcatcttagcccgagtaggggctggtgacagtcaattgaaaggagtctccacgttcatggctgaaatgttggaaactgcttctatcctcaggtctgcaaccaaagattcattaataatcatagatgaattgggaagaggaacttctacctacgatggatttgggttagcatgggctatatcagaatacattgcaacaaagattggtgctttttgcatgtttgcaacccattttcatgaacttactgccttggccaatcagataccaactgttaataatctacatgtcacagcactcaccactgaagagaccttaactatgctttatcaggtgaagaaaggtgtctgtgatcaaagttttgggattcatgttgcagagcttgctaatttccctaagcatgtaatagagtgtgctaaacagaaagccctggaacttgaggagtttcagtatattggagaatcgcaaggatatgatatcatggaaccagcagcaaagaagtgctatctggaaagagagcaaggtgaaaaaattattcaggagttcctgtccaaggtgaaacaaatgccctttactgaaatgtcagaagaaaacatcacaataaagttaaaacagctaaaagctgaagtaatagcaaagaataatagctttgtaaatgaaatcatttcacgaataaaagttactacgtgaaaaatcccagtaatggaatgaaggtaatattgataagctattgtctgtaatagttttatattgttttatattaaccctttttccatagtgttaactgtcagtgcccatgggctatcaacttaataagatatttagtaatattttactttgaggacattttcaaagatttttattttgaaaaatgagagctgtaactgaggactgtttgcaattgacataggcaataataagtgatgtgctgaattttataaataaaatcatgtagtttgtgg

SEQ ID NO: 92726 - DNA, 1184 bp, Artificial Sequence
  derived and/or modified sequence
gaggtttcgacatggcggtgcagccgaaggagacgctgcagttggagagcgcggccgaggtcggcttcgtgcgcttctttcagggcatgccggagaagccgaccaccacagtgcgccttttcgaccggggcgacttctatacggcgcacggcgaggacgcgctgctggccgcccgggaggtgttcaagacccagggggtgatcaagtacatggggccggcaggagcaaagaatctgcagagtgttgtgcttagtaaaatgaattttgaatcttttgtaaaagatcttcttctggttcgtcagtatagagttgaagtttataagaatagagctggaaataaggcatccaaggagaatgattggtatttggcatataaggcttctcctggcaatctctctcagtttgaagacattctctttggtaacaatgatatgtcagcttccattggtgttgtgggtgttaaaatgtccgcagttgatggccagagacaggttggagttgggtatgtggattccatacagtatatgaaattggatattgcagcagtcagagcccttaacctttttcagggttctgttgaagataccactggctctcagtctctggctgccttgctgaataagtgtaaaacccctcaaggacaaagacttgttaaccagtggattaagcagcctctcatggataagaacagaatagaggagagattgaatttagtggaagcttttgtagaagatgcagaattgaggcagactttacaagaagatttacttcgtcgattcccagatcttaaccgacttgccaagaagtttcaaagacaagcagcaaacttacaagattgttaccgactctatcagggtataaatcaactacctaatgttatacaggctctggaaaaacatgaaggaaaacaccagaaattattgttggcagtttttgtgactcctcttactgatcttcgttctgacttctccaagtttcaggaaatgatagaaacaactttagatatggatcaggtggaaaaccatgaattccttgtaaaaccttcatttgatcctaatctcagtgaattaagagaaataatgaatgacttggaaaagaagatgcagtcaacattaataagtgcagccagagatcttggaggatcacttcagcccaggagttcaagactagcctgtgccacatag

SEQ ID NO: 92727 - DNA, 2918 bp, Artificial Sequence
  derived and/or modified sequence
tcgcgcattttcttcaaccaggaggtgaggaggtttcgacatggcggtgcagccgaaggagacgctgcagttggagagcgcggccgaggtcggcttcgtgcgcttctttcagggcatgccggagaagccgaccaccacagtgcgccttttcgaccggggcgacttctatacggcgcacggcgaggacgcgctgctggccgcccgggaggtgttcaagacccagggggtgatcaagtacatggggccggcaggagcaaagaatctgcagagtgttgtgcttagtaaaatgaattttgaatcttttgtaaaagatcttcttctggttcgtcagtatagagttgaagtttataagaatagagctggaaataaggcatccaaggagaatgattggtatttggcatataaggcttctcctggcaatctctctcagtttgaagacattctctttggtaacaatgatatgtcagcttccattggtgttgtgggtgttaaaatgtccgcagttgatggccagagacaggttggagttgggtatgtggattccatacagaggaaactaggactgtgtgaattccctgataatgatcagttctccaatcttgaggctctcctcatccagattggaccaaaggaatgtgttttacccggaggagagactgctggagacatggggaaactgagacagataattcaaagaggaggaattctgatcacagaaagaaaaaaagctgacttttccacaaaagacatttatcaggacctcaaccggttgttgaaaggcaaaaagggagagcagatgaatagtgctgtattgccagaaatggagaatcaggttgcagtttcatcactgtctgcggtaatcaagtttttagaactcttatcagatgattccaactttggacagtttgaactgactacttttgacttcagccagtatatgaaattggatattgcagcagtcagagcccttaacctttttcagggttctgttgaagataccactggctctcagtctctggctgccttgctgaataagtgtaaaacccctcaaggacaaagacttgttaaccagtggattaagcagcctctcatggataagaacagaatagaggagagattgaatttagtggaagcttttgtagaagatgcagaattgaggcagactttacaagaagattacttcgtcgattcccagatcttaaccgacttgccaagaagtttcaaagacaagcagcaaacttacaagattgttaccgactctatcagggtataaatcaactacctaatgttatacaggctctggaaaaacatgaaggaaaacaccagaaattattgttggcagtttttgtgactcctcttactgatcttcgttctgacttctccaagtttcaggaaatgatagaaacaactttagatatggatcaggtggaaaaccatgaattccttgtaaaaccttcatttgatcctaatctcagtgaattaagagaaataatgaatgacttggaaaagaagatgcagtcaacattaataagtgcagccagagatcttggcttggaccctggcaaacagattaaactggattccagtgcacagtttggatattactttcgtgtaacctgtaaggaagaaaaagtccttcgtaacaataaaaactttagtactgtagatatccagaagaatggtgttaaatttaccaacagcaaattgacttctttaaatgaagagtataccaaaaataaaacagaatatgaagaagcccaggatgccattgttaaagaaattgtcaatatttcttcaggctatgtagaaccaatgcagacactcaatgatgtgttagctcagctagatgctgttgtcagctttgctcacgtgtcaaatggagcacctgttccatatgtacgaccagccattttggagaaaggacaaggaagaattatattaaaagcatccaggcatgcttgtgttgaagttcaagatgaaattgcatttattcctaatgacgtatactttgaaaaagataaacagatgttccacatcattactggccccaatatgggaggtaaatcaacatatattcgacaaactggggtgatagtactcatggcccaaattgggtgttttgtgccatgtgagtcagcagaagtgtccattgtggactgcatcttagcccgagtaggggctggtgacagtcaattgaaaggagtctccacgttcatggctgaaatgttggaaactgcttctatcctcaggtctgcaaccaaagattcattaataatcatagatgaattgggaagaggaacttctacctacgatggatttgggttagcatgggctatatcagaatacattgcaacaaagattggtgctttttgcatgtttgcaacccattttcatgaacttactgccttggccaatcagataccaactgttaataatctacatgtcacagcactcaccactgaagagaccttaactatgctttatcaggtgaagaaaggtgtctgtgatcaaagttttgggattcatgttgcagagcttgctaatttccctaagcatgtaatagagtgtgctaaacagaaagccctggaacttgaggagtttcagtatattggagaatcgcaaggatatgatatcatggaaccagcagcaaagaagtgctatctggaaagagagcaaggtgaaaaaattattcaggagttcctgtccaaggtgaaacaaatgccctttactgaaatgtcagaagaaaacatcacaataaagttaaaacagctaaaagctgaagtaatagcaaagaataatagctttgtaaatgaaatcatttcacgaataaaagttactacgtgaaaaatcccagtaatggaatgaaggtaatattgataagctattgtctgtaatagttttatattgttttatattaa

SEQ ID NO: 92728 - DNA, 2163 bp, Artificial Sequence
  derived and/or modified sequence
atgattggaatttggcacatcagattgctcctggctatatctctgagcctcaagaccttcagtcttgtcaccatgatctgccagttaccgttggttctgtgggtgttgaagtgcccgcagttaatggcaagggatatgggcaagttaagacaaataatacaacggggaggtattctaataacagagcgtaaaaaagccgatttctctacaaaagacatctaccaggacctcaatcgattactgaagggcaagaaaggcgaacagatgaattccgccgtgctcccggagatggaaaaccagggcagtgtggaggacactaccggcagccagagtttggctgcccttttaaataagtgtaagacaccccaaggacagcgcctcgtcaaccagtggatcaaacagcctctgatggataaaaaccggatcgaggagagactgaacctcgtagaggcttttgtggaagatgccgagctcaggcagacactgcaagaagatctcctgcgcaggtttcctgatttgaaccggctcgccaagaaatttcagagacaagcagccaacctccaggactgttataggctatatcagggcattaatcagctgcctaatgtaatccaagctcttgaaaagcatgaggggaagcaccagaaactgctcctggccgtattcgttactccgctcactgatttacgaagcgatttttctaaatttcaggagatgattgagactactctggatatggaccaagttgaaaaccacgaattcctggttaaacccagcttcgaccctaacctgtcagagctccgggaaattatgaatgaccttgaaaagaaaatgcagtctaccttaatcagcgctgctagagatctcggcctggaccccggaaagcagataaagctggactcctccgctcagttcggatactactttagggtcacatgcaaagaggagaaagtgctgcggaacaataagaatttctcaaccgtggacatccagaagaatggagtcaagtttaccaatagtaaactcacaagcctgaacgaggaatacactaagaataagactgaatatgaagaggcccaggatgcaatcgtgaaggaaattgttaacattagctcaggatatgttgaaccaatgcagaccctgaatgacgtcctcgcgcaactagatgcggttgtctctttcgcacacgtgagcaatggggcacctgtgccatatgtccgtccagctattctggagaaggggcagggacgcataatcctgaaggcatcaagacacgcttgcgtggaggtgcaggacgagatcgctttcattccgaacgacgtctactttgagaaggacaagcagatgttccacataatcacaggccctaatatggggggaaaatccacatatatccgacaaacaggtgtgatcgttctcatggctcaaataggatgttttgttccatgcgaatccgcagaagtctccatcgtggattgcatacttgcacgagtgggagccggtgactctcagctgaaaggagtgtctacatttatggccgaaatgttggagaccgcatctatcctgcgttccgccacaaaagactccctaattattatcgacgagcttggaaggggtacctccacatacgacggcttcgggctggcttgggctatatcagagtatatcgccacaaaaatcggcgctttctgtatgttcgccacacactttcatgagctgactgctctcgctaatcagattcccacagtcaacaatttacacgtcaccgcactgaccacagaggaaaccctcacaatgctctatcaggttaagaaaggtgtctgcgaccaatcattcggaatccacgtggccgagctcgctaactttccaaaacacgtgatagaatgcgcaaaacagaaggcactggagctggaagaatttcagtacatcggagagtcacaaggttacgatattatggagcccgcagctaagaagtgttatcttgaacgcgaacagggggagaaaattattcaagaatttctttccaaggtgaaacagatgccatttaccgaaatgagtgaagagaacattactatcaagctgaagcagctgaaagcggaagtgattgcaaagaataattctttcgtcaatgagataatttctagaattaaagtgaccacctag

SEQ ID NO: 92729 - DNA, 507 bp, Artificial Sequence
  derived and/or modified sequence
atggacaagaatcgtattgaagaacgcctgaacctcgttgaggctttcgttgaagacgctgagctgcgccagactctccaggaagacctgctgcgcagatttcccgacctaaatcgactcgctaaaaaattccaaaggcaagccgcaaacttacaggactgctacaggctttatcaggggatcaatcagctccctaatgtaatacaggccctggagaagcatgagggcaagcaccagaagctcctgctggccgtgttcgtgacccctctgacagaccttaggtccgactttagtaagtttcaggagatgatagagacaactctggatatggatcaagttgaaaaccacgagttcctggtcaaaccaagtttcgaccccaatctcagtgagcttagggagatcatgaatgatctagagaaaaagatgcagagtaccctgattagcgccgctcgagatttaggtggttctctccaacctcggtcctctcggcttgcctgcgccacctag

SEQ ID NO: 92730 - DNA, 2607 bp, Artificial Sequence
  derived and/or modified sequence
atgggaccggctggagctaagaatttacaaagtgtggtcctatccaagatgaatttcgagtccttcgtgaaagatctccttctggtgcgccagtatcgcgtggaggtgtacaagaaccgcgcaggcaacaaggcatctaaagagaacgactggtatttagcctataaggcaagccccggtaacctgagccaatttgaggatatcctgtttgggaacaatgatatgagcgccagtatcggagtggtgggtgtgaaaatgtcggcagtggacggacagagacaagtgggcgtgggctacgtcgactcaattcaacgaaagttaggcctctgcgagtttcccgataacgaccagttcagcaacctagaggcactcctgatccaaataggcccaaaggaatgtgtcctcccaggcggtgagactgcaggcgacatggggaagctgcggcagatcatccagcggggaggcatcttgatcaccgaacggaagaaggccgatttcagcaccaaagacatctatcaggaccttaatagactcctgaagggaaaaaagggagaacagatgaattctgcagtcttgccagaaatggagaaccaggtcgccgtgtcatccctgtctgctgtaatcaagttcttggaactattgtctgacgatagcaattttgggcagtttgagctcactacatttgatttctctcagtacatgaagctagacattgccgcagtgagggctttgaatttatttcagggctcagtcgaggacactactggaagccagagtctcgccgctttactgaacaaatgcaagacaccacaggggcagagacttgtcaaccaatggatcaaacagccgcttatggataaaaaccgaatagaggagcgcctgaaccttgtcgaagcttttgtggaagacgccgaattgcgccagacgctacaggaggatcttttacgccgttttccagacctgaatcgattggcaaaaaaatttcagcgccaagctgctaacctccaagactgctaccgtctctaccaggggatcaatcaactaccgaatgtcatccaagctctggagaagcacgagggcaaacatcagaaactgttgctagctgtgtttgttacccccctaacagacctacgctcagacttttcaaaattccaggaaatgatagagaccaccctggacatggatcaggtggagaatcatgagtttctggtgaagccttccttcgatcctaatttaagtgagctgcgggaaattatgaacgaccttgagaagaaaatgcagtccacccttatctcggcagctagagacttgggtctggacccagggaaacagattaagcttgactccagtgcacaattcggatactactttagagtgacatgtaaggaagagaaggttttgcggaacaataaaaacttctccaccgtagatattcagaagaacggggtcaaattcaccaattccaaattaacctctctgaacgaggagtacactaagaataaaacagaatacgaggaggcccaggatgcaattgtgaaggagattgtcaatatcagttccggttatgtggaacccatgcagaccttgaacgacgtcttagctcagttggacgccgttgtgtcctttgcccatgtgtcgaatggcgctccagtgccctatgttcgacccgctatattggaaaaagggcaaggcaggatcatcctcaaggcatctcgccatgcctgcgtggaggtgcaagatgaaatcgcgttcatcccaaacgacgtatatttcgagaaagataagcagatgttccacattataactggacccaatatggggggaaagagtacctatatccgtcagactggagtgatagtcttgatggcccagatcggatgttttgtgccatgtgagagtgcagaggtgtctattgtcgattgcatcttggccagggttggcgctggtgactcccagctgaaaggagttagtaccttcatggccgagatgctggaaaccgcttctatcctccggagcgccacaaaggattccctgattatcattgacgaactggggaggggtacctcaacatacgatggcttcggattggcttgggctattagtgagtatatcgcaaccaaaatcggggctttttgtatgttcgcgacccacttccacgagcttaccgctctggccaaccagattcccaccgtcaataatctccacgtgacggctctgacaaccgaagagaccctgaccatgctctaccaggtgaaaaaaggtgtgtgcgaccagagctttggaattcatgttgccgagctggccaattttccaaagcacgtaatcgaatgcgcgaaacagaaggcccttgagctagaagagtttcagtacataggagaaagccaggggtatgatataatggagccagcagccaagaagtgctacttggaacgcgaacagggggagaagatcatccaggaatttttaagtaaggtcaagcagatgccctttacagagatgtcggaggaaaacatcacaattaaactgaagcagctgaaagcagaagtcatcgcaaagaacaattcctttgtcaatgagattatttcccggattaaagtcaccacatag

SEQ ID NO: 92731 - DNA, 1497 bp, Artificial Sequence
  derived and/or modified sequence
atgaacaagagaatccactactacagcagactgaccacccccgccgacaaggccctgatcgcccccgaccacgtggtgcccgcccccgaggagtgctacgtgtacagccccctgggcagcgcctacaagctgcagagctacaccgagggctacggcaagaacaccagcctggtgaccatcttcatgatctggaacaccatgatgggcaccagcatcctgagcatcccctggggcatcaagcaggccggcttcaccaccggcatgtgcgtgatcatcctgatgggcctgctgaccctgtactgctgctacagagtggtgaagagcagaaccatgatgttcagcctggacaccaccagctgggagtaccccgacgtgtgcagacactacttcggcagcttcggccagtggagcagcctgctgttcagcctggtgagcctgatcggcgccatgatcgtgtactgggtgctgatgagcaacttcctgttcaacaccggcaagttcatcttcaacttcatccaccacatcaacgacaccgacaccatcctgagcaccaacaacagcaaccccgtgatctgccccagcgccggcagcggcggccaccccgacaacagcagcatgatcttctacgccaacgacaccggcgcccagcagttcgagaagtggtgggacaagagcagaaccgtgcccttctacctggtgggcctgctgctgcccctgctgaacttcaagagccccagcttcttcagcaagttcaacatcctgggcaccgtgagcgtgctgtacctgatcttcctggtgaccttcaaggccgtgagactgggcttccacctggagttccactggttcatccccaccgagttcttcgtgcccgagatcagattccagttcccccagctgaccggcgtgctgaccctggccttcttcatccacaactgcatcatcaccctgctgaagaacaacaagaagcaggagaacaacgtgagagacctgtgcatcgcctacatgctggtgaccctgacctacctgtacatcggcgtgctggtgttcgccagcttccccagcccccccctgagcaaggactgcatcgagcagaacttcctggacaacttccccagcagcgacaccctgagcttcatcgccagaatcttcctgctgttccagatgatgaccgtgtaccccctgctgggctacctggccagagtgcagctgctgggccacatcttcggcgacatctaccccagcatcttccacgtgctgatcctgaacctgatcatcgtgggcgccggcgtgatcatggcctgcttctaccccaacatcggcggcatcatcagatacagcggcgccgcctgcggcctggccttcgtgttcatctaccccagcctgatctacatcatcagcctgcaccaggaggagagactgacctggcccaagctgatcttccacgtgttcatcatcatcctgggcgtggccaacctgatcgtgcagttcttcatgtag

SEQ ID NO: 92732 - DNA, 1497 bp, Artificial Sequence
  derived and/or modified sequence
atgaataagcggatccactattacagtaggctgaccacacctgcggataaagcactcattgctcctgaccatgtggtcccagcacctgaggagtgctatgtttatagccccctggggagcgcttacaaattgcagagctacaccgaggggtatggaaagaacacatcactggttacaatcttcatgatatggaataccatgatgggcacttctatcctgtccattccttggggtatcaagcaggcgggattcaccactgggatgtgcgtgattattttaatggggctgctcacactttattgttgctatcgggtcgtcaagtctcgcacgatgatgttttcacttgacaccaccagttgggagtatcccgatgtttgtcgacactattttggctcattcgggcaatggagcagcctccttttcagcctagtgagcctcatcggcgctatgattgtctattgggtgctgatgagcaacttcctattcaatactggtaagttcatcttcaatttcatacatcacataaacgatacagatacaatcctctcaactaacaactcaaatccagtgatttgccccagcgccgggtctggcggtcatcctgataactcaagtatgatcttttatgccaacgacaccggtgctcagcaattcgagaaatggtgggacaagagccgaactgtgcctttctacctggtcggtctgctcctacctcttttgaactttaaaagtccatcttttttcagcaagttcaacattctggggacagtttcagtcctgtatcttatctttctcgtgacctttaaagcagtacgtctgggcttccacctggagttccactggtttattcccactgagttctttgtaccagagattaggtttcagtttcctcagcttactggcgtcctcacactggcattttttattcataattgtattatcactctcctgaaaaataacaagaagcaggagaataatgttcgagacctctgtattgcctacatgctcgtgactctcacttatttatatattggcgtgttggtgttcgctagctttccatcgcctccactgagcaaagactgtatcgaacagaatttcctcgataactttccatctagcgatacactgtcctttattgctaggatttttctgttgttccagatgatgacagtgtaccccctcttaggctacctagctcgcgtgcaactcctgggtcatattttcggggacatctacccgtccatcttccacgtgctgattttgaacctgatcattgtcggtgctggcgtaattatggcctgtttctaccccaacattggcggaatcattcgttacagcggagccgcttgcgggttagcttttgtttttatttacccatcccttatctacattatctctctgcaccaagaagagagactgacatggccgaagctgattttccacgtcttcataatcatcctgggagtggcaaacctcatagtccaattcttcatgtag

SEQ ID NO: 92733 - DNA, 1497 bp, Artificial Sequence
  derived and/or modified sequence
atgaacaagaggatccactactacagccggctgaccaccccagctgacaaggccctgattgccccagaccacgtggtgcctgccccagaagaatgttatgtgtacagccccctgggcagcgcctacaagctgcagagctacacagagggctacggcaagaacaccagcctggtgaccatcttcatgatctggaacaccatgatgggcaccagcatcctgagcatcccctggggcatcaagcaggccggcttcaccaccggcatgtgtgtgatcatcctgatgggcctgctgaccctgtactgctgctacagagtggtgaagagcaggaccatgatgttcagcctggacaccacctcctgggagtacccagatgtgtgccgccactacttcggcagctttggccagtggagcagcctgctcttcagcctggtgtccctgattggagccatgattgtgtactgggtgctgatgagcaacttcctgttcaacacaggcaagttcatcttcaacttcatccaccacatcaatgacacagacaccatcctgagcaccaacaacagcaaccctgtgatctgccccagcgctggcagcggcggccacccagacaacagctccatgatcttctacgccaatgacacaggagcccagcagtttgagaagtggtgggacaagagcaggacagtgcccttctacctggtgggcctgctgctgcccctgctgaacttcaagagccccagcttcttcagcaagttcaacatcctgggcaccgtgtctgtgctgtacctgatcttcctggtgaccttcaaggctgtgcggctgggcttccacctggagttccactggttcatccccacagagttctttgtgcctgagatccgcttccagttcccccagctgactggagtgctgaccctggccttcttcatccacaactgcatcatcaccctgctgaagaacaacaagaagcaggagaacaacgtgcgggacctgtgcatcgcctacatgctggtgaccctgacctacctgtacatcggcgtgctggtgtttgccagcttccccagcccccccctgagcaaggactgcatcgagcagaacttcctggacaacttccccagcagtgacaccctgtccttcatcgcccgcatcttcctgctcttccagatgatgacagtgtaccccctgctgggctacctggcccgggtgcagctgctgggccacatctttggagacatctaccccagcatcttccacgtgctgatcctgaacctgatcatcgtgggcgctggggtcatcatggcctgcttctaccccaacattggaggcatcatccgctacagcggggccgcctgtggcctggcctttgtgttcatctaccccagcctcatctacatcatcagcctgcaccaggaggagcggctgacctggcccaagctgatcttccacgtgttcatcatcatcctgggcgtggccaacctgattgtgcagttcttcatgtag

SEQ ID NO: 92734 - DNA, 1497 bp, Artificial Sequence
  derived and/or modified sequence
atgaacaagcggatccactactacagccggctgaccacccccgccgacaaggcattgattgctcccgaccacgtagtgccagctcccgaggaatgttacgtttacagtccactgggatccgcctataagctgcagagttataccgagggctacggaaaaaatacgtcgctggtcaccatctttatgatttggaataccatgatgggcacctccatcctgagcattccttgggggatcaagcaagcgggctttacaacgggcatgtgcgtcattatcctgatggggttgttgacactctactgttgctaccgggtggtaaagtctcgtaccatgatgttctccctggacacaacctcctgggaatatcctgacgtgtgtaggcactattttggctcatttggtcaatggtcttcactgctcttctccctggtcagcctcatcggtgcgatgattgtgtattgggtgttgatgagcaactttctgtttaataccggtaaattcatttttaactttattcaccatataaatgacacagacacgattttgtctactaacaacagtaatcctgtgatttgtccctctgcaggatctggaggacaccctgacaatagtagtatgatcttctacgcgaatgacacaggcgcacagcaattcgaaaaatggtgggataagagccgaacagtgccattttatctggtggggctgctcctgcccctgttgaactttaagtctcccagcttcttcagtaagttcaatattctggggacagtgtcggtcctctaccttatttttctggtgacatttaaggcggtgagacttggttttcatctggagttccattggttcattccgaccgaattttttgtgccggaaatccgttttcagtttccacagctcacaggtgtactgactctggcgttttttatccacaattgcatcataaccctgctgaaaaataacaaaaagcaagaaaataacgtgcgggacttgtgtatagcctatatgctcgttacactcacctatctttatatcggcgtgctagtctttgcctctttccccagcccgcccctgagtaaagattgtattgagcagaactttttggacaactttcccagttcggacactttatcatttatcgctaggatcttcttattgttccagatgatgacagtatatccccttctgggataccttgcccgcgtacagctgctggggcacatattcggagacatttatccctcgattttccacgtgctcatcttgaatttgatcatagtgggtgccggggtcattatggcatgcttttaccccaatattggagggatcatccgatactcgggggctgcgtgcgggctggcatttgtgtttatatacccttctctgatctatatcatctccctgcatcaggaggagcgactgacgtggccaaagctaattttccatgtcttcatcattattcttggggtcgccaacctgatcgtgcaattcttcatgtag

SEQ ID NO: 92735 - DNA, 1497 bp, Artificial Sequence
  derived and/or modified sequence
atgaataaaagaattcattactattctaggctgacaactcccgctgataaggcactgattgcccctgaccatgttgtccctgccccagaggagtgctacgtgtacagtccactcgggtctgcatacaagcttcagtcctatactgagggctacggtaagaacactagcctagtcaccatttttatgatctggaatactatgatgggaacaagtatactgtcaatcccttgggggatcaagcaagcagggttcaccaccgggatgtgcgtgatcattcttatggggctcctaaccctatactgctgttacagagtggtgaagtctcggactatgatgttctcgctggacaccacctcatgggagtacccagacgtttgccggcactacttcggatcgttcggtcaatggtcctctctgctctttagtttagtgtccctaattggcgcaatgatcgtctactgggtgcttatgagcaattttctgttcaacactggtaaatttatcttcaacttcatccaccatattaatgacacggacactatactgagtactaataacagtaaccccgtgatatgtcccagcgccggatcaggcggacatcccgacaatagctccatgattttctatgccaacgacactggggctcagcagtttgaaaaatggtgggacaagtccaggaccgttcccttttacctcgtgggtcttctgctcccactcttgaatttcaagtcaccttctttttttagtaagtttaatatcctgggaaccgtgagcgtattgtatctaatctttctagttacctttaaggcggtccgcttgggattccacctggagttccactggtttatccctaccgagttcttcgtgccagagatccggtttcagtttccacaattgactggtgtactgaccctggccttctttatccataactgtatcatcacgctgctgaagaataacaagaagcaggaaaataacgttcgggacctgtgcatcgcatacatgctggtcactctgacctacctctatatcggcgtgctagtgttcgcatccttcccttcaccccctctgtctaaggattgcattgaacagaacttcctggataacttcccatcatcagacactttgagctttattgctagaatcttcttactgttccaaatgatgaccgtgtatcctttgttaggctatctggctcgcgtccagctgcttggccacatttttggggacatttatcctagcatcttccacgtattgatcctgaaccttattattgtgggggcaggagtcattatggcatgcttttacccaaatatcgggggaataattcgctactcaggcgctgcatgcggcttggcgttcgtctttatctatcccagtcttatttacataataagtctgcatcaggaggagcgactcacatggcccaagctcatcttccatgtgttcataattattctgggcgtggccaatctcattgttcagttttttatgtag

SEQ ID NO: 92736 - DNA, 2225 bp, Artificial Sequence
  derived and/or modified sequence
aggactaacttcttcagtgcttagagtgtgagaaaaatggcaaatatgaatagtgattctaggcatcttggcacctctgaggtagatcatgaaagagatcctggacctatgaatatccagtttgagccatcggatctaagatccaaaagattgccccagaccatgtagttccagctccagaagagtgctatgtgtatagtccattgggctctgcttataaacttcaaagttacactgaaggatacggtaaaaacaccagtttagtaaccatttttatgatttggaataccatgatgggaacatctatactaagcattccttggggcataaaacaggctggatttactactggaatgtgtgtcatcatactgatgggccttttaacactttattgctgctacagagtagtgaaatcacggactatgatgttttcgttggataccactagctgggaatatccagatgtctgcagacattatttcggctcctttgggcagtggtcgagtctccttttctccttggtgtctctcattggagcaatgatagtttattgggtgcttatgtcaaattttctttttaatactggaaagtttatttttaattttattcatcacattaatgacacagacactatactgagtaccaataatagcaaccctgtgatttgtccaagtgccgggagtggaggccatcctgacaacagctctatgattttctatgccaatgacacaggagcccaacagtttgaaaagtggtgggataagtccaggacagtccccttttatcttgtagggctcctcctcccactgctcaatttcaagtctccttcatttttttcaaaatttaatatcctaggcacagtgtctgtcctttatttgattttccttgtcacctttaaggctgttcgcttgggatttcatttggaatttcattggtttataccaacagaattttttgtaccagagataagatttcagtttccacagctgactggagtgcttacccttgctttttttattcataattgtatcatcacactcttgaagaacaacaagaaacaagaaaacaatgtgagggacttgtgcattgcttatatgctggtgacattaacttatctctatattggagtcctggtttttgcttcatttccttcaccaccattatccaaagattgtattgagcagaattttttagacaacttccctagcagtgacaccctgtccttcattgcaaggatattcctgctgttccagatgatgactgtatacccactcttaggctacctggctcgtgtccagcttttgggccatatcttcggtgacatttatcctagcattttccatgtgctgattcttaatctaattattgtgggagctggagtgatcatggcctgtttctacccaaacataggagggatcataagatattcaggagcagcatgtggactggcctttgtattcatatacccatctctcatctatataatttccctccaccaagaagagcgtctgacatggcctaaattaatcttccacgttttcatcatcattttgggcgtggctaacctgattgttcagttttttatgtgaaatacctcaactgtttttttcaagagctctcatgatattttgagccttgacaacagttctatataaattcacttgtaaatgctgctgttgtgtaattctaaatattttctaagataatttgaaagcaagggaaatagtggccccttaatgagtatttttttattggggtggggaaaggggcaaaaagaatgatcttagtgtctttacctttctcatattaactcacctctttattctgtggtcttttctgaatagaaatgtatgccctaggaagaaatcatgctgggttttgcttttagagataaaaggtggtggatttattttgcctgcagtaaagattctcagggtgtcagagcagcatattgtcaaatcctgcttctgttttatgtttcagtgtattcactttcattttcttacttactagaccatttctgcagtttgcccaaacctctactgtttgggacagtaagccaaatacctcatttttaaaaagaagttttcatggcatcagtgttaataaagtacatttttaactgagtcttaatctctatttgaagaaaaagtagagacaaaagtaatgtcaatgtaatccccaggatcatgaaatgtatacaaaataaataaagtaggagagtt

SEQ ID NO: 92737 - protein, 498 aa, Artificial Sequence
  derived and/or modified sequence
MAICILTWRIRPFCIEPTNIVNVNHVIQRVSDHASAMNKRIHYYSRLTTPADKALIAPDHVVPAPEECYVYSPLGSAYKLQSYTEGYGKNTSLVTIFMIWNTMMGTSILSIPWGIKQAGFTTGMCVIILMGLLTLYCCYRVVKSRTMMFSLDTTSWEYPDVCRHYFGSFGQWSSLLFSLVSLIGAMIVYWVLMSNFLFNTGKFIFNFIHHINDTDTILSTNNSNPVICPSAGSGGHPDNSSMIFYANDTGAQQFEKWWDKSRTVPFYLVGLLLPLLNFKSPSFFSKFNILEIRFQFPQLTGVLTLAFFIHNCIITLLKNNKKQENNVRDLCIAYMLVTLTYLYIGVLVFASFPSPPLSKDCIEQNFLDNFPSSDTLSFIARIFLLFQMMTVYPLLGYLARVQLLGHIFGDIYPSIFHVLILNLIIVGAGVIMACFYPNIGGIIRYSGAACGLAFVFIYPSLIYIISLHQEERLTWPKLIFHVFIIILGVANLIVQFFM

SEQ ID NO: 92738 - DNA, 1497 bp, Artificial Sequence
  derived and/or modified sequence
atggccatctgcatcctgacctggagaatcagacccttctgcatcgagcccaccaacatcgtgaacgtgaaccacgtgatccagagagtgagcgaccacgccagcgccatgaacaagagaatccactactacagcagactgaccacccccgccgacaaggccctgatcgcccccgaccacgtggtgcccgcccccgaggagtgctacgtgtacagccccctgggcagcgcctacaagctgcagagctacaccgagggctacggcaagaacaccagcctggtgaccatcttcatgatctggaacaccatgatgggcaccagcatcctgagcatcccctggggcatcaagcaggccggcttcaccaccggcatgtgcgtgatcatcctgatgggcctgctgaccctgtactgctgctacagagtggtgaagagcagaaccatgatgttcagcctggacaccaccagctgggagtaccccgacgtgtgcagacactacttcggcagcttcggccagtggagcagcctgctgttcagcctggtgagcctgatcggcgccatgatcgtgtactgggtgctgatgagcaacttcctgttcaacaccggcaagttcatcttcaacttcatccaccacatcaacgacaccgacaccatcctgagcaccaacaacagcaaccccgtgatctgccccagcgccggcagcggcggccaccccgacaacagcagcatgatcttctacgccaacgacaccggcgcccagcagttcgagaagtggtgggacaagagcagaaccgtgcccttctacctggtgggcctgctgctgcccctgctgaacttcaagagccccagcttcttcagcaagttcaacatcctggagatcagattccagttcccccagctgaccggcgtgctgaccctggccttcttcatccacaactgcatcatcaccctgctgaagaacaacaagaagcaggagaacaacgtgagagacctgtgcatcgcctacatgctggtgaccctgacctacctgtacatcggcgtgctggtgttcgccagcttccccagcccccccctgagcaaggactgcatcgagcagaacttcctggacaacttccccagcagcgacaccctgagcttcatcgccagaatcttcctgctgttccagatgatgaccgtgtaccccctgctgggctacctggccagagtgcagctgctgggccacatcttcggcgacatctaccccagcatcttccacgtgctgatcctgaacctgatcatcgtgggcgccggcgtgatcatggcctgcttctaccccaacatcggcggcatcatcagatacagcggcgccgcctgcggcctggccttcgtgttcatctaccccagcctgatctacatcatcagcctgcaccaggaggagagactgacctggcccaagctgatcttccacgtgttcatcatcatcctgggcgtggccaacctgatcgtgcagttcttcatgtag

SEQ ID NO: 92739 - DNA, 1497 bp, Artificial Sequence
  derived and/or modified sequence
atggccatctgtatcttaacttggagaatcagacccttctgcatagaacccacgaatatagtgaacgtaaatcatgtcatccagcgggtatccgaccatgctagtgcgatgaataaacgcatccactactactctagactgactactcccgcggataaagctctgatcgctccagaccacgtggtgcccgcccctgaagaatgctatgtgtattccccccttgggagcgcgtacaagcttcagtcatatacagaaggctacggcaaaaacacatctctggtgactatctttatgatctggaacacaatgatggggacatctatcctgagtatcccctggggcattaagcaagctggctttaccactggcatgtgcgtgattatattgatggggttattgactctctattgttgctatagagtggtgaagagccgcaccatgatgttctcactagataccacttcttgggagtatcctgatgtatgccgacactacttcggcagctttgggcaatggagcagcctcctgttttccttggtcagcctgattggcgccatgatcgtatattgggtattgatgtcgaacttccttttcaacacagggaaatttattttcaatttcatccaccacatcaatgataccgatacaattctgtcaacaaacaattccaatccagtcatatgtcccagcgcaggttccggaggacaccctgacaattccagcatgattttttacgccaatgatacaggagcgcagcaatttgagaaatggtgggacaaatcccggacggtccctttctacctggtcgggctgctgttgccactgctcaatttcaaatcacccagttttttctcaaaatttaatatcctcgagataagattccagtttccccagctgaccggcgttcttacactcgctttttttattcataattgtatcatcaccctcctcaagaacaacaagaagcaggagaataacgtcagggatctgtgtatagcatacatgcttgtgacacttacctatctctatataggcgtactcgtctttgccagctttccatccccccctctaagcaaggattgcatcgagcagaactttctggataacttccctagcagcgacactctgagctttattgctagaattttcctgttgtttcagatgatgacagtgtacccgctgttgggatatctggccagggttcaactgttgggacacattttcggagacatctatccaagcatcttccatgttctgattttaaaccttatcatagtgggcgcaggcgtgatcatggcctgcttttacccaaacatcggtggaattatcagatattcaggcgcagcttgtggattagctttcgtttttatatacccgagtctcatctacatcatctccctgcaccaggaggagaggctcacctggccaaaactgatttttcacgtgtttatcataattctcggagtggccaatctcatagtccagttcttcatgtag

SEQ ID NO: 92740 - DNA, 1497 bp, Artificial Sequence
  derived and/or modified sequence
atggccatctgcatcctgacctggaggatccggcccttctgcatcgagcccaccaacatcgtgaatgtgaaccacgtgatccagagggtgtctgaccacgccagcgccatgaacaagaggatccactactacagccggctgaccaccccagctgacaaggccctgattgccccagaccacgtggtgcctgccccagaagaatgttatgtgtacagccccctgggcagcgcctacaagctgcagagctacacagagggctacggcaagaacaccagcctggtgaccatcttcatgatctggaacaccatgatgggcaccagcatcctgagcatcccctggggcatcaagcaggccggcttcaccaccggcatgtgtgtgatcatcctgatgggcctgctgaccctgtactgctgctacagagtggtgaagagcaggaccatgatgttcagcctggacaccacctcctgggagtacccagatgtgtgccgccactacttcggcagctttggccagtggagcagcctgctcttcagcctggtgtccctgattggagccatgattgtgtactgggtgctgatgagcaacttcctgttcaacacaggcaagttcatcttcaacttcatccaccacatcaatgacacagacaccatcctgagcaccaacaacagcaaccctgtgatctgccccagcgctggcagcggcggccacccagacaacagctccatgatcttctacgccaatgacacaggagcccagcagtttgagaagtggtgggacaagagcaggacagtgcccttctacctggtgggcctgctgctgcccctgctgaacttcaagagccccagcttcttcagcaagttcaacatcctggagatccgcttccagttcccccagctgactggagtgctgaccctggccttcttcatccacaactgcatcatcaccctgctgaagaacaacaagaagcaggagaacaacgtgcgggacctgtgcatcgcctacatgctggtgaccctgacctacctgtacatcggcgtgctggtgtttgccagcttccccagcccccccctgagcaaggactgcatcgagcagaacttcctggacaacttccccagcagtgacaccctgtccttcatcgcccgcatcttcctgctcttccagatgatgacagtgtaccccctgctgggctacctggcccgggtgcagctgctgggccacatctttggagacatctaccccagcatcttccacgtgctgatcctgaacctgatcatcgtgggcgctggggtcatcatggcctgcttctaccccaacattggaggcatcatccgctacagcggggccgcctgtggcctggcctttgtgttcatctaccccagcctcatctacatcatcagcctgcaccaggaggagcggctgacctggcccaagctgatcttccacgtgttcatcatcatcctgggcgtggccaacctgattgtgcagttcttcatgtag

SEQ ID NO: 92741 - DNA, 1497 bp, Artificial Sequence
  derived and/or modified sequence
atggccatctgcatcctgacctggcggatccggcccttctgcatcgagccaactaatatagtgaatgttaatcatgtgatccaaagggtctccgaccatgcatctgctatgaacaagcgcatccactattacagtagactcactactcctgcagacaaagctctgattgctcctgatcacgtggtcccagcccccgaagagtgctacgtctatagcccactgggcagcgcctacaagctgcagagctacactgaaggttatggcaagaacacctctctcgttacaatatttatgatatggaacaccatgatgggaacttctatcctgagcatcccgtggggcattaagcaggccggattcactaccggcatgtgtgtgatcattcttatgggacttctcacgctgtattgttgctatcgagttgtgaaatctcgtaccatgatgtttagcctcgataccactagttgggagtacccggatgtgtgcagacactatttcgggtcttttgggcagtggtccagcctgctgttcagcctggttagcctcataggcgctatgattgtctattgggtattgatgtctaatttcctgttcaacacaggcaagttcatctttaatttcatccaccacataaacgatacagacaccattctctcaacaaataacagtaatccggtgatatgtccttctgccggttctggtggtcatcccgacaactccagtatgatcttttatgccaacgatacgggcgcccagcaatttgaaaaatggtgggacaagagtcggacagtgccgttctaccttgtcgggttactcctaccattactgaacttcaaaagcccctcttttttctcaaagtttaacatcttagagattagatttcagttcccccagctcacgggggtcctaacactcgccttctttatacacaactgtattatcacactccttaaaaataacaaaaagcaagagaacaacgttcgagatctttgcatcgcatacatgcttgttaccctaacatacctgtatatcggggtactggtgttcgcaagttttccaagtccccccctctccaaagattgcatcgagcagaatttcctggacaactttccctcttctgatacactcagtttcatcgcgcgaatcttcctcttgtttcagatgatgacagtttatcctttacttgggtacctcgcccgggtgcagttgctggggcacatttttggggatatctacccgtcgatctttcacgtccttatcttgaacctcattattgttggagctggagtcatcatggcctgcttctatccaaatatcgggggaatcattcgttattcaggtgcagcctgcggcctggcattcgtctttatatacccgtctctgatctacattattagtctgcaccaggaggaacgcctcacatggcccaagctgatttttcacgtgtttattattattctcggcgtggcaaacctgattgtccagttttttatgtag

SEQ ID NO: 92742 - DNA, 1497 bp, Artificial Sequence
  derived and/or modified sequence
atggcaatctgcatattgacctggcggattcgccctttctgcatcgaacctacgaatatcgtgaacgtcaatcacgtcatccaacgggtgagcgaccatgcgtccgccatgaacaaacggatccactattacagcaggctgaccactccagcagacaaggctctcattgcacctgatcatgtggtgcccgcacccgaagaatgctacgtgtatagtcctctcggcagcgcttacaaacttcaatcctataccgagggttatgggaaaaatacctcacttgtgaccatcttcatgatttggaataccatgatgggcacaagtatccttagcatcccctggggaatcaagcaggccggatttaccacaggaatgtgcgttataatcctgatgggtctgctgactctatattgctgctaccgtgtggtgaagtcgagaaccatgatgttcagtttggatacaactagctgggagtaccctgatgtctgccggcactatttcggcagcttcgggcagtggtcctcattgctgttttctctggtttcccttatcggggctatgattgtttactgggtgttgatgtccaatttcctttttaacactggcaaattcatctttaattttatacaccacatcaacgacaccgataccatcctgtcaactaacaattccaatccagtgatttgtcctagtgccggttccggcggacaccctgataacagcagtatgatcttttacgcaaacgacactggtgcacagcagttcgagaaatggtgggacaaatctcgaacagtgccattttacctcgtgggactcctactccctctccttaatttcaagtcaccctccttcttcagcaagtttaatattctggaaatccgattccaattcccacaactgaccggagtactcacactcgctttctttatccataattgcatcattactttgttgaagaacaataaaaagcaggaaaataatgtgagagacctttgtatcgcctatatgttggtaaccctgacctacctctacatcggcgtgctcgtttttgcttcattcccatcccccccactctcaaaggactgcattgagcagaatttcttagacaactttccctcgagcgacacccttagcttcattgcgagaatctttcttctttttcaaatgatgaccgtgtatccactgttaggttacctggccagagtccagctgctcggccacattttcggtgacatctatccaagcattttccacgtgttgatcctgaatcttatcatagtcggcgctggcgtgataatggcatgtttttaccctaacatcggaggaatcattaggtacagtggagccgcatgtgggttggccttcgtattcatctacccctctctgatttacatcatttccctgcaccaagaagagagactgacatggccgaagctcattttccacgtgtttattattatcctgggggtggccaatctgatcgtgcaattttttatgtag

SEQ ID NO: 92743 - DNA, 1756 bp, Artificial Sequence
  derived and/or modified sequence
aaatttgtttaactgcgtagattaaatggcaatatattttctataatgaaacttgttgaaatgagagggaatcagctatttacaatcatggcataactacctagggctctgttgtcagcttggtattataatggaaaacaattggatatgtcagagacttagtctattacatttccatggctatttgcattttaacatggagaatccggcctttctgtatagagcccacaaacatcgtgaatgtgaatcatgtcattcagagggttagtgaccatgcctctgccatgaacaagagaattcattactacagccggctcaccactcctgcagacaaggcactgattgccccagaccatgtagttccagctccagaagagtgctatgtgtatagtccattgggctctgcttataaacttcaaagttacactgaaggatacggtaaaaacaccagtttagtaaccatttttatgatttggaataccatgatgggaacatctatactaagcattccttggggcataaaacaggctggatttactactggaatgtgtgtcatcatactgatgggccttttaacactttattgctgctacagagtagtgaaatcacggactatgatgttttcgttggataccactagctgggaatatccagatgtctgcagacattatttcggctcctttgggcagtggtcgagtctccttttctccttggtgtctctcattggagcaatgatagtttattgggtgcttatgtcaaattttctttttaatactggaaagtttatttttaattttattcatcacattaatgacacagacactatactgagtaccaataatagcaaccctgtgatttgtccaagtgccgggagtggaggccatcctgacaacagctctatgattttctatgccaatgacacaggagcccaacagtttgaaaagtggtgggataagtccaggacagtccccttttatcttgtagggctcctcctcccactgctcaatttcaagtctccttcatttttttcaaaatttaatatcctagagataagatttcagtttccacagctgactggagtgcttacccttgctttttttattcataattgtatcatcacactcttgaagaacaacaagaaacaagaaaacaatgtgagggacttgtgcattgcttatatgctggtgacattaacttatctctatattggagtcctggtttttgcttcatttccttcaccaccattatccaaagattgtattgagcagaattttttagacaacttccctagcagtgacaccctgtccttcattgcaaggatattcctgctgttccagatgatgactgtatacccactcttaggctacctggctcgtgtccagcttttgggccatatcttcggtgacatttatcctagcattttccatgtgctgattcttaatctaattattgtgggagctggagtgatcatggcctgtttctacccaaacataggagggatcataagatattcaggagcagcatgtggactggcctttgtattcatatacccatctctcatctatataatttccctccaccaagaagagcgtctgacatggcctaaattaatcttccacgttttcatcatcattttgggcgtggctaacctgattgttcagttttttatgtgaaatacctcaactgtttttttcaagagctctcatgatattttgagccttgacaacagttctatataaattcacttgtaaatgct

SEQ ID NO: 92744 - protein, 410 aa, Artificial Sequence
  derived and/or modified sequence
MATKCGNCGPGYSTPLEAMKGPREEIVYLPCIYRNTGTEAPDYLATVDVDPKSPQYCQVIEPKDIHAKCELAFLHTSHCLASGEVMISSLGDVKGNGKGGFVLLDGETFEVKGTWERPGGAAPLGYDFWYQPRHNVMISTEWAAPNVLRDGFNPADVEAGLYGSHLYVWDWQRHEIVQTLSLKDGLIPLEIRFLHNPDAAQGFVGCALSSTIQRFYKNEGGTWSVEKVIQVPPKKVKGWLLPEMPGLITDILLSLDDRFLYFSNWLHGDLRQYDISDPQRPRLTGQLFLGGSIVKGGPVQVLEDEELKSQPEPLVVKGKRVAGGPQMIQLSLDGKRLYITTSLYSAWDKQFYPDLIREGSVMLQVDVDTVKGGLKLNPNFLVDFGKEPLGPALAHELRYPGGDCSSDIWI

SEQ ID NO: 92745 - DNA, 1233 bp, Artificial Sequence
  derived and/or modified sequence
atggcgactaagtgcgggaattgtggccccgggtactccacaccattggaggccatgaagggcccaagagaagagatcgtctaccttccctgcatttatcggaacacgggtaccgaagcacccgattatctggcgacagttgacgtggaccctaagagccctcagtactgtcaagtcatcgaacctaaggatattcacgctaaatgcgagctagcctttctgcacacatcgcattgcctggcgtcgggtgaggtcatgatctcttccctgggcgatgtgaaggggaacggcaaggggggtttcgtccttctcgacggagaaaccttcgaagttaaaggcacatgggaacgacccggcggggctgcgccactgggctatgatttttggtaccagcccaggcataacgtcatgatatctactgagtgggctgcacccaatgtgctacgggatggctttaaccccgctgatgtggaggccggtttatatggatcccacttatacgtctgggactggcagcgacatgagattgtgcagaccctatccttaaaagatggtctgatcccacttgagattcggtttttgcacaatccggatgccgcacaaggcttcgtcggctgcgccctgtcctccaccatccagagattctataagaacgagggtgggacttggagcgtggagaaagttatccaagtgccgcctaaaaaggtcaaagggtggctcctgcccgagatgcccggcctgattaccgatatcttgcttagtctggatgaccgctttctgtatttctcaaactggctccacggagatctcaggcagtatgatatcagtgaccctcagaggcctcgactgaccgggcaactgtttctggggggaagcattgtcaaggggggtcccgtgcaggtactagaggacgaagaactgaagtcccaacctgaacccttggtggttaaaggcaaacgcgtcgctggcggtccacagatgatacagcttagtctggatggcaagagactttacattactaccagcttatatagtgcctgggacaaacagttctatccagacctcatccgagagggtagcgtaatgctgcaggtggacgtcgacactgtgaagggcggcttgaaattgaacccaaactttctggtagactttggtaaggaaccactgggacccgccttagcccacgagctgaggtatccggggggagactgctcctccgacatttggatatag

SEQ ID NO: 92746 - DNA, 1233 bp, Artificial Sequence
  derived and/or modified sequence
atggccaccaagtgtggcaactgtggccctggctacagcacccccctggaggccatgaagggcccccgggaggagatcgtgtacctgccctgcatctacagaaacacaggaacagaggccccagactacctggccaccgtggatgtggaccccaagagcccccagtactgccaggtgattgagcccaaggacatccacgccaagtgtgagctggccttcctgcacaccagccactgcctggccagcggggaggtgatgatcagcagcctgggagatgtgaagggaaatggcaagggcggctttgtgctgctggatggagagacctttgaggtgaagggcacctgggagaggcctgggggcgccgcccccctgggctatgacttctggtaccagcccaggcacaacgtgatgatcagcacagagtgggccgcccccaacgtgctgagagatggcttcaacccagcagatgtggaggccggcctgtatggcagccacctgtatgtgtgggactggcagagacatgagatcgtgcagaccctgagcctgaaggatggcctcatccccctggagatccgcttcctgcacaacccagatgctgcccagggctttgtgggctgtgccctgagcagcaccatccagcgcttctacaagaatgaaggaggcacctggagcgtggagaaggtgatccaggtgccccccaagaaggtgaagggctggctgctgcctgagatgcctggcctcatcacagacatcctgctgagcctggatgaccgcttcctgtacttcagcaactggctgcatggagacctgcggcagtatgacatcagtgacccccagaggccccggctgaccggccagctgttcctgggcggcagcatcgtgaagggcggccctgtgcaggtgctggaggatgaggagctgaagagccagcctgagcccctggtggtgaagggcaagagggtggccggcggcccccagatgatccagctgagcctggatggcaagaggctgtacatcaccaccagcctgtacagcgcctgggacaagcagttctacccagacctgatccgggagggctctgtgatgctgcaggtggatgtggacacagtgaagggcggcctgaagctgaaccccaacttcctggtggactttgggaaggagcccctgggccctgccctggcccacgagctgcgctacccaggaggagactgcagcagtgacatctggatctag

SEQ ID NO: 92747 - DNA, 1233 bp, Artificial Sequence
  derived and/or modified sequence
atggccaccaagtgcggcaactgcggccccggctacagcacccccctggaagccatgaaagggcccagagaggaaatcgtctatctcccgtgcatttacaggaacactggcacggaggcaccggattatctcgctaccgttgatgtggaccccaagagcccgcagtattgtcaggtgatcgagcccaaagacatccacgccaaatgcgaactggccttccttcacacatcccattgcttggccagcggggaggtcatgatcagtagtctgggcgacgtcaaaggaaacgggaagggggggttcgtgctgttggatggagaaaccttcgaagttaagggcacatgggagagaccaggcggcgctgccccactcggatatgacttttggtaccaacctcgacataacgttatgatatcaacagagtgggcggctcccaatgtgctgcgagacggcttcaatcctgccgacgtggaagccggactgtacgggtcgcacctctacgtgtgggactggcaaaggcacgaaatcgttcagacattgagcctgaaagacgggcttatcccgctagagatcaggttcctgcacaaccctgacgctgctcagggctttgtgggttgcgctctatcaagcactatccaaagattctacaagaacgaggggggtacatggtccgttgaaaaggttatccaggttccacctaagaaagttaaggggtggctgttaccagaaatgccaggcttgatcactgacatactgctgtcactggatgatcgtttcctgtacttctctaattggttacacggcgatctgaggcaatacgatattagtgatcctcagcgcccgcggttaaccggccaactgttcctgggaggttctattgtgaaaggggggcccgtgcaggtactggaagacgaagaactgaaatcacagccagagcccctcgttgtcaagggcaagcgggtggccggaggcccgcagatgattcagttatcactggacggtaaacgtctttatattaccacaagcttgtactccgcttgggacaagcaattttaccctgacctgatcagagagggatctgttatgctgcaggtcgacgtggatactgttaagggagggttgaaactcaacccaaatttcctggtggactttgggaaagagccattggggcccgctctggcccatgaactgaggtaccctggaggcgattgctcgagcgacatttggatctag

SEQ ID NO: 92748 - DNA, 1233 bp, Artificial Sequence
  derived and/or modified sequence
atggccaccaagtgtggtaattgtggtcccggatactccacccccctggaggccatgaagggacccagggaagaaatagtttatctcccatgcatctacagaaacactggaaccgaggcacccgattatttagcgactgtggatgtggatccaaaatccccccaatactgtcaggtaattgaacccaaagatatccacgcaaagtgcgagcttgcctttctgcacacatcgcactgcctagcgagcggtgaggtgatgatcagttctttgggggatgtcaaaggcaatgggaaaggcggtttcgtattgctggacggagaaactttcgaagtcaaaggaacttgggagcggccaggcggtgcggctccactgggctacgacttttggtaccagccacgccacaacgtgatgatttcaactgagtgggccgctcccaatgtcctgcgagatggttttaaccctgccgacgtggaggcagggctgtacggaagtcacctctacgtatgggactggcagcggcatgagattgtgcagaccctgtcactgaaggatggactgataccgctcgagattcgttttctccacaatcctgatgccgcacaaggatttgtaggatgtgctctgagctctactattcaaagattctacaagaatgaggggggtacctggagcgtggaaaaggtgatccaggtgcctccaaagaaggttaagggatggctgctgccggaaatgcccggtctgattaccgatatcttactctctctggacgatagatttctgtactttagcaattggcttcacggggatctcaggcagtacgacatctcagacccacagcgcccacgtttaacaggacagctttttttaggcggatccatcgtgaaaggtggccctgtgcaagttctggaggatgaagaactgaagagtcagcccgagccactcgtggtcaaaggcaagcgggtggcgggtggccctcaaatgatccagctctctctggacggtaaaagattgtacataaccaccagtctctacagcgcctgggacaaacagttctaccccgacctcattagagaaggctccgtgatgctgcaggtggacgttgacactgtgaagggcggacttaaactgaatcctaattttctggttgacttcggaaaggaaccactcggacctgccttggctcacgaattgaggtatccgggaggcgattgctcaagcgatatctggatttag

SEQ ID NO: 92749 - DNA, 1530 bp, Artificial Sequence
  derived and/or modified sequence
agcggcctctgacaccagcacagcaaacccgccgggatcaaagtgtaccagtcggcagcatggctacgaaatgtgggaattgtggacccggctactccacccctctggaggccatgaaaggacccagggaagagatcgtctacctgccctgcatttaccgaaacacaggcactgaggccccagattatctggccactgtggatgttgaccccaagtctccccagtattgccaggtcattgagcccaaggacatccatgccaagtgcgaactggcctttctccacaccagccactgcctggccagcggggaagtgatgatcagctccctgggagacgtcaagggcaatggcaaagggggttttgtgctgctggatggggagacgttcgaggtgaaggggacatgggagagacctgggggtgctgcaccgttgggctatgacttctggtaccagcctcgacacaatgtcatgatcagcactgagtgggcagctcccaatgtcttacgagatggcttcaaccccgctgatgtggaggctggactgtacgggagccacttatatgtatgggactggcagcgccatgagattgtgcagaccctgtctctaaaagatgggcttattcccttggagatccgcttcctgcacaacccagacgctgcccaaggctttgtgggctgcgcactcagctccaccatccagcgcttctacaagaacgagggaggtacatggtcagtggagaaggtgatccaggtgccccccaagaaagtgaagggctggctgctgcccgaaatgccaggcctgatcaccgacatcctgctctccctggacgaccgcttcctctacttcagcaactggctgcatggggacctgaggcagtatgacatctctgacccacagagaccccgcctcacaggacagctcttcctcggaggcagcattgttaagggaggccctgtgcaagtgctggaggacgaggaactaaagtcccagccagagcccctagtggtcaagggaaaacgggtggctggaggccctcagatgatccagctcagcctggatgggaagcgcctctacatcaccacgtcgctgtacagtgcctgggacaagcagttttaccctgatctcatcagggaaggctctgtgatgctgcaggttgatgtagacacagtaaaaggagggctgaagttgaaccccaacttcctggtggacttcgggaaggagccccttggcccagcccttgcccatgagctccgctaccctgggggcgattgtagctctgacatctggatttgaactccaccctcatcacccacactccctattttgggccctcacttccttggggacctggcttcattctgctctctcttggcacccgacccttggcagcatgtaccacacagccaagctgagactgtggcaatgtgttgagtcatatacatttactgaccactgttgcttgttgctcactgtgctgcttttccatgagctcttggaggcaccaagaaataaactcgtaaccctgtccttc

SEQ ID NO: 92750 - DNA, 1233 bp, Artificial Sequence
  derived and/or modified sequence
atggccaccaagtgcggcaactgcggccccggctacagcacccccctggaggccatgaagggccccagagaggagatcgtgtacctgccctgcatctacagaaacaccggcaccgaggcccccgactacctggccaccgtggacgtggaccccaagagcccccagtactgccaggtgatcgagcccaaggacatccacgccaagtgcgagctggccttcctgcacaccagccactgcctggccagcggcgaggtgatgatcagcagcctgggcgacgtgaagggcaacggcaagggcggcttcgtgctgctggacggcgagaccttcgaggtgaagggcacctgggagagacccggcggcgccgcccccctgggctacgacttctggtaccagcccagacacaacgtgatgatcagcaccgagtgggccgcccccaacgtgctgagagacggcttcaaccccgccgacgtggaggccggcctgtacggcagccacctgtacgtgtgggactggcagagacacgagatcgtgcagaccctgagcctgaaggacggcctgatccccctggagatcagattcctgcacaaccccgacgccgcccagggcttcgtgggctgcgccctgagcagcaccatccagagattctacaagaacgagggcggcacctggagcgtggagaaggtgatccaggtgccccccaagaaggtgaagggctggctgctgcccgagatgcccggcctgatcaccgacatcctgctgagcctggacgacagattcctgtacttcagcaactggctgcacggcgacctgagacagtacgacatcagcgacccccagagacccagactgaccggccagctgttcctgggcggcagcatcgtgaagggcggccccgtgcaggtgctggaggacgaggagctgaagagccagcccgagcccctggtggtgaagggcaagagagtggccggcggcccccagatgatccagctgagcctggacggcaagagactgtacatcaccaccagcctgtacagcgcctgggacaagcagttctaccccgacctgatcagagagggcagcgtgatgctgcaggtggacgtggacaccgtgaagggcggcctgaagctgaaccccaacttcctggtggacttcggcaaggagcccctgggccccgccctggcccacgagctgagataccccggcggcgactgcagcagcgacatctggatctag

SEQ ID NO: 92751 - DNA, 978 bp, Artificial Sequence
  derived and/or modified sequence
atgagccccagaaccagcctggccgaggacagctgcctgggcagacacagccccgtgcccagacccgccagcagaagcagcagccccggcgccaagagaagacacagctgcgccgaggccctggtggccctgccccccggcgccagcccccagagaagcagaagccccagcccccagcccagcagccacgtggccccccaggaccacggcagccccgccggctacccccccgtggccggcagcgccgtgatcatggacgccctgaacagcctggccaccgacagcccctgcggcatcccccccaagatgtggaagaccagccccgaccccagccccgtgagcgccgcccccagcaaggccggcctgcccagacacatctaccccgccgtggagttcctgggcccctgcgagcagggcgagagaagaaacagcgcccccgagagcatcctgctggtgccccccacctggcccaagcccctggtgcccgccatccccatctgcagcatccccgtgaccgccagcctgccccccctggagtggcccctgagcagccagagcggcagctacgagctgagaatcgaggtgcagcccaagccccaccacagagcccactacgagaccgagggcagcagaggcgccgtgaaggcccccaccggcggccaccccgtggtgcagctgcacggctacatggagaacaagcccctgggcctgcagatcttcatcggcaccgccgacgagagaatcctgaagccccacgccttctaccaggtgcacagaatcaccggcaagaccgtgaccaccaccagctacgagaagatcgtgggcaacaccaaggtgctggagatccccctggagcccagcaccgccccccacctgctgagccccttcatgttcatcagccagcccggcgtgcacaccagaatcaacgtgtgggccctgagcggcctgagcctgaaggagctggccaccagcctgtag

SEQ ID NO: 92752 - DNA, 978 bp, Artificial Sequence
  derived and/or modified sequence
atgtctccacgcacatctctggcagaagattcgtgtctgggcaggcactcccctgtccctagaccagcctcccggtccagctcacctggggccaagcggaggcactcctgcgcagaggcccttgtggcccttccccctggagcatccccccagagatctcgtagcccttctccgcagccgtcaagccacgtcgctccccaggatcacgggagcccagccggttatccccctgtggccggatcagcagtgattatggacgctctgaactcactagcaactgattctccctgcggaatcccacccaaaatgtggaagacatcccctgaccctagccccgtcagtgcagctccttcgaaagccgggctgccacgccatatctacccagcggtggagtttctcggcccctgcgagcagggcgagcggcggaacagcgctcctgagagcatcctgttagtcccacccacgtggcccaaacccctggttccggccatccccatttgctccattcctgtgactgctagcctgccccctctagagtggccgctgagtagccagagcggaagttacgaattgcggattgaggtccagcccaaacctcaccaccgcgcccactacgagacagagggctcaagaggagccgtcaaggcgcccaccggcggacaccccgtcgtgcaactacatgggtacatggagaataagcccttaggcctccagatctttatcggaacagcagacgagcggatattgaagccacatgcgttctaccaggtgcacagaattacgggaaaaactgttaccaccactagctacgaaaaaattgtgggaaatacgaaagtgctcgagatcccactcgaacccagtaccgctccccacctgctctccccctttatgttcataagtcagccaggggtgcacacacgcattaacgtctgggcccttagcggattgagcctgaaggaactggcaacttctctctag

SEQ ID NO: 92753 - DNA, 978 bp, Artificial Sequence
  derived and/or modified sequence
atgagccccaggaccagcctggccgaggacagctgcctgggccgccacagccctgtgcccaggcctgccagccgcagcagcagccctggggccaagagaagacacagctgtgccgaggccctggtggccctgcccccaggggccagcccccagaggagccgcagccccagcccccagcccagcagccacgtggccccccaggaccacggcagccctgctggctacccacctgtggccggcagcgctgtgatcatggatgccctgaacagcctggccacagacagcccctgtggcatcccccccaagatgtggaagaccagcccagaccccagccctgtgtctgctgcccccagcaaggccggcctgcccaggcacatctacccagctgtggagttcctgggcccctgtgagcagggcgagaggaggaacagcgcccctgagagcatcctgctggtgccccccacctggcccaagcccctggtgcctgccatccccatctgcagcatccctgtgacagccagcctgccccccctggagtggcccctgagcagccagagcggcagctatgagctgagaattgaggtgcagcccaagccccaccaccgggcccactatgaaacagagggcagcagaggagctgtgaaggcccccaccggcggccaccctgtggtgcagctgcacggctacatggagaacaagcccctgggcctgcagatcttcatcggcacagcagatgagcgcatcctgaagccccacgccttctaccaggtgcaccgcatcaccgggaagacagtgaccaccaccagctatgagaagatcgtgggcaacaccaaggtgctggagatccccctggagcccagcacagccccccacctgctgagccccttcatgttcatcagccagcccggggtgcacacccgcatcaacgtgtgggccctgagcggcctgagcctgaaggagctggccaccagcctgtag

SEQ ID NO: 92754 - DNA, 978 bp, Artificial Sequence
  derived and/or modified sequence
atgagcccccggaccagcctggccgaggacagctgcctgggccggcactctcctgtcccccgtcctgcaagccgttcttcatctccaggcgctaagcgcaggcacagctgcgccgaggcactggtggctctgccccccggggcctctccccagaggtcacgatctcccagtccacagccatcatcccatgtcgctccccaggaccacggctctcccgccgggtatccacctgttgctgggtccgcggttattatggatgccttaaacagtctagccactgactctccctgcggaattccaccgaagatgtggaagactagccccgacccttcgcccgtctctgcggctcccagtaaagccggactgccaaggcatatttatccggccgttgaatttctcggcccttgtgaacaaggcgagaggcggaactcggctcccgagtcgatcctgcttgtgccgcccacatggcccaagcctttagtaccagcgatccccatctgtagcattcccgtgacagctagcctacctcctctcgagtggccgctgtcctcccaaagtggctcctatgagcttcggattgaagtgcaacccaaaccacatcaccgagctcactacgagactgagggtagccggggcgcagttaaggcgccaaccggcgggcatcctgtggtgcagctccacggatatatggaaaataaacctctgggactccagatcttcattgggaccgccgatgagcggatcctgaagcctcatgcgttctaccaggtccacagaattaccggcaagaccgttactactacttcttacgaaaagattgtggggaacaccaaagttttggagattccattggagcctagcaccgccccacacctgctctccccgtttatgttcatttcccaacccggtgttcatacacgcatcaatgtctgggctctgtcaggactttctcttaaagaactggctacatcactgtag

SEQ ID NO: 92755 - DNA, 978 bp, Artificial Sequence
  derived and/or modified sequence
atgagtccgagaacgagcctggccgaggattcttgccttggccgacattcccctgtccctagacccgcaagccggagcagcagcccaggagctaagcgtaggcacagctgtgcagaggccctcgtcgctttgccacctggcgcatccccccagcgctccagatctccctcaccccagcctagtagccacgtggccccacaggaccacggatcaccagccggatatcctcccgtggcagggagcgccgtgataatggacgctcttaatagcctcgctaccgacagcccatgcggcatccctcccaaaatgtggaagacctcaccagacccatctcccgtgtccgcagcaccctcaaaagcgggactgccacggcacatttacccggcagtggaatttctcgggccatgtgagcagggagaaagacgtaactcggctcccgaaagcattctgttagttccacctacgtggccaaagccactcgttccagcgatcccgatctgttccatccccgtcacagcatccctgccccctttagagtggcccctgagcagccagtcaggcagctacgagctgcggatagaagtacagcctaagccccaccatagagcccactatgaaacggaaggctctcgtggggctgtcaaggctccaaccggaggtcatcctgtcgtgcagctgcatggatatatggaaaataaacccttgggcctgcaaatctttatcggaacggccgacgaacggatattgaagccacatgccttttatcaggtccatcgcatcacgggcaaaacagttacaaccacttcttatgagaagattgtggggaataccaaagttcttgaaattcctctggaaccctcgacggcaccacacctgctcagcccttttatgtttattagtcagcctggggtgcatactaggatcaacgtgtgggcactgtctggcctgagtctgaaggaactggctaccagtctctag

SEQ ID NO: 92756 - DNA, 1228 bp, Artificial Sequence
  derived and/or modified sequence
gctggtatcaagatttattggcccaagcggtgacgacagatcagagcccaggcaaatacagcaggagaccttgaaggggaggaaccttggattaccatcttgcccggtcaatatatctgaatgccaaagccctccgctctgtatatgtcctgttgggagattaaatgcgtttacacctctgctgaagcggctttttctccggtgctcagagtaacctgacggctccggccccctccagggccgctgtccttggaagccctggcccgggttttccttcgttcctcacgaccagcccccttcaagggcaccctaccacctgccagcgacgcgaggcacctgctgggctcccagggaaagtcacgctggttccagctgtgactgcagccgccaccgcattgcgccgcacgtcagcaccaaccacgtggcagcgagcctgggagccatcagattcgctgcaaatctgcggggcttcagtggtggagatttatcgtcatgccagatgcgtgtgtgtgagatacataattcctctcacacggcctcataaatccaaaagggtcagcaataaatggaaaaaaataaaaaatcacagactaatttgttcagaagactagaaggggatcaatgagaaagctgtagctcagctcaaagtttgttctgaaattgggagcatggagcaggaacacattccccactggatccaaacatctgcattctcaggtgggctgggcaggagctggtgcaaaatcagatgcatggcccgagctgggcttcctgtgcacatggtgaatggggaccctgacacaggccggccattgttaacggcacctggggctaagcagccgccccggggctggagaaggcaggctgggtccagctgctcccgggcgaggggtgtctggagaggggctcttgcctcacggcagggggcccaaagaggttctaaggggcctggggtctctcaccagagctatggggtagagggccttggcagctccgtgtgtcctgtgacctggcatcttagggctttgccacgccagctttgtgatgcctcccaccagactgcatgcataaagtctggagtatgctcctctctgaagtggaggaggcctgaggccctggacaggagaagccacatcctggaaggatcagtgctgggacacagatgtccctaaggccaacacgctgctcatcaactccgcattcaagaagagaccctcagattcaaaag

SEQ ID NO: 92757 - protein, 325 aa, Artificial Sequence
  derived and/or modified sequence
MSPRTSLAEDSCLGRHSPVPRPASRSSSPGAKRRHSCAEALVALPPGASPQRSRSPSPQPSSHVAPQDHGSPAGYPPVAGSAVIMDALNSLATDSPCGIPPKMWKTSPDPSPVSAAPSKAGLPRHIYPAVEFLGPCEQGERRNSAPESILLVPPTWPKPLVPAIPICSIPVTASLPPLEWPLSSQSGSYELRIEVQPKPHHRAHYETEGSRGAVKAPTGGHPVVQLHGYMENKPLGLQIFIGTADERILKPHAFYQVHRITGKTVTTTSYEKIVGNTKVLEIPLEPSTAPHLLSPFMFISQPGVHTRINVWALSGLSLKELATSL

SEQ ID NO: 92758 - DNA, 2190 bp, Artificial Sequence
  derived and/or modified sequence
gcgtgctaggaggcgaggcgaggggcatgcgtgctaggaggcgaggcgaggggcatgcgtgctaggaggcgaggcgaggggcatgcgtgctaggaggcgaggcgaggggcatgcgtgctaggaggcgaggcgagggccaggtgctagggctagaaaggaggcagggctggcgctctagggactcctggagctctcctcctgtgagcctggacccggcacctcacgcagcccatctcccacagcttccgtcgacggaggccggggcctcaccaggaaagtggtttgccctccaatcagtggtctgccttcattttccagattgatgaagtctgcctcagagaaggggcaataggcgaatatgaagaccttagagcagagaaccagaaaacaaaggagaagtgtgacaaaattaggcaagaacgagatgaagccgttaaaaaactggaagaatttcagaaaatttctcacatggtcatagaggaagttaatttcatgcagaaccatcttgaaatagagaagacttgtcgagaaagtgctgaagctttggcaacaaagctaaataaagaaaataaaacgttgaaaagaatcagcatgttgtacatggccaagctgggaccagatgtaataactgaagagataaacattgatgatgaagattcgactacagacacagacggtgccgccgagacttgtgtctcagtacagtgtcagaagcaaattaaagaacttcgagatcaaattgtatctgttcaggaggaaaagaagattttagccattgagctggaaaatctcaagagcaaactcgtagaagtaattgaagaagtaaataaagttaaacaagaaaagactgttttaaattcagaagttcttgaacagagaaaagtcttagaaaaatgcaatagagtgtccatgttagctgtagaagagtatgaggagatgcaagtaaacctggagctggagaaggaccttcgaaagaaagcagagtcatttgcacaagagatgttcattgagcaaaacaagctaaagagacaaagccaccttctgctgcagagctccatccctgatcagcagcttttgaaagctttagacgaaaatgcaaaactcacccagcaacttgaagaagagagaattcagcatcaacaaaaggtcaaagaattagaagagcaactagaaaatgaaacactccacaaagaaatacacaacctcaaacagcaactggagcttctagaggaagataaaaaggaattggaattgaaatatcagaattctgaagagaaagccagaaatttaaagcactctgttgatgaactccagaaacgagtgaaccagtctgagaattcagtacctccaccacctcctcctccaccaccacttccccctccacctcccaatcctatccgatccctcatgtccatgatccggaaacgatcccaccccagtggcagtggtgctaagaaagaaaaggcaactcaaccagaaacaactgaagaagtcacagatctaaagaggcaagcagttgaagagatgatggatagaattaaaaagggagttcatcttagacccgttaatcagacagccagaccgaagacaaagccagaatcttcgaaaggctgcgaaagtgcagtggatgaactaaaaggaatactggggacacttaacaaatccactagttcaagaagcttaaaatcccttgaccctgaaaacagtgaaactgagttagaaaggattttgcgtcgcagaaaggtgacagcagaagcagatagcagtagtccaactgggatattagccacctcagagtccaaatccatgccagtgttgggttctgtatccagtgtaacaaaaacagccttgaacaagaaaactctggaggcagaattcaacagcccgtcccccccaacacctgagccaggtgaagggccccgtaaattggaaggatgcacaagttccaaggttacgtttcaataatctgaatcagaaaatactgcaactccttcctccttttgtctgccttttgttctccaaaagtaagtggaaattacatttccaagaaaggaaatgaaataattgcaggcccaaggtctgcaaaatatgtgttgaattgacagtgaaaaggatccatgtgttgacagacacagttgttagatgccataaaggcagatgtgaagctcaatttatttctcatcttgcttg

SEQ ID NO: 92759 - protein, 498 aa, Artificial Sequence
  derived and/or modified sequence
MVIEEVNFMQNHLEIEKTCRESAEALATKLNKENKTLKRISMLYMAKLGPDVITEEINIDDEDSTTDTDGAAETCVSVQCQKQIKELRDQIVSVQEEKKILAIELENLKSKLVEVIEEVNKVKQEKTVLNSEVLEQRKVLEKCNRVSMLAVEEYEEMQVNLELEKDLRKKAESFAQEMFIEQNKLKRQSHLLLQSSIPDQQLLKALDENAKLTQQLEEERIQHQQKVKELEEQLENETLHKEIHNLKQQLELLEEDKKELELKYQNSEEKARNLKHSVDELQKRVNQSENSVPPPPPPPPPLPPPPPNPIRSLMSMIRKRSHPSGSGAKKEKATQPETTEEVTDLKRQAVEEMMDRIKKGVHLRPVNQTARPKTKPESSKGCESAVDELKGILGTLNKSTSSRSLKSLDPENSETELERILRRRKVTAEADSSSPTGILATSESKSMPVLGSVSSVTKTALNKKTLEAEFNSPSPPTPEPGEGPRKLEGCTSSKVTFQ

SEQ ID NO: 92760 - DNA, 1497 bp, Artificial Sequence
  derived and/or modified sequence
atggtgatcgaggaggtgaacttcatgcagaaccacctggagatcgagaagacctgcagagagagcgccgaggccctggccaccaagctgaacaaggagaacaagaccctgaagagaatcagcatgctgtacatggccaagctgggccccgacgtgatcaccgaggagatcaacatcgacgacgaggacagcaccaccgacaccgacggcgccgccgagacctgcgtgagcgtgcagtgccagaagcagatcaaggagctgagagaccagatcgtgagcgtgcaggaggagaagaagatcctggccatcgagctggagaacctgaagagcaagctggtggaggtgatcgaggaggtgaacaaggtgaagcaggagaagaccgtgctgaacagcgaggtgctggagcagagaaaggtgctggagaagtgcaacagagtgagcatgctggccgtggaggagtacgaggagatgcaggtgaacctggagctggagaaggacctgagaaagaaggccgagagcttcgcccaggagatgttcatcgagcagaacaagctgaagagacagagccacctgctgctgcagagcagcatccccgaccagcagctgctgaaggccctggacgagaacgccaagctgacccagcagctggaggaggagagaatccagcaccagcagaaggtgaaggagctggaggagcagctggagaacgagaccctgcacaaggagatccacaacctgaagcagcagctggagctgctggaggaggacaagaaggagctggagctgaagtaccagaacagcgaggagaaggccagaaacctgaagcacagcgtggacgagctgcagaagagagtgaaccagagcgagaacagcgtgcccccccccccccccccccccccccccctgcccccccccccccccaaccccatcagaagcctgatgagcatgatcagaaagagaagccaccccagcggcagcggcgccaagaaggagaaggccacccagcccgagaccaccgaggaggtgaccgacctgaagagacaggccgtggaggagatgatggacagaatcaagaagggcgtgcacctgagacccgtgaaccagaccgccagacccaagaccaagcccgagagcagcaagggctgcgagagcgccgtggacgagctgaagggcatcctgggcaccctgaacaagagcaccagcagcagaagcctgaagagcctggaccccgagaacagcgagaccgagctggagagaatcctgagaagaagaaaggtgaccgccgaggccgacagcagcagccccaccggcatcctggccaccagcgagagcaagagcatgcccgtgctgggcagcgtgagcagcgtgaccaagaccgccctgaacaagaagaccctggaggccgagttcaacagccccagcccccccacccccgagcccggcgagggccccagaaagctggagggctgcaccagcagcaaggtgaccttccagtag

SEQ ID NO: 92761 - DNA, 1497 bp, Artificial Sequence
  derived and/or modified sequence
atggtgatcgaggaagttaacttcatgcaaaaccacctggagattgaaaagacgtgtagagagtccgcagaggcccttgccacaaagctgaacaaagagaataaaaccctgaaaagaatcagtatgctttacatggcaaagctgggacccgacgtgattactgaggagattaatattgatgacgaggactctaccacagatactgatggcgctgccgagacctgtgtttctgtacagtgtcagaaacagatcaaagagttgagagaccagatcgttagtgtgcaggaagaaaagaaaatcctggccatcgaactcgaaaacttgaagagcaagctggtcgaggtcatcgaagaggtgaataaagtgaagcaagaaaagaccgtcctcaacagtgaggttctcgaacagaggaaagttttggagaagtgcaatagggttagcatgcttgccgttgaggagtacgaggagatgcaggtgaatcttgagttggagaaagacctaaggaagaaggccgagtcttttgcgcaggagatgtttattgaacagaataaactcaagcgccagtcccacttactgctccagagcagcatcccggatcaacagttactgaaagccctggacgagaatgctaagctgacacagcagttagaggaggagaggattcagcatcagcagaaagtgaaggaactggaagaacagcttgaaaacgaaacactgcacaaggagatccacaaccttaagcagcagctcgaacttctggaggaggataaaaaggagttggagctcaagtaccagaattctgaggagaaggcccgcaatctcaaacatagtgtcgacgagttacaaaagcgggtgaaccaaagcgaaaactctgtgccacctcctcctcctcctcccccccctctgccacctcccccaccaaacccgattcggtctttaatgtccatgattagaaaacgatcacacccatcaggcagtggtgcaaaaaaggagaaagctacccagcccgagaccacagaggaagtcacagatttgaagaggcaagctgtggaggaaatgatggatcgcattaagaaaggcgtgcacctgcggcctgtaaaccaaactgctaggcctaaaacaaagcccgaatcatctaaaggatgtgagagcgccgtggacgagctgaaaggcatccttggaactctcaacaagagtacgtcttcaaggagcctgaagagtcttgatcctgagaacagcgagaccgaactcgagaggattctgaggcggcggaaagtgactgccgaggccgattcttcttcccctaccgggatcctggcgactagcgagagcaaaagcatgcccgtgttaggctctgtctcttcagtgaccaagacagcactaaataagaagacactagaggccgaatttaattcgccctcaccgcctacccccgagccaggcgaaggaccccgaaaattggagggctgtacatcttctaaagtgactttccaatag

SEQ ID NO: 92762 - DNA, 1497 bp, Artificial Sequence
  derived and/or modified sequence
atggtgattgaggaggtgaacttcatgcagaaccacctggagattgagaagacctgccgggagagcgctgaggccctggccaccaagctgaacaaggagaacaagaccctgaagaggatctccatgctgtacatggccaagctgggcccagatgtgatcacagaggagatcaacattgatgatgaggacagcaccacagacacagatggagctgctgagacctgtgtgtctgtgcagtgccagaagcagatcaaggagctgcgggaccagatcgtgtctgtgcaggaggagaagaagatcctggccatcgagctggagaacctgaagagcaagctggtggaggtgattgaggaggtgaacaaggtgaagcaggagaagacagtgctgaacagcgaggtgctggagcagaggaaggtgctggagaagtgcaacagagtgtccatgctggccgtggaggagtatgaggagatgcaggtgaacctggagctggagaaggacctgaggaagaaggccgagagctttgcccaggagatgttcatcgagcagaacaagctgaagaggcagagccacctgctgctgcagagcagcatcccagaccagcagctgctgaaggccctggatgaaaatgccaagctgacccagcagctggaggaggagcgcatccagcaccagcagaaggtgaaggagctggaggagcagctggagaatgagaccctgcacaaggagatccacaacctgaagcagcagctggagctgctggaggaggacaagaaggagctggagctgaagtaccagaacagcgaggagaaggccaggaacctgaagcacagcgtggatgagctgcagaagagggtgaaccagagtgaaaattctgtgcccccacctcctcctcctcctccacccctgcccccacctccacccaaccccatccgcagcctgatgtccatgatcaggaagaggagccaccccagcggcagcggggccaagaaggagaaggccacccagcctgagaccacagaggaggtgacagacctgaagaggcaggccgtggaggagatgatggaccgcatcaagaagggcgtgcacctgcggcctgtgaaccagacagcccggcccaagaccaagccagagagcagcaagggctgtgagagcgctgtggatgagctgaagggcatcctgggcaccctgaacaagagcaccagcagccgcagcctgaagagcctggaccctgaaaattctgaaacagagctggagcgcatcctgcggcggaggaaggtgacagctgaggccgacagcagcagccccaccggcatcctggccaccagcgagagcaagtccatgcctgtgctgggctctgtgtcctctgtgaccaagacagccctgaacaagaagaccctggaggccgagttcaacagccccagcccccccaccccagagcccggggagggccccaggaagctggagggctgcaccagcagcaaggtgaccttccagtag

SEQ ID NO: 92763 - DNA, 1497 bp, Artificial Sequence
  derived and/or modified sequence
atggtgatcgaggaggtgaacttcatgcagaaccacctggagatcgagaaaacatgtcgagaaagcgccgaagcactggctactaagctcaataaagagaacaaaacacttaagaggatttcgatgctctatatggccaagcttggcccagacgtgattactgaagagattaatatagacgacgaggattctaccacagatacagatggagctgccgagacctgtgtgagtgtgcagtgccagaaacagatcaaagagctccgagatcagattgtgagtgtgcaagaagaaaaaaagatcctggccattgagctagaaaacctcaaaagtaaacttgtagaggttatagaggaagtaaataaggtgaagcaggagaagaccgtgctcaatagcgaagtccttgagcagcgcaaagttttagaaaagtgtaatagggtctcaatgcttgctgtagaggagtatgaagagatgcaggtaaaccttgagctagaaaaggatcttagaaagaaagccgagtcctttgcgcaggagatgtttattgaacagaataaattgaagagacagagtcacctattgctgcagagcagcatcccagaccagcagttgttgaaggcgctggacgagaacgcgaagcttacacaacaactggaggaggagaggatccagcatcagcagaaggtgaaggaactggaagagcaactagagaatgagaccctccataaggaaatccacaatctgaagcagcagctggaactgttggaagaggataagaaagaactcgagcttaagtaccagaatagcgaggaaaaggcccgcaacctcaagcactccgttgacgaattgcagaagagggttaatcagtccgagaacagcgtgcccccaccgcctcctccgcctcctcctttgccgccgcctccaccaaaccccatccggtccctcatgtctatgattcgcaagaggtctcatccttctggctcgggggccaagaaagagaaagccactcagcctgagaccaccgaggaagtgacggacctgaaaaggcaggccgtggaagagatgatggacaggatcaagaagggtgtacacctcaggcccgtgaaccagacagctaggcccaagactaaacccgaaagctcgaagggttgtgagtcagctgttgacgagttgaagggcattctcgggaccctaaacaagtctacaagttctcggagtctgaaaagcctggaccccgaaaactctgagacagaactggaaagaatcctgagaagacgtaaggtaacggcagaagccgactcatcctccccgacaggaattctggcaacttctgagtcaaagtctatgcctgtgctgggctctgtttcttccgtgaccaagaccgccctcaacaaaaagactttggaggctgagttcaattccccatcccccccgaccccggagcctggggagggaccaaggaagctggagggctgtacatcatctaaggtgacctttcaatag

SEQ ID NO: 92764 - DNA, 1497 bp, Artificial Sequence
  derived and/or modified sequence
atggtgatcgaagaagtgaattttatgcaaaatcacctggaaatcgagaaaacctgccgcgagtccgcggaggcactggctaccaagctaaataaagagaataaaaccttgaagagaattagtatgctttacatggccaagctgggcccagacgtcatcacagaagaaataaacatagatgacgaggacagcacaaccgacaccgatggggctgcagagacctgtgtctccgtccagtgccagaaacagattaaggagttgcgcgaccaaattgtgagtgtccaggaggaaaaaaagatcctggccatcgagctcgaaaacctcaaaagcaagctcgtagaagtcatcgaagaggttaacaaggttaaacaagagaagactgttctgaacagcgaagtgttggagcagcgaaaagtgttagaaaagtgtaatcgcgtgtctatgctggcagtggaggagtacgaagagatgcaagtcaaccttgagcttgagaaggaccttcggaaaaaggccgagtcattcgctcaggaaatgttcattgagcagaataagctcaaacggcagtcccacctgcttctgcagagctctatccccgatcagcagttgctgaaagccttggatgagaatgcaaaactgacgcagcagttggaagaggagcgaatccagcatcagcagaaggtgaaggagctggaggagcaacttgagaacgaaaccttgcacaaagaaatacacaatctcaaacagcagctggaactccttgaggaggataaaaaggagcttgaacttaaataccagaattctgaggaaaaagctaggaatctaaagcactccgtcgacgagcttcagaaacgtgtcaaccagtcagagaatagcgtgccaccgccaccccctcccccacccccactgcctcctccccctcccaatccgatcaggtctctcatgtccatgattcgtaagcgctcccatcccagcggaagtggtgccaagaaagaaaaggccacacagcccgagacaacagaggaggtcactgacctgaagcggcaggccgtggaagagatgatggatagaataaagaaaggggtgcatctgcggcctgtaaaccagactgcacgccctaaaacgaagcccgaatcatcaaaaggatgcgagtcggcagtggacgaactgaagggcattctcggtaccctcaataagtcgactagttctaggagcttgaaaagtttggatcccgagaatagcgagaccgagctggagagaattctgaggcgcaggaaagtcacggctgaagccgattcgagttccccaacaggaattcttgctacctcagaaagcaagtctatgcccgtgctggggtcagtctcttccgtgactaagactgcactcaacaagaagactttggaagctgagttcaacagcccaagcccacccaccccagagcctggcgaagggcctaggaaactcgaggggtgcacctcatcgaaagtcacttttcagtag

SEQ ID NO: 92765 - protein, 845 aa, Artificial Sequence
  derived and/or modified sequence
MGRKLDPTKEKRGPGRKARKQKGAETELVRFLPAVSDENSKRLSSRARKRAAKRRLGSVEAPKTNKSPEAKPLPGKLPKGISAGAVQTAGKKGPQSLFNAPRGKKRPAPGSDEEEEEEDSEEDGMVNHGDLWGSEDDADTVDDYGADSNSEDEEEGEAAGVQWLGLGSLQPPPPGFKQFSCLSFPSSWDLQLLPIERAARKQKAREAAAGIQWSEEETEDEEEEKEVTPESGPPKVEEADGGLQINVDEEPFVLPPAGEMEQDAQAPDLQRVHKRIQDIVGILRDFGAQREEGRSRSEYLNRLKKDLAIYYSYGDFLLGKLMDLFPLSELVEFLEANEVPRPVTLRTNTLKTRRRDLAQALINRGVNLDPLGKWSKTGLVVYDSSVPIGATPEYLAGHYMLQGASSMLPVMALAPQEHERILDMCCAPGGKTSYMAQLMKNTGVILANDANAERLKSVVGNLHRLGVTNTIISHYDGRQFPKVVGGFDRVLLDAPCSGTGVISKDPAVKTNKDEKDILRCAHLQKELLLSAIDSVNATSKTGGYLVYCTCSITVEENEWVVDYALKKRNVRLVPTGLDFGQEGFTRFRERRFHPSLRSTRRFYPHTHNMDGFFIAKFKKFSNSIPQSQTGNSETATPTNVDLPQVIPKSENSSQPAKKAKGAAKTKQQLQKQQHPKKASFQKLNGISKGADSELSTVPSVTKTQASSSFQDSSQPAGKAEGIREPKVTGKLKQRSPKLQSSKKVAFLRQNAPPKGTDTQTPAVLSPSKTQATLKPKDHHQPLGRAKGVEKQQLPEQPFEKAAFQKQNDTPKGPQPPTVSPIRSSRPPPAKRKKSQSRGNSQLLLS

SEQ ID NO: 92766 - DNA, 2538 bp, Artificial Sequence
  derived and/or modified sequence
atgggaagaaaactggatcccaccaaggagaagagggggcccgggaggaaggcccgtaaacagaagggggctgaaaccgagcttgtgcgcttccttccagctgtgtcagacgaaaattcaaagagacttagctctcgcgctcgaaagcgagcagccaaaaggcggctggggagcgtggaggcacccaagaccaacaagagtcccgaggcaaagcctctgccaggcaagctccccaagggaatctcagcgggcgcggtgcagactgctggcaagaaagggccccaaagtctgttcaatgcacccagggggaagaagaggcccgccccgggctccgacgaggaggaagaagaagaggactcagaagaagacggaatggttaatcatggggatctctggggctctgaggatgatgcagacacagtggatgattacggcgccgactctaactctgaggatgaagaggaaggcgaggcagccggggtgcagtggctggggttgggcagcctgcaaccaccaccacctggctttaagcagttctcttgtctcagtttccccagcagctgggatctccagcttttaccgattgagcgcgccgctaggaagcagaaagctagagaagccgccgccgggatccagtggagtgaggaggaaaccgaagatgaggaagaagagaaagaagtaactcctgagtcggggccccccaaagttgaagaggctgatggggggcttcagattaatgtcgacgaagagccattcgttctgcccccagccggcgagatggaacaggacgctcaggcaccagacctccagagggtgcataagcgcatccaggatatcgtaggaatcctgcgcgacttcggggctcagagggaggagggaaggtcccgctctgagtatctaaacaggctgaagaaagatcttgcaatttactattcatatggagatttcctgcttggaaagctcatggaccttttccccctaagcgaactcgtggagtttctcgaggccaatgaagtgccacgtcctgtcacccttcgaactaatactttgaaaacgcgcaggagagatttggcccaagcactgatcaacagaggagtgaatctggacccactcggtaagtggagcaaaaccggcctggtagtctacgactctagcgtgcctatcggggcgaccccagaatacctggcgggccactacatgctccagggagctagctccatgctgcctgtcatggctctagcccctcaggagcacgagcgcatcctcgacatgtgctgtgctccaggcggcaaaacttcctatatggcccagctcatgaagaatacaggggtcatcttggcgaacgacgcgaacgccgaaagactgaaatccgtggtgggcaatctgcaccggctcggagttaccaacaccatcatatcacactacgacggacggcaatttccaaaggtcgtgggaggctttgatagagttttattagatgccccatgtagcgggacaggggtgatcagcaaggatccagctgtgaagaccaataaggatgagaaggatattctgcgctgcgcccacctgcagaaagagttactgctgtccgcaattgatagtgtgaatgccacaagcaagactggcggctacttagtctattgcacctgcagtattacagtggaagagaatgagtgggtggtggactatgcacttaagaagcggaatgtgcggctggttccaacgggattagatttcggccaggaggggttcaccagatttcgggagcgtcgctttcatcccagcctgcgctccacccggcggttttacccgcatacccacaacatggatggtttcttcatcgctaagtttaagaagttctcgaatagtattccgcaatctcaaaccggcaatagcgaaactgccacccccacgaatgtagatctgccgcaagtgattcccaaaagcgagaactcctcacagccggccaagaaggcaaagggcgccgctaagaccaaacagcagctgcagaagcagcaacatcctaagaaagccagtttccagaagctgaatggcatatcaaagggtgctgactctgagttgtcaacggtgccgtcggtgaccaagacccaagctagctcttcgttccaagatagcagtcagcctgcaggcaaggccgagggcattcgagaacctaaagttaccggaaagttaaaacaacgatcgccgaaacttcagtctagtaagaaggtagcgtttttaaggcagaatgcacctcccaagggaacagacactcagacccccgcagtactgagccccagcaaaactcaggctaccctgaagcccaaagaccaccatcaacccctcgggagggccaagggggtcgagaaacagcaactgcccgaacaaccttttgagaaggcagctttccaaaaacagaatgacactccaaagggcccacaaccgccaaccgtgagccccatcaggtcatccagaccccccccagccaagcggaaaaaaagtcaatccagaggaaatagtcagctccttttgtcgtag

SEQ ID NO: 92767 - DNA, 2736 bp, Artificial Sequence
  derived and/or modified sequence
gccgaaagctaggtccggattgcacgtggagggccgcccgaagggcactctcggacattaacccgcattctgtaccatggggcgcaagttggaccctacgaaggagaagcgggggccaggccgaaaggcccggaagcagaagggtgccgagacagaactcgtcagattcttgcctgcagtaagtgacgaaaattccaagaggctgtctagtcgtgctcgaaagagggcagccaagaggagattgggctctgttgaagcccctaagacaaataagtctcctgaggccaaaccattgcctggaaagctaccaaaagggatctctgcaggagctgtccagacagctggtaagaagggaccccagtccctatttaatgctcctcgaggcaagaagcgcccagcacctggcagtgatgaggaagaggaggaggaagactctgaagaagatggtatggtgaaccacggggacctctggggctccgaggacgatgctgatacggtagatgactatggagctgactccaactctgaggatgaggaggaaggtgaagcggctggagtgcagtggctcggtcttggctcactgcaacctccacctcccgggttcaagcaattctcctgcctcagcttcccaagtagctgggatttacagttgctgcccattgaaagagctgctcggaagcagaaggcccgggaagctgctgctgggatccagtggagtgaagaggagaccgaggacgaggaggaagagaaagaagtgacccctgagtcaggccccccaaaggtggaagaggcagatgggggcctgcagatcaatgtggatgaggaaccatttgtgctgccccctgctggggagatggagcaggatgcccaggctccagacctgcaacgagttcacaagcggatccaggatattgtgggaattctgcgtgattttggggctcagcgggaggaagggcggtctcgttctgaatacctgaaccggctcaagaaggatctggccatttactactcctatggagacttcctgcttggcaagctcatggacctcttccctctgtctgagctggtggagttcttagaagctaatgaggtgcctcggcccgtcaccctccggaccaataccttgaaaacccgacgccgagaccttgcacaggctctaatcaatcgtggggttaacctggatcccctgggcaagtggtcaaagactggactagtggtgtatgattcttctgtgcccattggtgctacccccgagtacctggctgggcactacatgctgcagggagcctccagcatgttgcccgtcatggccttggcaccccaggaacatgagcggatcctggacatgtgttgtgcccctggaggaaagaccagctacatggcccagctgatgaagaacacgggtgtgatccttgccaatgacgccaatgctgagcggctcaagagtgttgtgggcaacttgcatcggctgggagtcaccaacaccattatcagccactatgatgggcgccagttccccaaggtggtggggggctttgaccgagtactgctggatgctccctgcagtggcactggggtcatctccaaggatccagccgtgaagactaacaaggatgagaaggacatcctgcgctgtgctcacctccagaaggagttgctcctgagtgctattgactctgtcaatgcgacctccaagacaggaggctacctggtttactgcacctgttctatcacagtagaagagaatgagtgggtggtagactatgctctgaaaaagaggaatgtgcgactggtgcccacgggcctagactttggccaggaaggttttacccgctttcgagaaaggcgcttccaccccagtctgcgttctacccgacgcttctaccctcatacccacaatatggatgggttcttcattgccaagttcaagaaattttccaattctatccctcagtcccagacaggaaattctgaaacagccacacctacaaatgtagacttgcctcaggtcatccccaagtctgagaacagcagccagccagccaagaaagccaagggggctgcaaagacaaagcagcagctgcagaaacagcaacatcccaagaaggcctccttccagaagctgaatggcatctccaaaggggcagactcagaattgtccactgtaccttctgtcacaaagacccaagcttcctccagcttccaggatagcagtcagccagctggaaaagccgaagggatcagggagccaaaggtgactgggaagctaaagcaacgatcacctaaattacagtcctccaagaaagttgctttcctcaggcagaatgcccctcccaagggcacagacacacaaacaccggctgtgttatccccatccaagactcaggccaccctgaaacctaaggaccatcatcagccccttggaagggccaagggggttgagaagcagcagttgccagagcagccttttgagaaagctgccttccagaaacagaatgatacccccaaggggcctcagcctcccactgtgtctcccatccgttccagccgccccccaccagcaaagaggaagaaatctcagtccaggggcaacagccagctgctgctatcttagatggttgaaaactagacgggtggctcactgccattgtcaccaggttggaactcttgcctctgtgaggatgccttctctactgtgcatacccatgaaatttaatacacattttaaaacctctg

SEQ ID NO: 92768 - DNA, 2538 bp, Artificial Sequence
  derived and/or modified sequence
atgggcaggaagctggaccccaccaaggagaagaggggccctggcaggaaggccaggaagcagaagggagctgagacagagctggtgcgcttcctgcctgctgtgtctgatgagaacagcaagaggctgagcagccgggccaggaagagagctgccaagaggcggctgggctctgtggaggcccccaagaccaacaagagccctgaggccaagcccctgcccgggaagctgcccaagggcatctctgctggagctgtgcagacagctgggaagaagggcccccagagcctcttcaatgccccccggggcaagaagaggcctgcccctggcagtgatgaggaggaggaggaggaggacagcgaggaggatggcatggtgaaccacggggacctgtggggctctgaagatgatgctgacacagtggatgattatggagctgacagcaacagtgaagatgaggaggagggggaggccgccggcgtgcagtggctgggcctgggcagcctgcagcccccacctcctggcttcaagcagttcagctgcctgtccttccccagctcctgggacctgcagctgctgcccatcgagcgggccgccaggaagcagaaggcccgggaggccgctgctggcatccagtggagcgaggaggagacagaagatgaggaggaggagaaggaggtgaccccagagagcggcccccccaaggtggaggaggctgatggcggcctgcagatcaacgtggatgaggagccctttgtgctgcccccagctggggagatggagcaggatgcccaggccccagacctgcagagggtgcacaagaggatccaggacatcgtgggcatcctgcgggactttggagcccagcgggaggagggccgcagccgctctgagtacctgaaccggctgaagaaggacctggccatctactacagctatggagacttcctgctgggcaagctgatggacctcttccccctgtctgagctggtggagttcctggaggccaatgaggtgcccaggcctgtgaccctgcggaccaacaccctgaagacccggcggcgggacctggcccaggccctgatcaacagaggagtgaacctggaccccctgggcaagtggagcaagacaggcctggtggtgtatgacagctctgtgcccatcggggccaccccagagtacctggccggccactacatgctgcagggcgccagctccatgctgcctgtgatggccctggccccccaggagcacgagcgcatcctggacatgtgctgtgcccctgggggcaagaccagctacatggcccagctgatgaagaacacaggagtcatcctggccaatgatgccaatgctgagcggctgaagtctgtggtgggcaacctgcaccggctgggcgtgaccaacaccatcatcagccactatgatggccggcagttccccaaggtggtgggcggctttgacagagtgctgctggatgccccctgcagcggcactggagtcatcagcaaggaccctgctgtgaagaccaacaaggatgagaaggacatcctgcgctgtgcccacctgcagaaggagctgctgctgagcgccatcgacagcgtgaatgccaccagcaagacaggaggctacctggtgtactgcacctgcagcatcaccgtggaggagaatgagtgggtggtggactatgccctgaagaagagaaatgtgcggctggtgcccaccggcctggactttggccaggagggcttcacccgcttccgggagcggcgcttccaccccagcctgcggagcacccggcgcttctacccccacacccacaacatggatggcttcttcatcgccaagttcaagaagttcagcaacagcatcccccagagccagacaggcaacagcgagacagccacccccaccaacgtggacctgccccaggtgatccccaagtctgagaacagcagccagcctgccaagaaggccaagggggccgccaagaccaagcagcagctgcagaagcagcagcaccccaagaaggccagcttccagaagctgaatggcatcagcaaaggagctgacagcgagctgagcacagtgcccagcgtgaccaagacccaggccagcagcagcttccaggacagcagccagcctgctgggaaggccgagggcatccgggagcccaaggtgacaggcaagctgaagcagaggagccccaagctgcagagcagcaagaaggtggccttcctgcggcagaatgccccacccaagggcacagacacccagaccccagctgtgctgagccccagcaagacccaggccaccctgaagcccaaggaccaccaccagcccctgggccgggccaagggcgtggagaagcagcagctgcctgagcagccctttgagaaggccgccttccagaagcagaatgacacccccaagggcccccagcccccaacagtgagccccatccgcagcagccggcccccaccagccaagaggaagaagagccagagccggggcaacagccagctgctgctgtcctag

SEQ ID NO: 92769 - DNA, 2538 bp, Artificial Sequence
  derived and/or modified sequence
atgggccggaagctggaccccaccaaggagaagcggggccccggcagaaaggcacgaaagcagaagggcgcagaaacagagttggtccgcttcttaccagcagtctctgatgagaactcaaaaaggttgtcatcgcgtgcaaggaagagggcggccaagaggcggctgggtagcgtcgaggcccctaaaaccaataagtctcctgaggcgaaacccttgccaggaaagcttcctaaggggattagcgccggggctgtccaaactgcaggtaaaaagggcccccagagcctattcaatgcacctaggggaaaaaagcgccccgcccccgggagcgacgaagaggaggaggaggaagacagcgaggaagatggcatggtcaaccacggggacttatggggctccgaggatgacgcagatactgttgatgactatggagctgattctaactcagaagacgaagaggagggcgaagctgccggggtgcagtggctggggctcggcagcctgcagccccctcccccggggtttaagcaattcagctgtttatccttcccatcatcctgggatctccagctcctgccaatcgagcgcgcggccagaaaacagaaagccagggaggccgccgccggaattcagtggtccgaggaggaaacagaagacgaagaagaggagaaagaggtaactccggagtcaggtccacccaaggtggaagaggcggacggcggattgcagattaacgtagatgaagaaccattcgtgctgccccctgctggggaaatggagcaggatgctcaggcccctgacctccagcgtgtgcacaaacggatccaagacatcgtgggaatcctccgggactttggcgcccagcgggaggagggcaggtcccgttcagaatacctgaacagattaaaaaaagatcttgccatctattatagttacggggatttcttattaggcaaactcatggatttatttccccttagcgagcttgtggagttccttgaagccaatgaggtgccgcggccggtgactctgaggaccaacacgttgaaaacaagaaggcgggatctcgcccaggcactgataaaccgcggagttaacctggacccactgggcaaatggagcaagaccggtctggttgtgtatgattcgagcgtgcccattggggctacccctgaatacctagccggccattatatgctgcagggagcttcgtctatgctccctgtcatggccttggcaccacaggagcatgaaagaattctggatatgtgctgtgcacctggggggaagacgagctatatggcacaactgatgaagaacacaggcgttatcctagccaatgacgctaacgccgagaggcttaagtcggtcgtgggcaatctgcacaggctgggagtgacgaacaccattatctcacactatgacggcaggcagtttccaaaagttgtcggaggatttgaccgagtgcttttagacgccccatgtagcggtaccggagtgatctccaaagaccctgctgtgaaaactaataaagatgagaaagacatcctgcggtgcgctcacctgcagaaagaactgttgttgtcggccatagattcggtgaacgcaacttccaagacagggggctacctggtctactgtacatgtagtatcacagtggaagagaatgagtgggtcgtagactatgccctaaagaagcgtaatgttcggttggtcccaacaggcctggattttggccaggaggggtttacccgctttagggaacgaagattccacccgtcactccgcagcacgcgtcgcttctatcctcacacacataacatggacggttttttcatcgctaagtttaagaaattttcaaactcaattccccagtcacaaaccggcaactcggaaacagccaccccaactaatgtcgatctccctcaagtcatccctaagagtgagaactcttcccagccagctaaaaaagctaagggtgccgcaaaaaccaagcagcagctgcaaaagcagcagcaccccaagaaagcatcattccagaagctcaatgggattagtaagggggccgatagtgaattgtctacagtgcccagcgtcacaaagactcaagcgtctagctcgttccaggactcttcccagcctgctggaaaggcggagggaatccgggagcccaaggtgacagggaagctgaagcaaaggagccccaagttacagagttccaagaaggtggccttcttacgtcagaacgcccccccgaagggcaccgatacccagacccctgcagtccttagtccctcaaagactcaggccacgctcaagcccaaagatcaccaccagcccttagggagggccaagggcgtggaaaagcaacagcttcctgagcaaccatttgagaaagcggcctttcaaaagcagaacgatacccctaagggacctcagccaccaaccgtgtctcccattcgtagctctaggccgccacccgccaagcggaagaagtcacagtctcggggcaactcccaactgctcctgagctag

SEQ ID NO: 92770 - DNA, 2538 bp, Artificial Sequence
  derived and/or modified sequence
atgggacgcaagctggatcccacaaaggagaaaagagggccaggaagaaaagcgcgtaaacaaaaaggagcagaaactgagctggttcgcttcctccctgcagtgtccgacgaaaatagcaagagattatcctctagagccagaaaaagagctgccaaaaggaggctcggtagtgttgaagcccctaagacaaacaagagccctgaggccaagcccttacctggcaaactgcctaagggcatctctgccggagccgtccaaactgctggtaagaaagggccacaatcactctttaacgctccgagggggaaaaagcggccagctcccggaagtgacgaagaggaggaagaggaggacagtgaggaggacgggatggtcaatcacggagatctttggggcagcgaggatgacgccgatacggtggacgactatggagcggatagcaatagcgaagatgaagaggagggagaggctgctggtgtgcagtggttaggcctgggcagtttacagccccctccccctgggttcaagcagttcagctgcctgagttttccctccagttgggatttgcaattgctgccaatcgagagagctgccaggaaacagaaagccagagaagccgcagctgggatccaatggagcgaggaagaaaccgaggatgaggaggaggagaaagaggttacaccagaatctggaccgccaaaagtcgaggaggccgatggcggactgcagatcaatgtcgacgaggagccatttgtgctcccacctgccggagaaatggagcaggacgcccaagcacctgacttacagcgtgtgcataaaagaattcaggatattgtagggatcttgcgcgatttcggcgctcaaagggaggaagggaggagtagaagcgaatacctcaatagactgaaaaaagacctagctatctattactcatatggagactttttactcggaaagcttatggatctctttcctctctccgagctcgtcgaattcctcgaagcaaacgaggttccacggcctgtgactcttagaactaacacactgaaaaccagacgacgcgacctcgcccaggcactgataaataggggggttaacctggatccccttggtaaatggtccaagaccggtctcgttgtgtacgacagttccgtgccaatcggagccacccccgagtatctcgctggccactatatgctgcagggcgcttcttcaatgctgccagtaatggctctggcacctcaggaacacgagaggatcttggatatgtgctgtgcacctgggggtaaaaccagctacatggctcagctgatgaagaatacaggcgtcatccttgctaatgacgctaatgccgaacgcctgaagagtgtggtgggaaatctccaccgattgggagtgactaacacaatcatcagccactacgatggacgccagtttccgaaagtcgtcggcggatttgatcgcgtgctgttggatgccccatgttccggaacaggcgtcatttccaaagatccagcagtaaaaaccaacaaggacgagaaagatattctgagatgcgcccatctgcagaaagaactgcttctctcagctatcgattccgtcaacgcaacatctaagaccggaggttatctggtgtactgtacctgtagcataactgtcgaggaaaatgagtgggtggtcgattatgctctgaagaaaaggaatgtcagactcgtgcctacggggcttgacttcggccaggaggggtttactcgcttcagggagaggaggttccacccctctttgaggtcaacgagacgattttatccccatactcacaacatggacgggttctttatcgccaagttcaaaaaattctcgaacagtataccgcagtctcaaacagggaatagtgaaaccgctacaccaaccaatgtcgacctgcctcaggtgattccaaaaagcgagaacagcagccaaccagccaaaaaggctaaaggcgctgcaaaaacaaagcaacagttacagaaacagcagcaccctaagaaagccagcttccagaaactcaacggaatttccaaaggagctgattcagaactatccaccgttccatctgtgacaaaaactcaggctagctcaagcttccaggactcgagccaacctgccggaaaggctgagggaatccgcgagcctaaggtgactggcaagctgaagcaaagatctccaaagctgcagagctccaagaaagtagctttcctccgccagaacgcccctcccaaaggaaccgatacccaaaccccagccgtacttagcccgagcaagacacaggccacccttaagccgaaggatcaccaccaacctctgggcagggccaagggagtcgagaagcagcagctgccagagcagccatttgaaaaggcagccttccaaaagcagaatgacacacccaaggggccacaacctccgactgtgtctcctattcgctcaagtcgtcctccacccgctaaaagaaagaagtcccagagcagaggcaattcacagctgctgctttcatag

SEQ ID NO: 92771 - DNA, 2538 bp, Artificial Sequence
  derived and/or modified sequence
atgggcagaaagctggaccccaccaaggagaagagaggccccggcagaaaggccagaaagcagaagggcgccgagaccgagctggtgagattcctgcccgccgtgagcgacgagaacagcaagagactgagcagcagagccagaaagagagccgccaagagaagactgggcagcgtggaggcccccaagaccaacaagagccccgaggccaagcccctgcccggcaagctgcccaagggcatcagcgccggcgccgtgcagaccgccggcaagaagggcccccagagcctgttcaacgcccccagaggcaagaagagacccgcccccggcagcgacgaggaggaggaggaggaggacagcgaggaggacggcatggtgaaccacggcgacctgtggggcagcgaggacgacgccgacaccgtggacgactacggcgccgacagcaacagcgaggacgaggaggagggcgaggccgccggcgtgcagtggctgggcctgggcagcctgcagccccccccccccggcttcaagcagttcagctgcctgagcttccccagcagctgggacctgcagctgctgcccatcgagagagccgccagaaagcagaaggccagagaggccgccgccggcatccagtggagcgaggaggagaccgaggacgaggaggaggagaaggaggtgacccccgagagcggcccccccaaggtggaggaggccgacggcggcctgcagatcaacgtggacgaggagcccttcgtgctgccccccgccggcgagatggagcaggacgcccaggcccccgacctgcagagagtgcacaagagaatccaggacatcgtgggcatcctgagagacttcggcgcccagagagaggagggcagaagcagaagcgagtacctgaacagactgaagaaggacctggccatctactacagctacggcgacttcctgctgggcaagctgatggacctgttccccctgagcgagctggtggagttcctggaggccaacgaggtgcccagacccgtgaccctgagaaccaacaccctgaagaccagaagaagagacctggcccaggccctgatcaacagaggcgtgaacctggaccccctgggcaagtggagcaagaccggcctggtggtgtacgacagcagcgtgcccatcggcgccacccccgagtacctggccggccactacatgctgcagggcgccagcagcatgctgcccgtgatggccctggccccccaggagcacgagagaatcctggacatgtgctgcgcccccggcggcaagaccagctacatggcccagctgatgaagaacaccggcgtgatcctggccaacgacgccaacgccgagagactgaagagcgtggtgggcaacctgcacagactgggcgtgaccaacaccatcatcagccactacgacggcagacagttccccaaggtggtgggcggcttcgacagagtgctgctggacgccccctgcagcggcaccggcgtgatcagcaaggaccccgccgtgaagaccaacaaggacgagaaggacatcctgagatgcgcccacctgcagaaggagctgctgctgagcgccatcgacagcgtgaacgccaccagcaagaccggcggctacctggtgtactgcacctgcagcatcaccgtggaggagaacgagtgggtggtggactacgccctgaagaagagaaacgtgagactggtgcccaccggcctggacttcggccaggagggcttcaccagattcagagagagaagattccaccccagcctgagaagcaccagaagattctacccccacacccacaacatggacggcttcttcatcgccaagttcaagaagttcagcaacagcatcccccagagccagaccggcaacagcgagaccgccacccccaccaacgtggacctgccccaggtgatccccaagagcgagaacagcagccagcccgccaagaaggccaagggcgccgccaagaccaagcagcagctgcagaagcagcagcaccccaagaaggccagcttccagaagctgaacggcatcagcaagggcgccgacagcgagctgagcaccgtgcccagcgtgaccaagacccaggccagcagcagcttccaggacagcagccagcccgccggcaaggccgagggcatcagagagcccaaggtgaccggcaagctgaagcagagaagccccaagctgcagagcagcaagaaggtggccttcctgagacagaacgccccccccaagggcaccgacacccagacccccgccgtgctgagccccagcaagacccaggccaccctgaagcccaaggaccaccaccagcccctgggcagagccaagggcgtggagaagcagcagctgcccgagcagcccttcgagaaggccgccttccagaagcagaacgacacccccaagggcccccagccccccaccgtgagccccatcagaagcagcagacccccccccgccaagagaaagaagagccagagcagaggcaacagccagctgctgctgagctag

SEQ ID NO: 92772 - protein, 628 aa, Artificial Sequence
  derived and/or modified sequence
MGRKLDPTKEKRGPGRKARKQKGAETELVRFLPAVSDENSKRLSSRARKRAAKRRLGSVEAPKTNKSPEAKPLPGKLPKGAVQTAGKKGPQSLFNAPRGKKRPAPGSDEEEEEEDSEEDGMVNHGDLWGSEDDADTVDDYGADSNSEDEEEGEALLPIERAARKQKAREAAAGIQWSEEETEDEEEEKEVTPESGPPKVEEADGGLQINVDEEPFVLPPAGEMEQDAQAPDLQRVHKRIQDIVGILRDFGAQREEGRSRSEYLNRLKKDLAIYYSYGDFLLGKLMDLFPLSELVEFLEANEVPRPVTLRTNTLKTRRRDLAQALINRGVNLDPLGKWSKTGLVVYDSSVPIGATPEYLAGHYMLQGASSMLPVMALAPQEHERILDMCCAPGGKTSYMAQLMKNTGVILANDANAERLKSVVGNLHRLGVTNTIISHYDGRQFPKVVGGFDRVLLDAPCSGTGVISKDPAVKTNKDEKDILRCAHLQKELLLSAIDSVNATSKTGGYLVYCTCSITVEENEWVVDYALKKRNVRLVPTGLDFGQEGFTRFRERRFHPSLRSTRRFYPHTHNMDGFFIAKFKKFSNSIPQSQTDGVLLCRSGWTAVVQSQLIATSTFQVQAILVPQTPK

SEQ ID NO: 92773 - DNA, 1887 bp, Artificial Sequence
  derived and/or modified sequence
atgggcaggaagttggatcctaccaaagagaaaagaggtcccggacgtaaagctcggaaacaaaaaggtgctgaaaccgaactggtgcggttccttcctgccgtgtccgacgagaatagcaagcggttaagttcccgcgcacgcaagagggccgctaagaggcgtctaggcagcgtagaggctccaaagactaataagagccccgaagcaaagcccctgcccgggaaattgcctaaaggagccgtgcaaacagcgggaaaaaagggacctcaaagcttgtttaacgccccacgcggtaagaaacgccccgcacccggatccgacgaggaggaggaggaggaggattctgaggaggacggcatggttaaccacggagacctctggggcagcgaagatgatgcagacacagttgacgattatggcgctgacagtaacagtgaggatgaagaggagggggaagcgttgctgccaatcgagagagcggcccgtaaacagaaggcacgtgaggcagccgcggggatccagtggagcgaagaagaaaccgaagacgaggaagaggagaaagaggttacgcctgagtcaggcccccccaaagttgaagaagcagacggaggtttacagattaatgtagatgaggaaccatttgtgttaccacccgccggagagatggaacaagacgcccaggcgccagatcttcagcgggtgcacaaacggatacaggacatcgttggtattcttagagacttcggcgcgcagagagaggagggccgcagccgctctgagtatctcaaccgactgaagaaggacctcgcaatttactattcctacggagattttctcctaggcaagttgatggacctctttccactgtcagagctagttgagtttctggaggctaacgaggtgccgcgtcccgtgactctgagaaccaacacgttgaaaacaagaaggagggatcttgcacaagctcttattaatcgcggcgtgaacctggatcccctcggaaaatggtccaagaccgggctagtggtctacgatagctccgtccccatcggagctactccagaatacctcgcaggccactacatgctgcagggggcgtcctctatgctaccagtgatggctctggcccctcaggagcacgagcgtatcctcgacatgtgttgtgctcctgggggcaagacatcttacatggctcagctcatgaaaaataccggtgtcatccttgcaaatgatgccaatgctgaacggctgaagtcagtcgtcggaaatcttcatcgacttggtgtcaccaatactataatatctcattacgatggccgtcagttccccaaggtggtaggcggttttgatagggtcttactggatgccccgtgctcgggcacgggggtgattagcaaggacccagctgtgaagactaacaaagacgaaaaggatatactgagatgtgcgcatcttcaaaaagagcttttgctctcggctatcgacagtgtgaacgcaacttcaaagacggggggctacctcgtgtattgcacatgcagcatcacagtagaggagaatgaatgggtcgttgattatgcattaaagaaacggaacgtgcggttggtgcccactggcttggattttggtcaggagggattcacccgattccgtgagagacggttccacccatctctgagatctacccgtcggttttacccacatacgcataacatggatggattctttatagcgaagttcaagaagttttcaaactctatccctcagtcccagacagatggtgtgctgttgtgtcggtcaggctggacagcggttgtgcagagtcaactgatcgcaacctctacttttcaagtccaggccattctagtgccacagacacccaagtag

SEQ ID NO: 92774 - DNA, 2751 bp, Artificial Sequence
  derived and/or modified sequence
gccggccgaaagctaggtccggattgcacgtggagggccgcccgaagggcactctcggacattaacccgcattctgtaccatggggcgcaagttggaccctacgaaggagaagcgggggccaggccgaaaggcccggaagcagaagggtgccgagacagaactcgtcagattcttgcctgcagtaagtgacgaaaattccaagaggctgtctagtcgtgctcgaaagagggcagccaagaggagattgggctctgttgaagcccctaagacaaataagtctcctgaggccaaaccattgcctggaaagctaccaaaaggagctgtccagacagctggtaagaagggaccccagtccctatttaatgctcctcgaggcaagaagcgcccagcacctggcagtgatgaggaagaggaggaggaagactctgaagaagatggtatggtgaaccacggggacctctggggctccgaggacgatgctgatacggtagatgactatggagctgactccaactctgaggatgaggaggaaggtgaagcgttgctgcccattgaaagagctgctcggaagcagaaggcccgggaagctgctgctgggatccagtggagtgaagaggagaccgaggacgaggaggaagagaaagaagtgacccctgagtcaggccccccaaaggtggaagaggcagatgggggcctgcagatcaatgtggatgaggaaccatttgtgctgccccctgctggggagatggagcaggatgcccaggctccagacctgcaacgagttcacaagcggatccaggatattgtgggaattctgcgtgattttggggctcagcgggaggaagggcggtctcgttctgaatacctgaaccggctcaagaaggatctggccatttactactcctatggagacttcctgcttggcaagctcatggacctcttccctctgtctgagctggtggagttcttagaagctaatgaggtgcctcggcccgtcaccctccggaccaataccttgaaaacccgacgccgagaccttgcacaggctctaatcaatcgtggggttaacctggatcccctgggcaagtggtcaaagactggactagtggtgtatgattcttctgtgcccattggtgctacccccgagtacctggctgggcactacatgctgcagggagcctccagcatgttgcccgtcatggccttggcaccccaggaacatgagcggatcctggacatgtgttgtgcccctggaggaaagaccagctacatggcccagctgatgaagaacacgggtgtgatccttgccaatgacgccaatgctgagcggctcaagagtgttgtgggcaacttgcatcggctgggagtcaccaacaccattatcagccactatgatgggcgccagttccccaaggtggtggggggctttgaccgagtactgctggatgctccctgcagtggcactggggtcatctccaaggatccagccgtgaagactaacaaggatgagaaggacatcctgcgctgtgctcacctccagaaggagttgctcctgagtgctattgactctgtcaatgcgacctccaagacaggaggctacctggtttactgcacctgttctatcacagtagaagagaatgagtgggtggtagactatgctctgaaaaagaggaatgtgcgactggtgcccacgggcctagactttggccaggaaggttttacccgctttcgagaaaggcgcttccaccccagtctgcgttctacccgacgcttctaccctcatacccacaatatggatgggttcttcattgccaagttcaagaaattttccaattctatccctcagtcccagacagacggtgtcttgctttgtcgctcaggctggactgcagtggtgcaatctcagctcattgcaacctccaccttccaggttcaagcgattcttgtgcctcagactcccaagtagctaggattacaggaaattctgaaacagccacacctacaaatgtagacttgcctcaggtcatccccaagtctgagaacagcagccagccagccaagaaagccaagggggctgcaaagacaaagcagcagctgcagaaacagcaacatcccaagaaggcctccttccagaagctgaatggcatctccaaaggggcagactcagaattgtccactgtaccttctgtcacaaagacccaagcttcctccagcttccaggatagcagtcagccagctggaaaagccgaagggatcagggagccaaaggtgactgggaagctaaagcaacgatcacctaaattacagtcctccaagaaagttgctttcctcaggcagaatgcccctcccaagggcacagacacacaaacaccggctgtgttatccccatccaagactcaggccaccctgaaacctaaggaccatcatcagccccttggaagggccaagggggttgagaagcagcagttgccagagcagccttttgagaaagctgccttccagaaacagaatgatacccccaaggggcctcagcctcccactgtgtctcccatccgttccagccgccccccaccagcaaagaggaagaaatctcagtccaggggcaacagccagctgctgctatcttagatggttgaaaactagacgggtggctcactgccattgtcaccaggttggaactcttgcctctgtgaggatgccttctctactgtgcatacccatgaaatttaatacacattttaaaacctctg

SEQ ID NO: 92775 - DNA, 1887 bp, Artificial Sequence
  derived and/or modified sequence
atgggcaggaagctggaccccaccaaggagaagaggggccctggcaggaaggccaggaagcagaagggagctgagacagagctggtgcgcttcctgcctgctgtgtctgatgagaacagcaagaggctgagcagccgggccaggaagagagctgccaagaggcggctgggctctgtggaggcccccaagaccaacaagagccctgaggccaagcccctgcccgggaagctgcccaagggagctgtgcagacagctgggaagaagggcccccagagcctcttcaatgccccccggggcaagaagaggcctgcccctggcagtgatgaggaggaggaggaggaggacagcgaggaggatggcatggtgaaccacggggacctgtggggctctgaagatgatgctgacacagtggatgattatggagctgacagcaacagtgaagatgaggaggagggggaggccctgctgcccatcgagagagctgccaggaagcagaaggcccgggaggccgccgccggcatccagtggagcgaggaggagacagaagatgaggaggaggagaaggaggtgaccccagagagcggcccccccaaggtggaggaggctgatggcggcctgcagatcaacgtggatgaggagccctttgtgctgcccccagctggggagatggagcaggatgcccaggccccagacctgcagagggtgcacaagaggatccaggacatcgtgggcatcctgcgggactttggagcccagcgggaggagggccgcagccgctctgagtacctgaaccggctgaagaaggacctggccatctactacagctatggagacttcctgctgggcaagctgatggacctcttccccctgtctgagctggtggagttcctggaggccaatgaggtgcccaggcctgtgaccctgcggaccaacaccctgaagaccaggagaagagacctggcccaggccctgatcaacagaggagtgaacctggaccccctgggcaagtggagcaagacaggcctggtggtgtatgacagctctgtgcccatcggggccaccccagagtacctggccggccactacatgctgcagggcgccagctccatgctgcctgtgatggccctggccccccaggagcacgagcgcatcctggacatgtgctgtgcccctgggggcaagaccagctacatggcccagctgatgaagaacacaggagtcatcctggccaatgatgccaatgctgagcggctgaagtctgtggtgggcaacctgcaccggctgggcgtgaccaacaccatcatcagccactatgatggccggcagttccccaaggtggtgggcggctttgacagagtgctgctggatgccccctgcagcggcaccggggtcatcagcaaggaccctgctgtgaagaccaacaaggatgagaaggacatcctgcgctgtgcccacctgcagaaggagctgctgctgagcgccattgattctgtgaatgccaccagcaagacaggaggctacctggtgtactgcacctgcagcatcaccgtggaggagaatgagtgggtggtggactatgccctgaagaagagaaatgtgcggctggtgcccaccggcctggactttggccaggagggcttcacccgcttccgggagcggcgcttccaccccagcctgcggagcacccggcgcttctacccccacacccacaacatggatggcttcttcatcgccaagttcaagaagttcagcaacagcatcccccagagccagacagatggagtgctgctgtgccgcagcggctggacagctgtggtgcagagccagctgattgccaccagcaccttccaggtgcaggccatcctggtgccccagacccccaagtag

SEQ ID NO: 92776 - DNA, 1887 bp, Artificial Sequence
  derived and/or modified sequence
atgggccggaagctggaccccaccaaggagaagcggggccccggccggaaggctcgaaaacagaaaggcgccgagacagagctggtgagattcctgcccgctgtgagtgacgagaacagcaaacggctgtcgtctcgcgctcgtaagcgcgcagcgaaaaggagattgggatccgtcgaggcacccaagaccaataaatcccccgaagccaagccgctccccggaaagctgccaaaaggcgcagtgcagactgccggcaaaaaaggcccacagagtctgttcaacgctccaagaggcaaaaagaggcccgctccaggatcagacgaggaggaagaagaagaggactccgaggaggacggcatggtgaaccatggcgacctttggggctcagaggatgatgccgacacggttgatgactacggagccgattctaactcagaagacgaagaggagggagaggccttgctacctatagaaagggccgcaaggaaacagaaggcacgcgaagcagccgctggcatacagtggtcagaagaggagaccgaggacgaggaggaggaaaaggaggtgacgccagaaagtggcccacccaaagttgaagaggccgacggaggactccagattaacgtagatgaagagccattcgtgctgcctccagcaggcgagatggagcaggatgctcaggctcccgatctgcagcgtgtgcacaaacgcattcaggatattgtgggaatcctccgtgatttcggcgcacagcgggaggaaggacggagcagatctgaatacctgaatagactcaaaaaggacctggccatatactacagctatggggacttccttctcggcaagctaatggacctgttcccactgagtgaacttgtcgagtttctagaggcgaacgaagttccacggcctgtcactctcagaacaaacaccctaaagaccagaagacgagatttagctcaagctcttatcaaccgtggtgtcaatctggaccctctcggtaaatggtccaagactggtctggtggtctatgactcctcagtccctattggtgccacgcccgaatacctggcgggccattatatgttacagggggccagtagcatgctgccggtgatggctcttgcgcctcaggagcacgagaggattctggatatgtgttgtgcgcccggtggtaaaacgagctatatggctcagctgatgaagaacaccggagtcattctggctaacgacgcaaacgccgaacggcttaagtcagtcgtcggaaatcttcaccggcttggcgtgaccaatactatcatctcccactacgatggtcgacagttccctaaggtggtgggaggcttcgacagagtgctgctggatgcgccctgttccggaacgggcgtgatcagtaaggaccctgccgttaagaccaacaaagacgagaaggacattcttcgctgtgcacacttgcagaaggaactcttgctcagtgcaatagattccgtgaacgcaaccagcaagacaggaggatatcttgtctactgtacatgttctataacagtggaggagaatgaatgggtcgtagattacgcattgaagaagagaaatgttcggctcgtccctaccggtctggatttcggccaagagggctttactaggttccgtgagcggaggttccaccctagtctgcgaagtacacggagattctacccacacacacacaatatggacggattcttcatcgctaagttcaagaaattttccaactctatcccacagtcccagactgatggtgtgctcctgtgccgtagcggttggaccgcagtggtgcagtcacagcttattgccacctctacttttcaagtgcaggccattctggttcctcagactccaaagtag

SEQ ID NO: 92777 - DNA, 1887 bp, Artificial Sequence
  derived and/or modified sequence
atgggccgtaaacttgatcctacaaaagaaaagaggggccctggcaggaaggcccgaaagcagaaaggagccgaaactgagttggtgcgcttccttcctgcagtctctgatgaaaactccaagaggctcagttctcgcgcacgtaaacgagcggcaaagcgtaggctgggatccgtcgaagctcccaaaactaataagtctccggaggccaaaccgctccccggaaagctgcctaaaggggctgtccaaacggctgggaagaagggaccccagagcttgtttaacgccccacgcggtaaaaaaaggccggcacctggcagcgatgaggaggaggaagaggaagactccgaagaagacggtatggtgaatcacggcgacctgtggggcagcgaagacgatgccgatactgtggatgactacggtgccgactccaattctgaagacgaagaggaaggcgaggctttgttaccaatcgaaagagctgcccgaaagcagaaagcaagagaggccgctgccggaatccaatggtcagaggaagaaacagaagatgaagaagaagaaaaggaggtgactccagagtcgggacctcccaaggtggaagaggctgatggcggactgcagattaacgttgacgaagagccattcgtattgccgccagccggtgagatggaacaagatgctcaggctcctgaccttcagcgcgttcacaagcggatccaagacatagtgggcattctgagagattttggagcccaacgagaggagggcaggtccagatccgagtatcttaacagattgaagaaggatttggctatctattatagctacggagactttctgctgggcaaacttatggacctcttccccctttcagaactggtcgagttcctcgaggccaatgaagtccctagaccagtaaccctccgcacaaataccctgaaaacaagaaggagagatcttgcacaggctctcattaatcggggtgtcaacttggatcctctggggaagtggtcaaagacaggtctggtggtttacgacagcagcgtccccatcggcgctaccccagaatatctcgcgggacactatatgctccagggagccagttccatgctccctgttatggcgttggctcctcaggagcatgagcggatcttggacatgtgttgcgccccaggaggcaaaacgagttatatggctcagttaatgaaaaacactggcgtgattctcgccaacgacgcaaacgctgaacggttgaagtctgtcgttgggaatctccacaggctgggtgtcaccaacacaataatctcccactacgatggccgacagttcccaaaggtggtcggagggtttgatcgcgtactgctagacgctccttgtagcggaaccggtgttattagcaaagatccggctgtgaaaaccaataaggacgaaaaggacatcctgcgatgcgcacacttgcaaaaagaactactgctctctgcgattgactctgttaacgcaacatccaagaccgggggttacctggtgtattgtacatgttccatcaccgtcgaggagaacgaatgggtcgtggactacgcactgaaaaaacggaatgtccgcttggtacccactggtctggatttcgggcaggagggcttcactagatttagagaacgtcggtttcatccgtccttacggtccactagacgattctacccccatactcacaatatggatggcttcttcatcgctaaattcaagaagttctccaactctatcccccaatcccagacagacggtgtactgttatgtaggtctgggtggacggccgtggtccaatctcagctgattgccacaagtactttccaagtacaggcaattctggtgccacagacacctaagtag

SEQ ID NO: 92778 - DNA, 1887 bp, Artificial Sequence
  derived and/or modified sequence
atgggcagaaagctggaccccaccaaggagaagagaggccccggcagaaaggccagaaagcagaagggcgccgagaccgagctggtgagattcctgcccgccgtgagcgacgagaacagcaagagactgagcagcagagccagaaagagagccgccaagagaagactgggcagcgtggaggcccccaagaccaacaagagccccgaggccaagcccctgcccggcaagctgcccaagggcgccgtgcagaccgccggcaagaagggcccccagagcctgttcaacgcccccagaggcaagaagagacccgcccccggcagcgacgaggaggaggaggaggaggacagcgaggaggacggcatggtgaaccacggcgacctgtggggcagcgaggacgacgccgacaccgtggacgactacggcgccgacagcaacagcgaggacgaggaggagggcgaggccctgctgcccatcgagagagccgccagaaagcagaaggccagagaggccgccgccggcatccagtggagcgaggaggagaccgaggacgaggaggaggagaaggaggtgacccccgagagcggcccccccaaggtggaggaggccgacggcggcctgcagatcaacgtggacgaggagcccttcgtgctgccccccgccggcgagatggagcaggacgcccaggcccccgacctgcagagagtgcacaagagaatccaggacatcgtgggcatcctgagagacttcggcgcccagagagaggagggcagaagcagaagcgagtacctgaacagactgaagaaggacctggccatctactacagctacggcgacttcctgctgggcaagctgatggacctgttccccctgagcgagctggtggagttcctggaggccaacgaggtgcccagacccgtgaccctgagaaccaacaccctgaagaccagaagaagagacctggcccaggccctgatcaacagaggcgtgaacctggaccccctgggcaagtggagcaagaccggcctggtggtgtacgacagcagcgtgcccatcggcgccacccccgagtacctggccggccactacatgctgcagggcgccagcagcatgctgcccgtgatggccctggccccccaggagcacgagagaatcctggacatgtgctgcgcccccggcggcaagaccagctacatggcccagctgatgaagaacaccggcgtgatcctggccaacgacgccaacgccgagagactgaagagcgtggtgggcaacctgcacagactgggcgtgaccaacaccatcatcagccactacgacggcagacagttccccaaggtggtgggcggcttcgacagagtgctgctggacgccccctgcagcggcaccggcgtgatcagcaaggaccccgccgtgaagaccaacaaggacgagaaggacatcctgagatgcgcccacctgcagaaggagctgctgctgagcgccatcgacagcgtgaacgccaccagcaagaccggcggctacctggtgtactgcacctgcagcatcaccgtggaggagaacgagtgggtggtggactacgccctgaagaagagaaacgtgagactggtgcccaccggcctggacttcggccaggagggcttcaccagattcagagagagaagattccaccccagcctgagaagcaccagaagattctacccccacacccacaacatggacggcttcttcatcgccaagttcaagaagttcagcaacagcatcccccagagccagaccgacggcgtgctgctgtgcagaagcggctggaccgccgtggtgcagagccagctgatcgccaccagcaccttccaggtgcaggccatcctggtgccccagacccccaagtag

SEQ ID NO: 92779 - protein, 554 aa, Artificial Sequence
  derived and/or modified sequence
MPDYRTRALFVQSTLGDSAGPELQLLSIVPGRDLQPSDSFTASSSPPPSVWSELEHIRGKSEATTELKRPSLPGSIHSCLCGVWCGVGKRTPSSLVSSLQDLELLGQRQRQLWMESTPRPPYNPFLVPCTPVGKLSAEHGGPTRKMPPSASAVDFFQLFVPDNVLKNMVVQTNMYAKKFQERFGSDGAWVEVTLTEMKAFLGYMISTSISHCESVLSIWSGGFYSNRSLALVMSQARFEKILKYFHVVAFRSSQTTHGLYKVQPFLDSLQNSFDSAFRPSQTQVLHEPLIDEDPVFIATCTERELRKRKKRKFSLWVRQCSSTGFIIQIYVHLKEGGGPDGLDALKNKPQLHSMVARSLCRNAAGKNYIIFTGPSITSLTLFEEFEKQGIYCCGLLRARKSDCTGLPLSMLTNPATPPARGQYQIKMKGNMSLICWYNKGHFRFLTNAYSPVQQGVIIKRKSGEIPCPLAVEAFAAHLSYICRYDDKYSKYFISHKPNKTWQQVFWFAISIAINNAYILYKMSDAYHVKRYSRAQFGERLVRELLGLEDASPTH

SEQ ID NO: 92780 - protein, 455 aa, Artificial Sequence
  derived and/or modified sequence
MPDYRTRALFVQSTLGDSAGPELQLLSIVPGRDLQPSDSFTGPTRKMPPSASAVDFFQLFVPDNVLKNMVVQTNMYAKKFQERFGSDGAWVEVTLTEMKAFLGYMISTSISHCESVLSIWSGGFYSNRSLALVMSQARFEKILKYFHVVAFRSSQTTHGLYKVQPFLDSLQNSFDSAFRPSQTQVLHEPLIDEDPVFIATCTERELRKRKKRKFSLWVRQCSSTGFIIQIYVHLKEGGGPDGLDALKNKPQLHSMVARSLCRNAAGKNYIIFTGPSITSLTLFEEFEKQGIYCCGLLRARKSDCTGLPLSMLTNPATPPARGQYQIKMKGNMSLICWYNKGHFRFLTNAYSPVQQGVIIKRKSGEIPCPLAVEAFAAHLSYICRYDDKYSKYFISHKPNKTWQQVFWFAISIAINNAYILYKMSDAYHVKRYSRAQFGERLVRELLGLEDASPTH

SEQ ID NO: 92781 - DNA, 1665 bp, Artificial Sequence
  derived and/or modified sequence
atgcccgactacagaaccagagccctgttcgtgcagagcaccctgggcgacagcgccggccccgagctgcagctgctgagcatcgtgcccggcagagacctgcagcccagcgacagcttcaccgccagcagcagccccccccccagcgtgtggagcgagctggagcacatcagaggcaagagcgaggccaccaccgagctgaagagacccagcctgcccggcagcatccacagctgcctgtgcggcgtgtggtgcggcgtgggcaagagaacccccagcagcctggtgagcagcctgcaggacctggagctgctgggccagagacagagacagctgtggatggagagcacccccagacccccctacaaccccttcctggtgccctgcacccccgtgggcaagctgagcgccgagcacggcggccccaccagaaagatgccccccagcgccagcgccgtggacttcttccagctgttcgtgcccgacaacgtgctgaagaacatggtggtgcagaccaacatgtacgccaagaagttccaggagagattcggcagcgacggcgcctgggtggaggtgaccctgaccgagatgaaggccttcctgggctacatgatcagcaccagcatcagccactgcgagagcgtgctgagcatctggagcggcggcttctacagcaacagaagcctggccctggtgatgagccaggccagattcgagaagatcctgaagtacttccacgtggtggccttcagaagcagccagaccacccacggcctgtacaaggtgcagcccttcctggacagcctgcagaacagcttcgacagcgccttcagacccagccagacccaggtgctgcacgagcccctgatcgacgaggaccccgtgttcatcgccacctgcaccgagagagagctgagaaagagaaagaagagaaagttcagcctgtgggtgagacagtgcagcagcaccggcttcatcatccagatctacgtgcacctgaaggagggcggcggccccgacggcctggacgccctgaagaacaagccccagctgcacagcatggtggccagaagcctgtgcagaaacgccgccggcaagaactacatcatcttcaccggccccagcatcaccagcctgaccctgttcgaggagttcgagaagcagggcatctactgctgcggcctgctgagagccagaaagagcgactgcaccggcctgcccctgagcatgctgaccaaccccgccaccccccccgccagaggccagtaccagatcaagatgaagggcaacatgagcctgatctgctggtacaacaagggccacttcagattcctgaccaacgcctacagccccgtgcagcagggcgtgatcatcaagagaaagagcggcgagatcccctgccccctggccgtggaggccttcgccgcccacctgagctacatctgcagatacgacgacaagtacagcaagtacttcatcagccacaagcccaacaagacctggcagcaggtgttctggttcgccatcagcatcgccatcaacaacgcctacatcctgtacaagatgagcgacgcctaccacgtgaagagatacagcagagcccagttcggcgagagactggtgagagagctgctgggcctggaggacgccagccccacccactag

SEQ ID NO: 92782 - DNA, 1368 bp, Artificial Sequence
  derived and/or modified sequence
atgcccgactacagaaccagagccctgttcgtgcagagcaccctgggcgacagcgccggccccgagctgcagctgctgagcatcgtgcccggcagagacctgcagcccagcgacagcttcaccggccccaccagaaagatgccccccagcgccagcgccgtggacttcttccagctgttcgtgcccgacaacgtgctgaagaacatggtggtgcagaccaacatgtacgccaagaagttccaggagagattcggcagcgacggcgcctgggtggaggtgaccctgaccgagatgaaggccttcctgggctacatgatcagcaccagcatcagccactgcgagagcgtgctgagcatctggagcggcggcttctacagcaacagaagcctggccctggtgatgagccaggccagattcgagaagatcctgaagtacttccacgtggtggccttcagaagcagccagaccacccacggcctgtacaaggtgcagcccttcctggacagcctgcagaacagcttcgacagcgccttcagacccagccagacccaggtgctgcacgagcccctgatcgacgaggaccccgtgttcatcgccacctgcaccgagagagagctgagaaagagaaagaagagaaagttcagcctgtgggtgagacagtgcagcagcaccggcttcatcatccagatctacgtgcacctgaaggagggcggcggccccgacggcctggacgccctgaagaacaagccccagctgcacagcatggtggccagaagcctgtgcagaaacgccgccggcaagaactacatcatcttcaccggccccagcatcaccagcctgaccctgttcgaggagttcgagaagcagggcatctactgctgcggcctgctgagagccagaaagagcgactgcaccggcctgcccctgagcatgctgaccaaccccgccaccccccccgccagaggccagtaccagatcaagatgaagggcaacatgagcctgatctgctggtacaacaagggccacttcagattcctgaccaacgcctacagccccgtgcagcagggcgtgatcatcaagagaaagagcggcgagatcccctgccccctggccgtggaggccttcgccgcccacctgagctacatctgcagatacgacgacaagtacagcaagtacttcatcagccacaagcccaacaagacctggcagcaggtgttctggttcgccatcagcatcgccatcaacaacgcctacatcctgtacaagatgagcgacgcctaccacgtgaagagatacagcagagcccagttcggcgagagactggtgagagagctgctgggcctggaggacgccagccccacccactag

SEQ ID NO: 92783 - DNA, 1665 bp, Artificial Sequence
  derived and/or modified sequence
atgcctgattataggacacgcgccctcttcgtgcagtccacactgggtgactccgcaggcccagaactacagttactctccatagtgcctggaagagacctccagccatctgattcctttactgctagctcatccccacccccatccgtttggtccgaactggagcacatcagaggtaaaagcgaggccaccacagaattgaagcgcccgtcattgcctgggtctattcactcttgcctatgcggagtgtggtgcggcgtgggtaaaaggaccccatctagtcttgtgtcatcgttgcaggacttagagctcttgggtcagcgacagcggcaattgtggatggaaagcactcctcggccgccctacaacccgttcttggtgccatgcaccccggtcggtaaactttccgctgagcatggtgggccaacgaggaaaatgccgccctccgccagtgccgtggacttttttcagctgtttgtgcccgataacgtgctgaaaaacatggtcgtgcaaacaaacatgtacgctaagaaattccaggaacgattcggaagtgacggagcttgggtcgaggtcaccttgaccgaaatgaaggcatttttgggatacatgatttctaccagtatctctcattgtgagagcgttctgtctatttggagtggcgggttctattcaaaccggagcctggctttggtaatgagtcaggcacgctttgaaaagattctcaagtacttccatgttgtggcctttaggagctcccagactactcatgggctttataaagtacagccgtttctcgactctttgcagaatagttttgattcagctttcaggcccagccaaacccaggtgctgcacgagccattaattgacgaggatcccgtcttcatagcgacctgcacagagcgcgagcttcggaagcggaaaaaacgaaagttctctctgtgggtgcggcagtgctcttctactgggtttataatccaaatctatgtgcacttgaaagaagggggggggcctgacggcctcgacgccctcaaaaacaagcctcagctgcattctatggtagcgaggtccttatgcaggaatgcggccggcaagaactatataatctttaccgggcctagcatcacatcgctgacacttttcgaagaatttgagaagcagggcatttactgttgtgggctcttacgagcaaggaaaagcgactgtactggcctcccgctgagcatgctgacaaatcctgctacaccaccggctcgcggccaataccaaataaagatgaaaggcaatatgtctcttatttgctggtataataaggggcacttccgattcttgactaatgcctatagccccgtgcagcagggggtgatcatcaagcgaaaatcaggcgaaattccttgccctctggcggtggaggcttttgccgcacacctttcttacatatgtcgatacgatgataaatactctaaatactttatctcccacaaaccaaataagacatggcagcaggtattttggttcgcgatcagtatcgccatcaacaacgcatacattctgtataaaatgagcgacgcctaccatgttaaacgatacagccgcgcccagttcggtgaaaggctggttcgggagctgctgggccttgaggatgcttctcctacccattag

SEQ ID NO: 92784 - DNA, 1368 bp, Artificial Sequence
  derived and/or modified sequence
atgcccgactaccgcaccagagctctcttcgtgcagtccaccctcggggattctgccggcccagagctccagctgttaagtatcgtgcccggtcgagatcttcaaccgagcgacagcttcactggtccaactcgcaaaatgcccccctccgcctccgcagtagacttcttccagctgttcgtgccagacaacgtgctcaaaaacatggtggtccaaacgaacatgtatgcaaaaaagttccaggaacggttcgggagcgatggtgcctgggtggaggttaccttaacggaaatgaaggcttttctgggttacatgatttcaacttctatctcgcactgcgagagcgtgctgagcatttggtccggcggtttttatagtaatcggagtctcgcactggtgatgtcgcaagcacgcttcgaaaaaattctgaaatacttccacgttgtggcatttcgatcaagccagaccacacatggcctgtataaggtgcagcctttcttggacagtctccagaacagcttcgactctgcttttcgcccatcccagacacaggtcctgcacgaaccacttatcgacgaagatcccgtctttatcgcaacatgcaccgagcgggaacttaggaagagaaaaaaacgcaaattcagcctgtgggtgaggcaatgtagctcaacgggatttattattcagatatatgtacatctcaaagagggcggcgggccagacgggctggacgccttgaagaacaagccacagttgcacagtatggtggccaggtcattatgcagaaatgccgctggaaaaaactacattatctttaccggaccatctatcaccagtcttactctttttgaggagtttgaaaagcagggcatttactgctgtggcttgctgagagccagaaagagtgactgtaccggcctgcctttgagcatgctgacgaaccctgccacaccaccggctcgtggtcagtaccaaattaaaatgaagggcaacatgagcttgatttgctggtataataaaggccattttcgcttcctgacgaacgcttactcaccagttcagcagggggtaattataaaacgtaagtcaggtgagattccgtgtcccttagccgtggaggcttttgctgcccatctaagctatatatgtcggtatgatgataagtacagcaagtattttatttctcacaaacccaataagacatggcaacaagtgttttggtttgctatctcaatagcgatcaataacgcttacatcctttataaaatgagcgacgcataccacgtgaagaggtacagccgagctcaattcggggaacgtttagtgcgggaattgctaggactggaagatgcctcccctacccattag

SEQ ID NO: 92785 - DNA, 1665 bp, Artificial Sequence
  derived and/or modified sequence
atgccagactaccgcacccgggccctgtttgtgcagagcaccctgggggacagcgctggccctgagctgcagctgctgagcatcgtgcccggccgggacctgcagcccagcgacagcttcaccgccagcagcagccccccaccttctgtgtggagcgagctggagcacatccggggcaagtctgaggccaccacagagctgaagaggcccagcctgcccggcagcatccacagctgcctgtgtggggtgtggtgtggggtgggcaagaggacccccagcagcctggtgagcagcctgcaggacctggagctgctgggccagaggcagaggcagctgtggatggagagcaccccccggcccccctacaaccccttcctggtgccctgcacccctgtgggcaagctgtctgctgagcacggcggccccaccaggaagatgcctccttctgccagcgctgtggacttcttccagctgtttgtgcctgacaacgtgctgaagaacatggtggtgcagaccaacatgtatgccaagaagttccaggagagatttggaagtgatggagcctgggtggaggtgaccctgacagagatgaaggccttcctgggctacatgatcagcaccagcatcagccactgtgagagcgtgctgagcatctggagcggcggcttctacagcaacagaagcctggccctggtgatgagccaggccaggtttgagaagatcctgaagtacttccacgtggtggccttccgcagcagccagaccacccacggcctgtacaaggtgcagcccttcctggacagcctgcagaacagctttgattctgccttccggcccagccagacccaggtgctgcacgagcccctgattgatgaggaccccgtcttcatcgccacctgcacagagcgggagctgaggaagaggaagaagaggaagttcagcctgtgggtgcggcagtgcagcagcacaggcttcatcatccagatctacgtgcacctgaaggagggcggcggcccagatggcctggatgccctgaagaacaagccccagctgcacagcatggtggcccggagcctgtgcagaaatgctgctgggaagaactacatcatcttcaccggccccagcatcaccagcctgaccctgtttgaggagtttgagaagcagggcatctactgctgcggcctgctgcgggccaggaagagtgactgcaccggcctgcccctgtccatgctgaccaacccagccaccccaccagcccggggccagtaccagatcaagatgaagggcaacatgagcctcatctgctggtacaacaagggccacttccgcttcctgaccaatgcctacagccctgtgcagcagggcgtcatcatcaagaggaagagcggggagatcccctgccccctggccgtggaggcctttgctgcccacctgagctacatctgccgctatgatgacaagtacagcaagtacttcatcagccacaagcccaacaagacctggcagcaggtgttctggtttgccatcagcatcgccatcaacaatgcctacatcctgtacaagatgtctgatgcctaccacgtgaagcgctacagccgggcccagtttggagagcggctggtgcgggagctgctgggcctggaggatgccagccccacccactag

SEQ ID NO: 92786 - DNA, 1368 bp, Artificial Sequence
  derived and/or modified sequence
atgccagactaccgcacccgggccctgtttgtgcagagcaccctgggggacagcgctggccctgagctgcagctgctgagcatcgtgcccggccgggacctgcagcccagcgacagcttcaccggccccaccaggaagatgccacccagcgccagcgctgtggacttcttccagctgtttgtgcctgacaacgtgctgaagaacatggtggtgcagaccaacatgtatgccaagaagttccaggagcgcttcggcagtgatggagcctgggtggaggtgaccctgacagagatgaaggccttcctgggctacatgatcagcaccagcatcagccactgtgagagcgtgctgagcatctggagcggcggcttctacagcaacagaagcctggccctggtgatgagccaggccaggtttgagaagatcctgaagtacttccacgtggtggccttccgcagcagccagaccacccacggcctgtacaaggtgcagcccttcctggacagcctgcagaacagctttgacagcgccttccggcccagccagacccaggtgctgcacgagcccctgattgatgaagatcctgtgttcatcgccacctgcacagagcgggagctgaggaagaggaagaagaggaagttcagcctgtgggtgcggcagtgcagcagcacaggcttcatcatccagatctacgtgcacctgaaggagggcggcggcccagatggcctggatgccctgaagaacaagccccagctgcacagcatggtggcccggagcctgtgcagaaatgctgctgggaagaactacatcatcttcaccggccccagcatcaccagcctgaccctgtttgaggagtttgagaagcagggcatctactgctgcggcctgctgcgggccaggaagagtgactgcaccggcctgcccctgtccatgctgaccaacccagccaccccaccagcccggggccagtaccagatcaagatgaagggcaacatgagcctcatctgctggtacaacaagggccacttccgcttcctgaccaatgcctacagccctgtgcagcagggcgtcatcatcaagaggaagtctggagagatcccctgccccctggccgtggaggcctttgctgcccacctgagctacatctgccgctatgatgacaagtacagcaagtacttcatcagccacaagcccaacaagacctggcagcaggtgttctggtttgccatcagcatcgccatcaacaatgcctacatcctgtacaagatgtctgatgcctaccacgtgaagcgctacagccgggcccagtttggagagcggctggtgcgggagctgctgggcctggaggatgccagccccacccactag

SEQ ID NO: 92787 - DNA, 1665 bp, Artificial Sequence
  derived and/or modified sequence
atgcccgactaccggacccgggccctgttcgtgcagagcaccctgggcgattcggcaggacccgagctccagttactatccatcgtgcctggccgtgacctacagccatcggacagctttaccgctagctcatccccgcccccatccgtttggtccgaactcgaacacattagaggaaaatcagaagccacaacagaactgaaaagaccctctctgcccggctccatccattcctgtctatgtggtgtatggtgtggggttggcaagagaacaccaagcagcctggtgagttcactgcaggacctggagcttctgggccaacggcaacgacagctatggatggaaagcacacccaggcctccttacaatccgtttctcgtcccttgcacaccagtcgggaaattgtctgcggagcatggcggcccaaccaggaaaatgcctccttccgccagcgctgtggacttctttcagcttttcgtgcctgataatgtgctgaagaacatggtggtgcagacaaacatgtacgctaagaagttccaagaacggtttgggagtgatggcgcctgggtagaagtgactctgacggagatgaaggctttcctggggtacatgatctcgacatcaatctcacactgcgagtcagtgctttccatctggtctggtggtttttattctaacagatctctcgctctagtgatgagccaggccaggttcgagaagatcttgaaatacttccacgtggtggcattcagatctagccagaccactcacggtctttataaggtgcagccatttttggattctttgcagaacagcttcgatagtgcctttcggccttcgcagacacaggttttacacgagccactaatagatgaggatccggtgtttattgcaacttgcacagaaagagagctgaggaaaagaaaaaagaggaaattttctttgtgggtgcggcagtgttccagcacgggcttcattatacagatctacgtccatctcaaagagggtggcggacctgacggtctggatgcactgaagaataaaccccagctccatagcatggttgcacggagtctttgtcgcaacgccgcaggcaaaaactatatcatcttcaccgggccaagcatcacgagcttaactttatttgaggaattcgagaagcaggggatctactgctgtggattactgcgtgctaggaagagcgattgcacaggtctccctttgtcgatgctcacaaacccagctactcctccagcccgcggtcagtaccaaattaaaatgaagggcaatatgagtctgatctgttggtataacaaggggcatttcaggttcttgaccaacgcgtactccccggtgcagcaaggagtcattattaaacggaagagtggtgaaatcccttgtccactggctgtcgaagccttcgccgcacacctctcctacatatgtagatacgatgataaatattccaagtacttcatctctcacaaacctaacaaaacctggcagcaggtgttttggttcgcaatctctatcgctattaacaacgcgtacatcctttataagatgagcgacgcctaccacgtcaagcggtacagccgggcccagttcggcgagcgtttggtaagagagttgctgggcttggaggatgctagccctacccactag

SEQ ID NO: 92788 - DNA, 1368 bp, Artificial Sequence
  derived and/or modified sequence
atgcccgactaccggacccgggccctgttcgtgcagagcaccctgggagactcagcggggccggagctgcagctcctcagtatcgtcccgggacgcgaccttcaaccatccgactcattcactggcccaacacggaagatgcctcccagtgcatcagctgtggatttcttccagctattcgtgcctgacaatgtgctgaaaaacatggtcgtccaaactaatatgtacgcaaagaagtttcaggagcgcttcgggagtgatggtgcctgggtggaagtgaccctgacggaaatgaaggcatttttgggctacatgattagcaccagtatttctcactgcgaatccgtgttgtctatctggtctgggggcttctacagtaatcgcagtctggcattggtgatgtcacaagcccgctttgagaaaatcctgaagtactttcacgtcgtggccttcaggagtagtcagacgacacacgggttatataaggtccagcctttcctcgacagtcttcagaactcgtttgacagtgcgtttagaccctcacagacccaggtgcttcacgaaccactgatcgacgaggaccctgtgtttattgcgacctgcaccgagcgcgaactgcggaagcggaaaaagagaaagttttccctgtgggtgcggcaatgcagttctacagggttcattatacagatctatgtgcatctcaaagaaggcggcggacccgatgggctggatgctctaaaaaataagccccagctgcattccatggtggcccgttccctctgccggaacgcagccggcaagaactacatcatcttcactgggcccagcatcaccagcctaacccttttcgaggagttcgagaagcaagggatttattgttgcgggcttcttcgagcgagaaagagcgactgcacgggtctgcctctctcaatgctgactaacccggccacaccccccgcgcgcggacaatatcagataaagatgaaaggaaatatgagtctcatctgctggtacaataagggccatttccgttttctaactaacgcctatagcccggttcagcagggggttattataaaacgaaagagcggcgaaattccctgcccacttgccgtcgaggcgttcgccgctcacttgtcttacatatgcagatacgacgacaaatattctaagtatttcatcagccacaaaccgaacaagacatggcagcaggtgttctggttcgccattagcattgccatcaataatgcatatattctgtacaagatgtcagacgcatatcacgttaagagatatagcagggctcaatttggcgagaggctggtacgtgaattgctcggacttgaggatgcatcccccacgcattag

SEQ ID NO: 92789 - DNA, 3443 bp, Artificial Sequence
  derived and/or modified sequence
atgcctgactacagaactcgagctctcttcgtgcaaagtactctcggggactctgcaggacctgagctgcagttgctcagcatagtgcccggccgggatctgcagccaagcgattcattcacagcctcctcctcaccaccaccatctgtgtggtcagaacttgagcacatccgtggaaaatcagaagcaaccacagagctaaaaagacccagccttccagggagtattcattcctgcctatgtggggtgtggtgtggcgtggggaagagaacccccagctccttggtgtccagcttgcaggaccttgagctccttggccagaggcagcgacagctgtggatggagtcgacgcctcggccgccctataatccattcctcgtgccctgcacacccgtggggaaactcagtgcagagcatggaggtcccacccgaaagatgccccccagcgccagtgccgtggacttcttccagctctttgtcccagacaacgtcctcaagaacatggtggtgcagacaaacatgtatgccaagaagttccaggagcggtttgggagcgacggagcctgggtggaggtgacgctgacggagatgaaggcgttcctgggctacatgatctccaccagcatctcccactgcgagtccgtcctcagcatctggagcggaggcttctacagcaaccgcagcctcgccctcgtcatgagccaggcccgcttcgagaagatcctcaagtacttccacgtcgtggccttccgctccagccagaccacgcacgggctctacaaggtccagcccttcctcgactccctgcagaacagcttcgactctgccttcaggccttcccaaacccaggtgctacatgaacccctgatcgatgaggatcctgtattcattgccacgtgcacagagcgggagctgcgaaagaggaaaaagcggaaattcagcctctgggtcagacaatgttcttccactggcttcatcatccagatttatgtccacctgaaggaaggtgggggcccagatggcctggatgcgctgaagaataagccccagctccacagcatggtggccaggagcctgtgccggaacgcggcaggcaagaactacatcattttcacggggcccagcatcaccagcctgacgctgtttgaagagtttgagaagcaagggatttactgctgcggcttgctccgcgcgcggaagagtgactgcaccggcctcccactgtccatgctgaccaacccagccacacccccggcccggggccagtaccaaatcaagatgaaggggaacatgtccttgatctgctggtacaacaaaggacacttccgcttcctgaccaacgcctactccccggtgcagcagggagtcatcatcaaaaggaagagtggggagatcccatgccccttggccgtggaggcgtttgccgctcacctgagctacatctgcagatacgatgacaaatacagcaagtatttcatttctcataaaccaaacaagacctggcagcaggtgttctggttcgccatcagcatcgccatcaacaatgcctacatcctgtacaaaatgtcagacgcctaccacgtgaagaggtacagccgggcgcagtttggagagagactcgtcagagagctgctgggcttggaggatgcctctccgacccactgatgctgggggcgcaggactcggtcaagggaggggcaagaggaggaggagagcctgccgttccaacttgcccatcagagacccggacacggcctggtgtgtggcttgctgcctgggagggatgcacagggcctctggagggacaggatggacctggtcagaggacggttgctgtcctcatttgcattccaagaagagcatgtcctccctcgagaaacagtgccgccggtgtgatgagcacttacacccacgttctcaagggcagattctctcatgacatccgtggagcttgcgaggcagcgtggactggtgactgtgaaggaaggcccccgtggtagaatgagctggagcacgctctaagagagatgcctgcttcctaaagatctacagcaatctgggacgtggttcaagttcaagacttgaaggaagcaaagacgccctgcatggttacaatggctcaggtgtcaggggaggccggagggttttccagcatttgcctcatgccagcacctttgaaccggtctcttagaagaagacacacatcctgggtgtacagtggtgaaatggggagtgggtgcccattctgaaaaacgaggcattcctgctcattccctctgcttagctggtgggcaggggagagagggaaatgccaaaaacttggagtgaaggatgatgctattttttatttttaaatatatcttcaggttattttcttactgttgcttcagatctaatgtaaaaggcagatgtcccctcctctccacccccgacgctgaccccggcctcagtcacggctctttgcatgatcacagttctgtgttctggcctgtggcagggccgggaagggccgctggcttccgaacagacgtggttgctctccacgaggcgcatggggagcccgcgggccctaagctttgtcgcagatgtcatcattggcagaattacttgtcttgaaaaataagtagcattgctgaaacacacaaccgaattctctacgatggccatttgctcattgtctttcctctgtgtgtagtgagtgaccctggcagtgtttgcctgctcagagtggcccctcagaacaacagggctggccttggaaaaaccccaaaacaggactgtggtgacaactctggtcaggtgtgatttgacatgagggccggaggcggttgctgacggcaggactggagaggctgcgtgcccggcactggcagcgaggctcgtgtgtcccccaggcagatctgggcactttcccaacccaggtttatgcgtctccagggaagcctcggtgccagagtggtgggcagatctgaccatccccacagaccagaaacaaggaatttctgggattacccagtcccccttcaacccagttgatgtaaccacctcattttttacaaatacagaatctattctactcaggctatgggcctcgtcctcactcagttattgcgagtgttgctgtccgcatgctccgggccccacgtggctcctgtgctctagatcatggtgactcccccgccctgtggttggaatcgatgccacggattgcaggccaaatttcagatcgtgtttccaaacacccttgctgtgccctttaatgggattgaaagcacttttaccacatggagaaatatatttttaatttgtgatgcttttctacaaggtccactatttctgagtttaatgtgtttccaacacttaaggagactctaatgaaagctgatgaattttcttttctgtccaaacaagtaaaataaaaataaaagtctatttagatgttg

SEQ ID NO: 92790 - DNA, 1569 bp, Artificial Sequence
  derived and/or modified sequence
gggcacctgttcggtaggtcagatatgcctgactacagaactcgagctctcttcgtgcaaagtactctcggggactctgcaggacctgagctgcagttgctcagcatagtgcccggccgggatctgcagccaagcgattcattcacaggtcccacccgaaagatgccccccagcgccagtgccgtggacttcttccagctctttgtcccagacaacgtcctcaagaacatggtggtgcagacaaacatgtatgccaagaagttccaggagcggtttgggagcgacggagcctgggtggaggtgacgctgacggagatgaaggcgttcctgggctacatgatctccaccagcatctcccactgcgagtccgtcctcagcatctggagcggaggcttctacagcaaccgcagcctcgccctcgtcatgagccaggcccgcttcgagaagatcctcaagtacttccacgtcgtggccttccgctccagccagaccacgcacgggctctacaaggtccagcccttcctcgactccctgcagaacagcttcgactctgccttcaggccttcccaaacccaggtgctacatgaacccctgatcgatgaggatcctgtattcattgccacgtgcacagagcgggagctgcgaaagaggaaaaagcggaaattcagcctctgggtcagacaatgttcttccactggcttcatcatccagatttatgtccacctgaaggaaggtgggggcccagatggcctggatgcgctgaagaataagccccagctccacagcatggtggccaggagcctgtgccggaacgcggcaggcaagaactacatcattttcacggggcccagcatcaccagcctgacgctgtttgaagagtttgagaagcaagggatttactgctgcggcttgctccgcgcgcggaagagtgactgcaccggcctcccactgtccatgctgaccaacccagccacacccccggcccggggccagtaccaaatcaagatgaaggggaacatgtccttgatctgctggtacaacaaaggacacttccgcttcctgaccaacgcctactccccggtgcagcagggagtcatcatcaaaaggaagagtggggagatcccatgccccttggccgtggaggcgtttgccgctcacctgagctacatctgcagatacgatgacaaatacagcaagtatttcatttctcataaaccaaacaagacctggcagcaggtgttctggttcgccatcagcatcgccatcaacaatgcctacatcctgtacaaaatgtcagacgcctaccacgtgaagaggtacagccgggcgcagtttggagagagactcgtcagagagctgctgggcttggaggatgcctctccgacccactgatgctgggggcgcaggactcggtcaagggaggggcaagaggaggaggagagcctgccgttccaacttgcccatcagagacccggacacggcctggtgtgtggcttgctgcctgggagggatgcacagggcctctggagggacaggatggacctggtcagaggacggttgctgtcctca

SEQ ID NO: 92791 - DNA, 1665 bp, Artificial Sequence
  derived and/or modified sequence
atgccagattacaggactagggctctgtttgtgcagtccaccctgggcgattcagccggacctgagctccagctgctatccatcgttccgggaagagacctacagccaagcgactcctttactgctagttcaagcccgccaccgtccgtctggagcgagctggaacatattaggggtaaatccgaggccactactgagctgaaacgcccttctctgccaggaagtatacattcttgcctatgcggagtctggtgtggggtggggaagcgcacaccatcatccttggtgtcctcccttcaggacctggaactcttgggccagcgccagcggcagctgtggatggagtctactcctcgccctccctataaccccttcttggtgccttgcacacctgtcgggaagctttcggctgaacacggcggacccactcggaagatgccgccatccgcatccgccgttgacttttttcagctgtttgttcctgacaatgttttgaaaaacatggtggtacagaccaatatgtacgcgaagaagtttcaggaacggttcggatcagatggagcctgggtagaagtcacactgaccgaaatgaaggcatttcttggatacatgatctcaacctctatttctcattgcgagtccgttctgtcaatctggtccggtggtttctactctaaccgctctcttgccctggtgatgagccaggccagatttgagaaaattttaaagtacttccatgtggtggcgttccggagctcacaaacgactcacgggctgtataaagtccaaccatttctcgacagcctgcagaattcttttgactccgcattccggccaagtcagactcaggtcctccacgagcccctgattgatgaggacccagtttttattgccacatgtacagagagagagttgaggaaacgtaagaaacgaaagtttagcctttgggtccggcagtgtagctccactggtttcatcatccagatctacgtacatctcaaagagggcggtggcccagacgggttggacgctctgaaaaataaaccccaactgcactcaatggtggcaagatcactctgtcggaatgctgcgggtaagaattacattatcttcacgggaccttccataacatctctcacgctgtttgaagagtttgaaaagcagggcatctattgttgtggcctgctgagagcgaggaaatccgattgtacaggactcccactctccatgctcacaaatcccgctacgcccccagcgcgaggccagtaccagatcaagatgaaaggcaatatgagcctgatctgttggtataacaaaggccatttcaggtttctaacgaacgcttacagccctgtccagcagggagtaattatcaagcgaaaaagcggggagatcccctgtccactcgcagtggaggctttcgctgcccacctgagctatatttgccgctacgatgataaatacagtaaatacttcataagccataaacctaacaagacatggcagcaggtcttctggtttgcgatcagtatcgccatcaataatgcgtacatcctgtacaagatgagcgatgcttatcatgtaaaaaggtactcccgcgctcagttcggcgaacgactggtacgggagctgttagggctggaggacgcctctccgacacattag

SEQ ID NO: 92792 - DNA, 1368 bp, Artificial Sequence
  derived and/or modified sequence
atgccagattaccgcactcgcgctctgtttgtgcaatctaccctcggcgactcagccggtcctgagctccagctactcagcattgtgccaggacgcgatctgcaaccttctgattcattcacggggcctacgcggaagatgcccccttctgcttcagcagtggactttttccagctcttcgttccagataacgtgttaaagaacatggtcgtccagaccaacatgtatgccaagaaatttcaggagcgtttcggctctgacggcgcatgggtggaggtgacactgactgagatgaaggcatttctggggtacatgatttctacgtcaatctcgcattgtgagtctgtgctcagcatttggtccggcggtttctactccaaccgtagtctggcccttgtcatgagccaggctcgcttcgagaaaattctcaagtatttccacgtcgttgccttcagaagctctcagaccacccatggactctacaaggtacaaccatttttagattcactgcagaattcttttgatagtgcattccgaccttctcagacacaggttctccatgagcctctcatcgatgaagacccggtgtttatcgccacatgcacagagagagagcttaggaagaggaaaaagcggaaattctctttgtgggtcaggcagtgcagttcaacaggattcattatccagatatacgttcacctcaaggagggcggagggccagatggacttgacgctctgaaaaataagccacagttgcattcgatggtcgctcgcagcctgtgtaggaatgccgcaggcaagaattatatcatatttacaggcccatccataacgtccttgactctgttcgaggagtttgaaaagcaggggatctactgctgtggcctgttaagggccaggaagagcgattgcactggtctgccactgtccatgctgaccaacccagctacccctcctgcccgaggccagtaccagataaagatgaaaggtaacatgtccctgatctgctggtacaacaaaggtcacttccgcttcctcaccaatgcctattcacccgtccagcagggggtgatcattaagcggaagtccggagagatcccatgcccgctagccgtcgaagcctttgcagctcacctctcctacatctgtcggtacgatgataagtatagtaagtactttatctctcacaagccgaataaaacttggcagcaggtgttctggttcgccattagtatcgctatcaataacgcatacattttgtataagatgagcgatgcttaccacgtgaagcggtatagtcgcgcacagttcggagagagattagttagagagcttctgggccttgaagatgcaagcccgacccactag

SEQ ID NO: 92793 - protein, 545 aa, Artificial Sequence
  derived and/or modified sequence
MGSSATEIEELENTTFKYLTGEQTEKMWQRLKGILRCLVKQLERGDVNVVDLKKNIEYAASVLEAVYIDETRRLLDTEDELSDIQTDSVPSEVRDWLASTFTRKMGMTKKKPEEKPKFRSIVHAVQAGIFVERMYRKTYHMVGLAYPAAVIVTLKDVDKWSFDVFALNEASGEHSLKFMIYELFTRYDLINRFKIPVSCLITFAEALEVGYSKYKNPYHNLIHAADVTQTVHYIMLHTGIMHWLTELEILAMVFAAAIHDYEHTGTTNNFHIQTRSDVAILYNDRSVLENHHVSAAYRLMQEEEMNILINLSKDDWRDLRNLVIEMVLSTDMSGHFQQIKNIRNSLQQPEGIDRAKTMSLILHAADISHPAKSWKLHYRWTMALMEEFFLQGDKEAELGLPFSPLCDRKSTMVAQSQIGFIDFIVEPTFSLLTDSTEKIVIPLIEEASKAETSSYVASSSTTIVGLHIADALRRSNTKGSMSDGSYSPDYSLAAVDLKSFKNNLVDIIQQNKERWKELAAQGESDLHKNSEDLVNAEEKHDETHS

SEQ ID NO: 92794 - protein, 529 aa, Artificial Sequence
  derived and/or modified sequence
MDDHVTIRKKHLQRPIFRLRCLVKQLERGDVNVVDLKKNIEYAASVLEAVYIDETRRLLDTEDELSDIQTDSVPSEVRDWLASTFTRKMGMTKKKPEEKPKFRSIVHAVQAGIFVERMYRKTYHMVGLAYPAAVIVTLKDVDKWSFDVFALNEASGEHSLKFMIYELFTRYDLINRFKIPVSCLITFAEALEVGYSKYKNPYHNLIHAADVTQTVHYIMLHTGIMHWLTELEILAMVFAAAIHDYEHTGTTNNFHIQTRSDVAILYNDRSVLENHHVSAAYRLMQEEEMNILINLSKDDWRDLRNLVIEMVLSTDMSGHFQQIKNIRNSLQQPEGIDRAKTMSLILHAADISHPAKSWKLHYRWTMALMEEFFLQGDKEAELGLPFSPLCDRKSTMVAQSQIGFIDFIVEPTFSLLTDSTEKIVIPLIEEASKAETSSYVASSSTTIVGLHIADALRRSNTKGSMSDGSYSPDYSLAAVDLKSFKNNLVDIIQQNKERWKELAAQGESDLHKNSEDLVNAEEKHDETHS

SEQ ID NO: 92795 - protein, 552 aa, Artificial Sequence
  derived and/or modified sequence
MGSSATEIEELENTTFKYLTGEQTEKMWQRLKGILRCLVKQLERGDVNVVDLKKNIEYAASVLEAVYIDETRRLLDTEDELSDIQTDSVPSEVRDWLASTFTRKMGMTKKKPEEKPKFRSIVHAVQAGIFVERMYRKTYHMVGLAYPAAVIVTLKDVDKWSFDVFALNEASGEHSLKFMIYELFTRYDLINRFKIPVSCLITFAEALEVGYSKYKNPYHNLIHAADVTQTVHYIMLHTGIMHWLTELEILAMVFAAAIHDYEHTGTTNNFHIQTRSDVAILYNDRSVLENHHVSAAYRLMQEEEMNILINLSKDDWRDLRNLVIEMVLSTDMSGHFQQIKNIRNSLQQPEGIDRAKTMSLILHAADISHPAKSWKLHYRWTMALMEEFFLQGDKEAELGLPFSPLCDRKSTMVAQSQIGFIDFIVEPTFSLLTDSTEKIVIPLIEEASKAETSSYVASSSTTIVGLHIADALRRSNTKGSMSDGSYSPDYSLAAVDLKSFKNNLVDIIQQNKERWKELAAQGSVVYEALLPSLSVFTSPLRVWITSSRFLLL

SEQ ID NO: 92796 - protein, 441 aa, Artificial Sequence
  derived and/or modified sequence
MGMTKKKPEEKPKFRSIVHAVQAGIFVERMYRKTYHMVGLAYPAAVIVTLKDVDKWSFDVFALNEASGEHSLKFMIYELFTRYDLINRFKIPVSCLITFAEALEVGYSKYKNPYHNLIHAADVTQTVHYIMLHTGIMHWLTELEILAMVFAAAIHDYEHTGTTNNFHIQTRSDVAILYNDRSVLENHHVSAAYRLMQEEEMNILINLSKDDWRDLRNLVIEMVLSTDMSGHFQQIKNIRNSLQQPEGIDRAKTMSLILHAADISHPAKSWKLHYRWTMALMEEFFLQGDKEAELGLPFSPLCDRKSTMVAQSQIGFIDFIVEPTFSLLTDSTEKIVIPLIEEASKAETSSYVASSSTTIVGLHIADALRRSNTKGSMSDGSYSPDYSLAAVDLKSFKNNLVDIIQQNKERWKELAAQGESDLHKNSEDLVNAEEKHDETHS

SEQ ID NO: 92797 - DNA, 4885 bp, Artificial Sequence
  derived and/or modified sequence
ggtgaggtggtgagcagtggatatatgcctgtcaaagtcaatagcaaatctgtcagagtcttccctcagctttgtacatcagcactgttttgatagataagagaggctactgtataagtgtgtaagatttgtaatggactgaggaatgcttgttctagctgctgaaactgactgtaactgtattgtcttaggagcatcatcatggggtctagtgccacagagattgaagaattggaaaacaccacttttaagtatcttacaggagaacagactgaaaaaatgtggcagcgcctgaaaggaatactaagatgcttggtgaagcagctggaaagaggtgatgttaacgtcgtcgacttaaagaagaatattgaatatgcggcatctgtgctggaagcagtttatatcgatgaaacaagaagacttctggatactgaagatgagctcagtgacattcagactgactcagtcccatctgaagtccgggactggttggcttctacctttacacggaaaatggggatgacaaaaaagaaacctgaggaaaaaccaaaatttcggagcattgtgcatgctgttcaagctggaatttttgtggaaagaatgtaccgaaaaacatatcatatggttggtttggcatatccagcagctgtcatcgtaacattaaaggatgttgataaatggtctttcgatgtatttgccctaaatgaagcaagtggagagcatagtctgaagtttatgatttatgaactgtttaccagatatgatcttatcaaccgtttcaagattcctgtttcttgcctaatcacctttgcagaagctttagaagttggttacagcaagtacaaaaatccatatcacaatttgattcatgcagctgatgtcactcaaactgtgcattacataatgcttcatacaggtatcatgcactggctcactgaactggaaattttagcaatggtctttgctgctgccattcatgattatgagcatacagggacaacaaacaactttcacattcagacaaggtcagatgttgccattttgtataatgatcgctctgtccttgagaatcaccacgtgagtgcagcttatcgacttatgcaagaagaagaaatgaatatcttgataaatttatccaaagatgactggagggatcttcggaacctagtgattgaaatggttttatctacagacatgtcaggtcacttccagcaaattaaaaatataagaaacagtttgcagcagcctgaagggattgacagagccaaaaccatgtccctgattctccacgcagcagacatcagccacccagccaaatcctggaagctgcattatcggtggaccatggccctaatggaggagtttttcctgcagggagataaagaagctgaattagggcttccattttccccactttgtgatcggaagtcaaccatggtggcccagtcacaaataggtttcatcgatttcatagtagagccaacattttctcttctgacagactcaacagagaaaattgttattcctcttatagaggaagcctcaaaagccgaaacttcttcctatgtggcaagcagctcaaccaccattgtggggttacacattgctgatgcactaagacgatcaaatacaaaaggctccatgagtgatgggtcctattccccagactactcccttgcagcagtggacctgaagagtttcaagaacaacctggtggacatcattcagcagaacaaagagaggtggaaagagttagctgcacaaggtgaatctgatcttcataagaactcagaagacttagtaaatgctgaagaaaaacatgatgagacacattcataggcccgaaacaccttaaagacttctgtcattttaaacatgagaggacaatgaaatcagcatgaaaacatcctaaattctcaactttccacaaagctatggctcttctttcaacatagaattggattgggccattttaattgactcctatacaaggaattaagaagaacataaattttgagctagtaactctggccaaataaatacactcaagtttttatcagagtttttggccagtgcttctgccatttttttccctccacaatttggccttcttcaatcaagccagataaatttttgagacaaaagtcagacagtttttaatttttcttgctttgaaccctgtcataatgactgtgcaatacatgtgcagaagatgaggtattttaaaatttacttccttgcactgtcttacacagagtgctataactataaatttttcaaggtcttaaataaaaggaagcaaaaacaaaattattgaaaaattttttttgttgtgctggggaatatactatttagattgtccttcttattttaaatgcatgggaacagaatgacaggtgggatgctgaggagctggttgaagcatcagagcaatgctacagtccaacaatggagcattagatccccagctaggtgacctgatgaacacctttgtaaactctcatactgggaaatggcagtgaaacctttttctgaacccgtggaccagcctgcgtccgtccccatggtttcaaagcacgaatgcattacctccatggttgtggttacaagcaagtcacatgctatctacagttcatgataacaagaccgtcaaccattgctggagacagacactagaatggaaaatgaaatttgccagcgggatgtttatcccatcagaatgtaacaaaatatattaccagccaagagataagagacaagaatgtgtgtgtgtgtgtgtgtgtgtgtgtgtgtgtgttcaaaaatgtctatgaaaatgaaaacccacacttttctgtacagataacattatttgatgtgacttttatattttactacacagaaacaaactgcagccctcagaggccctgcttccttgtcatgttttgcctgagcatgtgcaaagtctttcctttgcttaaagctgaaaaactacctttatgcattgttagctgacaagaaagatcaagcacaattagatgttgtaacttttcactgtacaagcattgcaatgattgtgagcttcagtgaatttatctttgtgaaaggtaaaaattggctggaaagaatcaggagtagccataaattaaatcatgcaaaggaggatccatgcatcctaacaagttttctgctgcatctgcttccttcctgggctccacaatgttaagcaatattttagaaaagggtacaattggaagcttttaagcctgagtggtgagattttataactcacaacttagatctcttttaatgtgtaagccatattctatatgcatatttattatgcatcattgtaatttaagatatatttggatgtaggctgtataaatgcttttaattgttctgtgaatagatccttagctttagtttcacctgaatcttgtgcaaaacacagctaaataattgaattgtattatagacattatgaggtaattgatcttttaaatgtaaggagtaagattgatctataataatgtgctggggaaaacatttatagatatgtacatcatggttactttttgtcctttcaaatggactttttatttctatttatggagagactgtaactactgcttttaatgtctttttaaagcaagctatttaccagcttgaaaatatcatgcatttaaaatagaatctatctggggagtctaattactattgttcctatttgagccagttgtctttcagtaaagctatagaatctctcaaagaagtaaatagaaatactacttcttaaatgtcataggaagcatatccactttgtttctattagtactttaagatctataagaccttattactaaaaagtagaggaatataaagaattcatcaatttctgtatatgggctttaacctaattttccaggttatgcgacttataaagcactgtgaccaaacttccagagacagtaaaaaaaaaaaaaagaaaaaaaagttttactccttcagaagtattgtcatgctactgctgtacttattttcctaatctctctctatctgctatactccctccttttctttctttttcttttaagcttttatatttattccttcctttgttttcctctctgtaagacagctactactgagcactaattagtagaaagtcagagtggaggttatctgtgcatgtctttctgcaaacattactgttgaggccatctgaagagagggattgataggttaggctgttgcaccgtgaatgtcctgctttgcatttttaacctcagctccccaacatatatatcttgcagtttatatgccttttcatttaaccgaaacctcttttatttaatttttaacataacaacctacaattcttgtgtttttattatgctgtatttttctgtgtttcttattacatgtgattgctaaataaatcatatttgagggaaaacattgtgaaacatttggtgttttatgcaattcaatttagtgaggcattgaaaagttggagaaattgggggaaacccaaaggagaccaacttaaaaattgatatgagtttggtaagaaagtgctttttgttccattaaataaatactgattgaattacttattattatacctattattcataagctcctggctggaagcatggtgcatatatgcatatggcaatatttcctctagaaatttcaagtcttataaaggagataatctacacagactgtaatttatacctaataactagaatgccacataaaaaagtaaccagttgcaaataaaatgcacctatgtatatttgaggaggtaaaaaactgcttctgtcttcagagctttcaggactaagtggtgcatcagttggcatttagtaaataaaaacaagtttataaacattgccta

SEQ ID NO: 92798 - protein, 519 aa, Artificial Sequence
  derived and/or modified sequence
MDDHVTIRKKHLQRPIFRLRCLVKQLERGDVNVVDLKKNIEYAASVLEAVYIDETRRLLDTEDELSDIQTDSVPSEVRDWLASTFTRKMGMTKKKPEEKPKFRSIVHAVQAGIFVERMYRKTYHMVGLAYPAAVIVTLKDVDKWSFDVFALNEASGEHSLKFMIYELFTRYDLINRFKIPVSCLITFAEALEVGYSKYKNPYHNLIHAADVTQTVHYIMLHTGIMHWLTELEILAMVFAAAIHDYEHTGTTNNFHIQTRSDVAILYNDRSVLENHHVSAAYRLMQEEEMNILINLSKDDWRDLRNLVIEMVLSTDMSGHFQQIKNIRNSLQQPEGIDRAKTMSLILHAADISHPAKSWKLHYRWTMALMEEFFLQGDKEAELGLPFSPLCDRKSTMVAQSQIGFIDFIVEPTFSLLTDSTEKIVIPLIEEASKAETSSYVASSSTTIVGLHIADALRRSNTKGSMSDGSYSPDYSLAAVDLKSFKNNLVDIIQQNKERWKELAAQEARTSSQKCEFIHQ

SEQ ID NO: 92799 - DNA, 1560 bp, Artificial Sequence
  derived and/or modified sequence
atggatgatcacgtgactattagaaagaaacatctgcagaggccaatcttccgactccggtgtctggtcaagcagttagagagaggcgacgtgaatgtagtagatctgaaaaagaacattgaatacgctgcttccgtactagaagcagtgtacatcgatgaaaccaggcgcctactggatactgaggacgaattatccgacatccagaccgactcagtaccatctgaggttcgtgactggcttgccagcactttcacccggaagatgggcatgaccaaaaagaaaccagaggagaaacctaagtttagatcgatcgtgcacgctgttcaagccggcatttttgttgaaagaatgtaccgaaagacttaccatatggtcggcctggcatatcccgcagccgttatagtgacactgaaagacgtcgataagtggtcatttgatgtgttcgctctgaacgaggcctcgggtgagcactcattaaaattcatgatttacgagctatttaccaggtacgatctaataaatcgcttcaagatcccagttagttgtctcatcactttcgccgaggcactggaagtagggtattccaaatataaaaacccctatcacaacttaatccatgctgccgatgttactcagaccgttcactatattatgctgcacaccggaatcatgcattggcttacagagcttgagattctggccatggtatttgccgctgctatccatgactatgagcataccggaacgacaaacaactttcatatccagacacgatccgacgtggccatcctatacaatgatcgtagcgtactggagaatcaccatgtgagcgctgcgtaccggctgatgcaagaggaggagatgaacatcctaatcaacctaagcaaggacgattggcgagacctcagaaacctcgtcattgaaatggttctgagtacagacatgtcagggcattttcagcagattaaaaacatccggaacagcttgcagcaacctgaaggtattgatcgggccaagacaatgagtctcatcctgcatgccgccgacatttcccacccggccaaatcctggaaactgcattataggtggaccatggcattgatggaagagttcttcctccagggagacaaagaggccgaactcggtctccctttctccccactgtgcgaccgaaagtccaccatggtagcccagtcacagatcgggtttatcgatttcatcgttgaacccacgttttctctgcttacagatagtacggagaagattgtgatccccctgattgaggaggccagtaaggccgagacatccagctacgtagcaagttcttctactaccatcgtaggcttacacattgccgatgccctaaggcgtagtaacactaagggctctatgtcggatggcagctactcccctgactatagcttggcggccgtggatctgaagagctttaaaaacaatctcgtggatatcattcagcagaacaaagagcgctggaaagaactggctgcacaggaggccagaaccagcagccagaaatgcgagtttattcaccagtag

SEQ ID NO: 92800 - DNA, 1560 bp, Artificial Sequence
  derived and/or modified sequence
atggatgaccacgtgaccatcaggaagaagcacctgcagaggcccatcttccggctgcgctgcctggtgaagcagctggagagaggagatgtgaatgtggtggacctgaagaagaacatcgagtatgctgcctctgtgctggaggccgtgtacattgatgagacccggcggctgctggacacagaagatgagctgagtgacatccagacagacagcgtgcccagcgaggtgcgggactggctggccagcaccttcaccaggaagatgggcatgaccaagaagaagccagaggagaagcccaagttccgcagcatcgtgcatgctgtgcaggccggcatctttgtggagaggatgtacaggaagacctaccacatggtgggcctggcctacccagctgctgtgattgtgaccctgaaggatgtggacaagtggagctttgatgtgtttgccctgaatgaggccagcggggagcacagcctgaagttcatgatctatgagctgttcaccaggtatgacctgatcaaccgcttcaagatccctgtgtcctgcctgatcacctttgctgaggccctggaggtgggctacagcaagtacaagaacccctaccacaacctgattcatgctgctgatgtgacccagacagtgcactacatcatgctgcacacaggcatcatgcactggctgacagagctggagatcctggccatggtgtttgctgctgccatccatgactatgagcacacaggcaccaccaacaacttccacatccagaccaggagtgatgtggccatcctgtacaatgacagatctgtgctggagaaccaccacgtgtctgctgcctaccgcctgatgcaggaggaggagatgaacatcctgatcaacctgagcaaggatgactggagggacctgaggaacctggtgattgagatggtgctgagcacagacatgagcggccacttccagcagatcaagaacatccggaacagcctgcagcagcctgagggcatcgaccgggccaagaccatgagcctcatcctgcacgccgctgacatcagccacccagccaagtcctggaagctgcactaccgctggaccatggccctgatggaggagttcttcctgcagggcgacaaggaggccgagctgggcctgcccttcagccccctgtgtgacaggaagagcaccatggtggcccagagccagatcggcttcatcgacttcatcgtggagcccaccttcagcctgctgacagacagcacagagaagatcgtcatccccctcatcgaggaggccagcaaggccgagaccagcagctatgtggccagcagcagcaccaccatcgtgggcctgcacatcgcagatgccctgcggcgcagcaacaccaagggctccatgtctgatggcagctacagcccagactacagcctggccgctgtggacctgaagagcttcaagaacaacctggtggacatcatccagcagaacaaggagcgctggaaggagctggccgcccaggaggcccggaccagcagccagaagtgtgagttcatccaccagtag

SEQ ID NO: 92801 - DNA, 1560 bp, Artificial Sequence
  derived and/or modified sequence
atggacgaccacgtgaccatccggaagaagcacctgcagcggcccattttccgtctgcggtgtctggtaaagcagctagaacgtggagacgtgaatgtcgtcgatttaaaaaagaacattgagtacgcagcctccgtgctagaagccgtgtacattgatgagacccgcaggttactggacacagaagatgagctttccgatatacaaacagactcagtaccatctgaagtgagggattggttagcctccaccttcaccaggaaaatgggtatgacgaagaagaaacccgaggaaaaacctaagttcagaagtatcgttcacgcagtgcaggcgggcatttttgtcgaacgcatgtatcgaaagacctatcacatggtaggactggcatatcccgctgccgtcattgtgacattaaaggacgttgacaagtggtcgttcgacgtctttgctctgaatgaagcatccggtgagcacagtctaaagtttatgatctacgaactgttcacaaggtatgacttaattaaccgatttaaaatcccagtgagttgcctgatcactttcgccgaagctttggaggtgggttattcaaagtacaaaaacccttatcataacttgattcacgcagctgatgttacacagaccgtgcattacattatgctgcacaccgggattatgcactggctgacagagctcgaaatcctcgcaatggtgtttgccgctgccatccacgactatgagcacactggtaccactaataatttccacatccagacacggagcgatgtagccattctgtataacgacagatctgtgctggaaaaccaccacgtcagtgctgcctataggctcatgcaagaagaggagatgaacatcctgatcaatctgtctaaagatgattggagggacctccggaatcttgtgattgaaatggtactcagtacggacatgagtggtcactttcagcagatcaagaacatccgcaatagccttcagcagccagagggtatcgacagagccaagacaatgtccctgattctacatgccgcagacatctctcaccccgcaaaatcttggaagctccattacaggtggacaatggcattgatggaagaattcttcctgcagggtgacaaagaagctgaacttggactgccattctcccctctgtgcgatagaaaatctacgatggttgctcaatcccagattggctttatcgatttcatcgtggagcccacatttagtttactgacggacagcacagaaaaaatcgttatacctctaattgaggaggcttcgaaagcggaaacgagttcctacgttgcttcctccagcacaaccattgtaggtctgcacatcgctgatgccctaagacggtccaacactaagggaagcatgtccgatgggtcatattcgccagattattctttggcggcagtggatctgaaatctttcaaaaacaatctggttgacatcatccagcagaataaagagcgctggaaggagctggctgcccaggaggctcggacatcatcacaaaagtgcgagttcatccaccagtag

SEQ ID NO: 92802 - DNA, 2263 bp, Artificial Sequence
  derived and/or modified sequence
ccagcatgtggaaggagagctctcatggctgcaataacttagggagttcctacctggatgacactggggtaggaagttttctgtttgttttgttctgtttcggagggtcccgtgcacttctcttgcctggatcaacgtgactcttggtggtttttgcacaccctgctctgtgggggagtgccccaacgtgcctgtcttatgtggcctctatggacacactgctcagctggcagagaacagggaagttttctcccagcacccaaaaagagaaagaggaaactactttttctttctgggctccttgcagcacaatagatcaggataagcttccacatttcctctctggagtttctggagtggtttccaggaagaagttaaaccttcacctttaaatggatgaccatgtcacaatcaggaagaaacatctccaaagacccatctttagactaagatgcttggtgaagcagctggaaagaggtgatgttaacgtcgtcgacttaaagaagaatattgaatatgcggcatctgtgctggaagcagtttatatcgatgaaacaagaagacttctggatactgaagatgagctcagtgacattcagactgactcagtcccatctgaagtccgggactggttggcttctacctttacacggaaaatggggatgacaaaaaagaaacctgaggaaaaaccaaaatttcggagcattgtgcatgctgttcaagctggaatttttgtggaaagaatgtaccgaaaaacatatcatatggttggtttggcatatccagcagctgtcatcgtaacattaaaggatgttgataaatggtctttcgatgtatttgccctaaatgaagcaagtggagagcatagtctgaagtttatgatttatgaactgtttaccagatatgatcttatcaaccgtttcaagattcctgtttcttgcctaatcacctttgcagaagctttagaagttggttacagcaagtacaaaaatccatatcacaatttgattcatgcagctgatgtcactcaaactgtgcattacataatgcttcatacaggtatcatgcactggctcactgaactggaaattttagcaatggtctttgctgctgccattcatgattatgagcatacagggacaacaaacaactttcacattcagacaaggtcagatgttgccattttgtataatgatcgctctgtccttgagaatcaccacgtgagtgcagcttatcgacttatgcaagaagaagaaatgaatatcttgataaatttatccaaagatgactggagggatcttcggaacctagtgattgaaatggttttatctacagacatgtcaggtcacttccagcaaattaaaaatataagaaacagtttgcagcagcctgaagggattgacagagccaaaaccatgtccctgattctccacgcagcagacatcagccacccagccaaatcctggaagctgcattatcggtggaccatggccctaatggaggagtttttcctgcagggagataaagaagctgaattagggcttccattttccccactttgtgatcggaagtcaaccatggtggcccagtcacaaataggtttcatcgatttcatagtagagccaacattttctcttctgacagactcaacagagaaaattgttattcctcttatagaggaagcctcaaaagccgaaacttcttcctatgtggcaagcagctcaaccaccattgtggggttacacattgctgatgcactaagacgatcaaatacaaaaggctccatgagtgatgggtcctattccccagactactcccttgcagcagtggacctgaagagtttcaagaacaacctggtggacatcattcagcagaacaaagagaggtggaaagagttagctgcacaagaagcaagaaccagttcacagaagtgtgagtttattcatcagtaaacacctttaagtaaaacctcgtgcatggtggcagctctaatttgaccaaaagacttggagattttgattatgcttgctggaaatctaccctgtcctgtgtgagacaggaaatctatttttgcagattgctcaataagcatcatgagccacataaataacagctgtaaactccttaattcaccgggctcaactgctaccgaacagattcatctagtggctacatcagcaccttgtgctttcagatatctgtttcaatggcattttgtggcatttgtctttaccgagtgccaataaattttctttgagcagct

SEQ ID NO: 92803 - DNA, 1560 bp, Artificial Sequence
  derived and/or modified sequence
atggacgatcacgtgaccatacgaaagaagcatcttcaacggccaatcttcagactccgttgtctggtgaagcaactggaacggggagacgtgaacgtggttgatctgaaaaagaatattgaatatgccgcttcagtgttagaagcggtctatattgatgaaactcgacgtcttcttgataccgaggacgaattaagtgacatccagacagattccgtccccagtgaagtccgggactggctggcctccactttcacccgcaagatgggtatgaccaagaaaaaacccgaagaaaaaccaaagttccgatcaatcgtgcacgccgtgcaagcaggcatatttgtggaaagaatgtaccggaagacttatcacatggtcggtctggcatatccagccgcagtgatcgtgactctgaaagacgtggacaagtggagcttcgatgtgtttgctctaaacgaggctagtggcgagcattctctgaaatttatgatttacgagttgttcacaaggtacgatcttatcaatcgttttaaaattccggtgtcctgtctcattacatttgcggaggctctcgaggtgggatattcaaagtacaagaatccttaccacaatctgatccacgccgcagacgtgacccagactgttcattatattatgcttcacactggcattatgcattggctaaccgaactcgagatcctcgccatggtgttcgcagctgctattcatgattacgaacatacgggcacaacaaataacttccatatacagaccagaagtgatgtggccattttgtataatgatcgttcagtcctcgaaaaccaccatgtttcggccgcttacaggttgatgcaggaggaggaaatgaacatactcattaacctgtcaaaagatgactggcgcgacctgagaaacctcgtgattgaaatggtcctgtccacggacatgagtggtcactttcagcagattaaaaacatcagaaatagccttcaacaacccgaaggcattgacagagccaagacaatgtcactcatcctccatgccgctgacattagccaccccgctaagtcatggaagctgcactacagatggacaatggctcttatggaagagttctttctccaaggagataaagaagcagaactcggtctgccattctcccctctgtgcgacagaaaatctacaatggtggcacagtcacagatcggtttcatcgacttcatcgtggaacccaccttcagcctattgaccgactcaaccgaaaaaatcgtgatccccttgatcgaagaggcatctaaagccgaaacaagttcatacgtggcctccagtagcaccaccatcgtgggcctgcatatcgctgacgctctgaggcgcagcaacactaaaggatctatgtctgacggttcatacagcccagactatagcctcgccgcagtagatctgaagagctttaagaataacctagttgatattattcagcagaataaagaacggtggaaggagctagcagcacaagaggcacgcacatccagtcagaaatgtgagttcatacatcagtag

SEQ ID NO: 92804 - DNA, 1560 bp, Artificial Sequence
  derived and/or modified sequence
atggacgaccacgtgaccatcagaaagaagcacctgcagagacccatcttcagactgagatgcctggtgaagcagctggagagaggcgacgtgaacgtggtggacctgaagaagaacatcgagtacgccgccagcgtgctggaggccgtgtacatcgacgagaccagaagactgctggacaccgaggacgagctgagcgacatccagaccgacagcgtgcccagcgaggtgagagactggctggccagcaccttcaccagaaagatgggcatgaccaagaagaagcccgaggagaagcccaagttcagaagcatcgtgcacgccgtgcaggccggcatcttcgtggagagaatgtacagaaagacctaccacatggtgggcctggcctaccccgccgccgtgatcgtgaccctgaaggacgtggacaagtggagcttcgacgtgttcgccctgaacgaggccagcggcgagcacagcctgaagttcatgatctacgagctgttcaccagatacgacctgatcaacagattcaagatccccgtgagctgcctgatcaccttcgccgaggccctggaggtgggctacagcaagtacaagaacccctaccacaacctgatccacgccgccgacgtgacccagaccgtgcactacatcatgctgcacaccggcatcatgcactggctgaccgagctggagatcctggccatggtgttcgccgccgccatccacgactacgagcacaccggcaccaccaacaacttccacatccagaccagaagcgacgtggccatcctgtacaacgacagaagcgtgctggagaaccaccacgtgagcgccgcctacagactgatgcaggaggaggagatgaacatcctgatcaacctgagcaaggacgactggagagacctgagaaacctggtgatcgagatggtgctgagcaccgacatgagcggccacttccagcagatcaagaacatcagaaacagcctgcagcagcccgagggcatcgacagagccaagaccatgagcctgatcctgcacgccgccgacatcagccaccccgccaagagctggaagctgcactacagatggaccatggccctgatggaggagttcttcctgcagggcgacaaggaggccgagctgggcctgcccttcagccccctgtgcgacagaaagagcaccatggtggcccagagccagatcggcttcatcgacttcatcgtggagcccaccttcagcctgctgaccgacagcaccgagaagatcgtgatccccctgatcgaggaggccagcaaggccgagaccagcagctacgtggccagcagcagcaccaccatcgtgggcctgcacatcgccgacgccctgagaagaagcaacaccaagggcagcatgagcgacggcagctacagccccgactacagcctggccgccgtggacctgaagagcttcaagaacaacctggtggacatcatccagcagaacaaggagagatggaaggagctggccgcccaggaggccagaaccagcagccagaagtgcgagttcatccaccagtag

SEQ ID NO: 92805 - protein, 511 aa, Artificial Sequence
  derived and/or modified sequence
MGKKINKLFCFNFLVQCFRGKSKPSKCQIRKKVKNHIERLLDTEDELSDIQTDSVPSEVRDWLASTFTRKMGMTKKKPEEKPKFRSIVHAVQAGIFVERMYRKTYHMVGLAYPAAVIVTLKDVDKWSFDVFALNEASGEHSLKFMIYELFTRYDLINRFKIPVSCLITFAEALEVGYSKYKNPYHNLIHAADVTQTVHYIMLHTGIMHWLTELEILAMVFAAAIHDYEHTGTTNNFHIQTRSDVAILYNDRSVLENHHVSAAYRLMQEEEMNILINLSKDDWRDLRNLVIEMVLSTDMSGHFQQIKNIRNSLQQPEGIDRAKTMSLILHAADISHPAKSWKLHYRWTMALMEEFFLQGDKEAELGLPFSPLCDRKSTMVAQSQIGFIDFIVEPTFSLLTDSTEKIVIPLIEEASKAETSSYVASSSTTIVGLHIADALRRSNTKGSMSDGSYSPDYSLAAVDLKSFKNNLVDIIQQNKERWKELAAQGESDLHKNSEDLVNAEEKHDETHS

SEQ ID NO: 92806 - DNA, 261 bp, Artificial Sequence
  derived and/or modified sequence
atggtgagacacccctacagcgtgcagacccagctgagcaccgaggccaaggccatctggagaagcatgcagcagcaggagaccaacctgctggccaacctgaccaccaacgacgccagagacaacagcaaggacttccagaacagcaaggtgggcgccgccgccaccagcagagacgagggctgcaactgccccatcatcggcgagatcgtgatcagctgctactggctgttcgagatcccccccctgatcagcagatag

SEQ ID NO: 92807 - DNA, 261 bp, Artificial Sequence
  derived and/or modified sequence
atggtgcgccacccctacagcgtgcagacccagctgagcacagaggccaaggccatctggaggtccatgcagcagcaggagaccaacctgctggccaacctgaccaccaatgatgcccgggacaacagcaaggacttccagaacagcaaggtgggcgccgccgccaccagcagagatgagggctgcaactgccccatcattggagagatcgtcatcagctgctactggctgtttgagatccccccactcatcagcaggtag

SEQ ID NO: 92808 - DNA, 261 bp, Artificial Sequence
  derived and/or modified sequence
atggtgcggcacccctacagcgtgcagacccagctgagcaccgaggccaaggccatctggcggtctatgcagcagcaagaaactaatttactcgcaaatctgacgaccaacgacgctcgggacaattctaaggatttccagaattcaaaagtcggggccgcagctacctccagagatgaggggtgcaactgtcccattattggcgagatcgtgatctcttgctattggctgtttgaaattccgccattaattagtagatag

SEQ ID NO: 92809 - DNA, 261 bp, Artificial Sequence
  derived and/or modified sequence
atggtcagacacccgtatagcgttcagacacagctgtccacagaggcgaaagccatttggcggtcgatgcagcagcaggaaactaatcttctagccaatttaacaacaaatgacgctagggataactctaaagactttcaaaattctaaggtaggcgcagccgcaacctctcgtgacgaaggttgtaattgtccaatcataggtgagatcgtcatctcctgctactggttgtttgagatccctcctttgattagcaggtag

SEQ ID NO: 92810 - protein, 914 aa, Artificial Sequence
  derived and/or modified sequence
MAENSVLTSTTGRTSLADSSIFDSKVTEISKENLLIGSTSYVEEEMPQIETRVILVQEAGKQEELIKALKTIKIMEVPVIKIKESCPGKSDEKLIKSVINMDIKVGFVKMESVEEFEGLDSPEFENVFVVTDFQDSVFNDLYKADCRVIGPPVVLNCSQKGEPLPFSCRPLYCTSMMNLVLCFTGFRKKEELVRLVTLVHHMGGVIRKDFNSKVTHLVANCTQGEKFRVAVSLGTPIMKPEWIYKAWERRNEQDFYAAVDDFRNEFKVPPFQDCILSFLGFSDEEKTNMEEMTEMQGGKYLPLGDERCTHLVVEENIVKDLPFEPSKKLYVVKQEWFWGSIQMDARAGETMYLYEKANTPELKKSVSMLSLNTPNSNRKRRRLKETLAQLSRETDVSPFPPRKRPSAEHSLSIGSLLDISNTPESSINYGDTPKSCTKSSKSSTPVPSKQSARWQVAKELYQTESNYVNILATIIQLFQVPLEEEGQRGGPILAPEEIKTIFGSIPDIFDVHTKIKDDLEDLIVNWDESKSIGDIFLKYSKDLVKTYPPFVNFFEMSKETIIKCEKQKPRFHAFLKINQAKPECGRQSLVELLIRPVQRLPSVALLLNDLKKHTADENPDKSTLEKAIGSLKEVMTHINEDKRKTEAQKQIFDVVYEVDGCPANLLSSHRSLVQRVETISLGEHPCDRGEQVTLFLFNDCLEIARKRHKVIGTFRSPHGQTRPPASLKHIHLMPLSQIKKVLDIRETEDCHNAFALLVRPPTEQANVLLSFQMTSDELPKENWLKMLCRHVANTICKADAENLIYTADPESFEVNTKDMDSTLSRASRAIKKTSKKVTRAFSFSKTPKRALRRALMTSHGSVEGRSPSSNDKHVMSRLSSTSSLAGIPSPSLVSLPSFFERRSHTLSRSTTHLI

SEQ ID NO: 92811 - DNA, 2745 bp, Artificial Sequence
  derived and/or modified sequence
atggccgagaacagcgtgctgaccagcaccaccggcagaaccagcctggccgacagcagcatcttcgacagcaaggtgaccgagatcagcaaggagaacctgctgatcggcagcaccagctacgtggaggaggagatgccccagatcgagaccagagtgatcctggtgcaggaggccggcaagcaggaggagctgatcaaggccctgaagaccatcaagatcatggaggtgcccgtgatcaagatcaaggagagctgccccggcaagagcgacgagaagctgatcaagagcgtgatcaacatggacatcaaggtgggcttcgtgaagatggagagcgtggaggagttcgagggcctggacagccccgagttcgagaacgtgttcgtggtgaccgacttccaggacagcgtgttcaacgacctgtacaaggccgactgcagagtgatcggcccccccgtggtgctgaactgcagccagaagggcgagcccctgcccttcagctgcagacccctgtactgcaccagcatgatgaacctggtgctgtgcttcaccggcttcagaaagaaggaggagctggtgagactggtgaccctggtgcaccacatgggcggcgtgatcagaaaggacttcaacagcaaggtgacccacctggtggccaactgcacccagggcgagaagttcagagtggccgtgagcctgggcacccccatcatgaagcccgagtggatctacaaggcctgggagagaagaaacgagcaggacttctacgccgccgtggacgacttcagaaacgagttcaaggtgccccccttccaggactgcatcctgagcttcctgggcttcagcgacgaggagaagaccaacatggaggagatgaccgagatgcagggcggcaagtacctgcccctgggcgacgagagatgcacccacctggtggtggaggagaacatcgtgaaggacctgcccttcgagcccagcaagaagctgtacgtggtgaagcaggagtggttctggggcagcatccagatggacgccagagccggcgagaccatgtacctgtacgagaaggccaacacccccgagctgaagaagagcgtgagcatgctgagcctgaacacccccaacagcaacagaaagagaagaagactgaaggagaccctggcccagctgagcagagagaccgacgtgagccccttcccccccagaaagagacccagcgccgagcacagcctgagcatcggcagcctgctggacatcagcaacacccccgagagcagcatcaactacggcgacacccccaagagctgcaccaagagcagcaagagcagcacccccgtgcccagcaagcagagcgccagatggcaggtggccaaggagctgtaccagaccgagagcaactacgtgaacatcctggccaccatcatccagctgttccaggtgcccctggaggaggagggccagagaggcggccccatcctggcccccgaggagatcaagaccatcttcggcagcatccccgacatcttcgacgtgcacaccaagatcaaggacgacctggaggacctgatcgtgaactgggacgagagcaagagcatcggcgacatcttcctgaagtacagcaaggacctggtgaagacctacccccccttcgtgaacttcttcgagatgagcaaggagaccatcatcaagtgcgagaagcagaagcccagattccacgccttcctgaagatcaaccaggccaagcccgagtgcggcagacagagcctggtggagctgctgatcagacccgtgcagagactgcccagcgtggccctgctgctgaacgacctgaagaagcacaccgccgacgagaaccccgacaagagcaccctggagaaggccatcggcagcctgaaggaggtgatgacccacatcaacgaggacaagagaaagaccgaggcccagaagcagatcttcgacgtggtgtacgaggtggacggctgccccgccaacctgctgagcagccacagaagcctggtgcagagagtggagaccatcagcctgggcgagcacccctgcgacagaggcgagcaggtgaccctgttcctgttcaacgactgcctggagatcgccagaaagagacacaaggtgatcggcaccttcagaagcccccacggccagaccagaccccccgccagcctgaagcacatccacctgatgcccctgagccagatcaagaaggtgctggacatcagagagaccgaggactgccacaacgccttcgccctgctggtgagaccccccaccgagcaggccaacgtgctgctgagcttccagatgaccagcgacgagctgcccaaggagaactggctgaagatgctgtgcagacacgtggccaacaccatctgcaaggccgacgccgagaacctgatctacaccgccgaccccgagagcttcgaggtgaacaccaaggacatggacagcaccctgagcagagccagcagagccatcaagaagaccagcaagaaggtgaccagagccttcagcttcagcaagacccccaagagagccctgagaagagccctgatgaccagccacggcagcgtggagggcagaagccccagcagcaacgacaagcacgtgatgagcagactgagcagcaccagcagcctggccggcatccccagccccagcctggtgagcctgcccagcttcttcgagagaagaagccacaccctgagcagaagcaccacccacctgatctag

SEQ ID NO: 92812 - DNA, 4158 bp, Artificial Sequence
  derived and/or modified sequence
aaagaggttgacatcacgcgccaatcggcatggctcttagagagagcagcttagtttttgaatcggttgtggcggccgccggcgaggaatggcggtatttgtgagaggagtcggcgtttgaagaggtggaactcctagggcttttttgagagtgctgatttagaagaatacaaatcatggctgaaaatagtgtattaacatccactactgggaggactagcttggcagactcttccatttttgattctaaagttactgagatttccaaggaaaacttacttattggatctacttcatatgtagaagaagagatgcctcagattgaaacaagagtgatattggttcaagaagctggaaaacaagaagaacttataaaagccttaaagactattaaaataatggaagtccctgttataaagataaaagaaagttgtcctggaaaatcggatgaaaaattaataaaaagtgttattaatatggacattaaagtgggctttgtaaagatggagtcagtggaagaatttgaaggtttggattctccggaatttgaaaatgtatttgtagtcacggactttcaggattctgtctttaatgacctctacaaggctgattgtagagttattggaccaccagttgtattaaattgttcacaaaaaggagagcctttgccattttcatgtcgcccgttgtattgtacaagtatgatgaatctagtactatgctttactggatttaggaaaaaagaagaactagtcaggttggtgacattggtccatcacatgggtggagttattcgaaaagactttaattcaaaagttacacatttggtggcaaattgtacacaaggagaaaaattcagggttgctgtgagtctaggtactccaattatgaagccagaatggatttataaagcttgggaaaggcggaatgaacaggatttctatgcagcagttgatgactttagaaatgaatttaaagttcctccatttcaagattgtattttaagtttcctgggattttcagatgaagagaaaaccaatatggaagaaatgactgaaatgcaaggaggtaaatatttaccgcttggagatgaaagatgcactcaccttgtagttgaagagaatatagtaaaagatcttccctttgaaccttcaaagaaactttatgttgtcaagcaagagtggttctggggaagcattcaaatggatgcccgagctggagaaactatgtatttatatgaaaaggcaaatactcctgagctcaagaaatcagtgtcaatgctttctctaaatacccctaacagcaatcgcaaacgacgtcgtttaaaagaaacacttgctcagctttcaagagagacagacgtgtcaccatttccaccccgtaagcgcccatcagctgagcattccctttccatagggtcactcctagatatctccaacacaccagagtctagcattaactatggagacaccccaaagtcttgtactaagtcttctaaaagctccactccagttccttcaaagcagtcagcaaggtggcaagttgcaaaagagctttatcaaactgaaagtaattatgttaatatattggcaacaattattcagttatttcaagtaccattggaagaggaaggacaacgtggtggacctatccttgcaccagaggagattaagactatttttggtagcatcccagatatctttgatgtacacactaagataaaggatgatcttgaagaccttatagttaattgggatgagagcaaaagcattggtgacatttttctgaaatattcaaaagatttggtaaaaacctaccctccctttgtaaacttctttgaaatgagcaaggaaacaattattaaatgtgaaaaacagaaaccaagatttcatgcttttctcaagataaaccaagcaaaaccagaatgtggacggcagagccttgttgaacttcttatccgaccagtacagaggttacccagtgttgcattacttttaaatgatcttaagaagcatacagctgatgaaaatccagacaaaagcactttagaaaaagctattggatcactgaaggaagtaatgacgcatattaatgaggataagagaaaaacagaagctcaaaagcaaatttttgatgttgtttatgaagtagatggatgcccagctaatcttttatcttctcaccgaagcttagtacagcgggttgaaacaatttctctaggtgagcacccctgtgacagaggagaacaagtaactctcttcctcttcaatgattgcctagagatagcaagaaaacggcacaaggttattggcacttttaggagtcctcatggccaaacccgacccccagcttctcttaagcatattcacctaatgcctctttctcagattaagaaggtattggacataagagagacagaagattgccataatgcttttgccttgcttgtgaggccaccaacagagcaggcaaatgtgctactcagtttccagatgacatcagatgaacttccaaaagaaaactggctaaagatgctgtgtcgacatgtagctaacaccatttgtaaagcagatgctgagaatcttatttatactgctgatccagaatcctttgaagtaaatacaaaagatatggacagtacattgagtagagcatcaagagcaataaaaaagacttcaaaaaaggttacaagagcattctctttctccaaaactccaaaaagagctcttcgaagggctcttatgacatcccacggctcagtggagggaagaagtccttccagcaatgataagcatgtaatgagtcgtctttctagcacatcatcattagcaggtatcccttctccctcccttgtcagccttccttccttctttgaaaggagaagtcatacgttaagtagatctacaactcatttgatatgaagcgttaccaaaatcttaaattatagaaatgtatagacacctcatactcaaataagaaactgacttaaatggtacttgtaattagcacttggtgaaagctggaaggaagataaataacactaaactatgctatttgatttttcttcttgaaagagtaaggtttacctgttacattttcaagttaattcatgtaaaaaatgatagtgattttgatgtaatttatctcttgtttgaatctgtcattcaaaggccaataatttaagttgctatcagctgatattagtagctttgcaaccctgatagagtaaataaattttatgggcgggtgccaaatactgctgtgaatctatttgtatagtatccatgaatgaatttatggaaatagatatttgtgcagctcaatttatgcagagattaaatgacatcataatactggatgaaaacttgcatagaattctgattaaatagtgggtctgtttcacatgtgcagtttgaagtatttaaataaccactcctttcacagtttattttcttctcaagcgttttcaagatctagcatgtggattttaaaagatttgccctcattaacaagaataacatttaaaggagattgtttcaaaatatttttgcaaattgagataaggacagaaagattgagaaacattgtatattttgcaaaaacaagatgtttgtagctgtttcagagagagtacggtatatttatggtaattttatccactagcaaatcttgatttagtttgatagtgtgtggaattttattttgaaggataagaccatgggaaaattgtggtaaagactgtttgtacccttcatgaaataattctgaagttgccatcagttttactaatcttctgtgaaatgcatagatatgcgcatgttcaactttttattgtggtcttataattaaatgtaaaattgaaaattcatttgctgtttcaaagtgtgatatctttcacaatagcctttttatagtcagtaattcagaataatcaagttcatatggataaatgcatttttatttcctatttctttagggagtgctacaaatgtttgtcacttaaatttcaagtttctgttttaatagttaactgactatagattgttttctatgccatgtatgtgccacttctgagagtagtaaatgactctttgctacattttaaaagcaattgtattagtaagaactttgtaaataaatacctaaaacccaagtgta

SEQ ID NO: 92813 - DNA, 2745 bp, Artificial Sequence
  derived and/or modified sequence
atggctgaaaatagtgtattaacatccactactgggaggactagcttggcagactcttccatttttgattctaaagttactgagatttccaaggaaaacttacttattggatctacttcatatgtagaagaagagatgcctcagattgaaacaagagtgatattggttcaagaagctggaaaacaagaagaacttataaaagccttaaagactattaaaataatggaagtccctgttataaagataaaagaaagttgtcctggaaaatcggatgaaaaattaataaaaagtgttattaatatggacattaaagtgggctttgtaaagatggagtcagtggaagaatttgaaggtttggattctccggaatttgaaaatgtatttgtagtcacggactttcaggattctgtctttaatgacctctacaaggctgattgtagagttattggaccaccagttgtattaaattgttcacaaaaaggagagcctttgccattttcatgtcgcccgttgtattgtacaagtatgatgaatctagtactatgctttactggatttaggaaaaaagaagaactagtcaggttggtgacattggtccatcacatgggtggagttattcgaaaagactttaattcaaaagttacacatttggtggcaaattgtacacaaggagaaaaattcagggttgctgtgagtctaggtactccaattatgaagccagaatggatttataaagcttgggaaaggcggaatgaacaggatttctatgcagcagttgatgactttagaaatgaatttaaagttcctccatttcaagattgtattttaagtttcctgggattttcagatgaagagaaaaccaatatggaagaaatgactgaaatgcaaggaggtaaatatttaccgcttggagatgaaagatgcactcaccttgtagttgaagagaatatagtaaaagatcttccctttgaaccttcaaagaaactttatgttgtcaagcaagagtggttctggggaagcattcaaatggatgcccgagctggagaaactatgtatttatatgaaaaggcaaatactcctgagctcaagaaatcagtgtcaatgctttctctaaatacccctaacagcaatcgcaaacgacgtcgtttaaaagaaacacttgctcagctttcaagagagacagacgtgtcaccatttccaccccgtaagcgcccatcagctgagcattccctttccatagggtcactcctagatatctccaacacaccagagtctagcattaactatggagacaccccaaagtcttgtactaagtcttctaaaagctccactccagttccttcaaagcagtcagcaaggtggcaagttgcaaaagagctttatcaaactgaaagtaattatgttaatatattggcaacaattattcagttatttcaagtaccattggaagaggaaggacaacgtggtggacctatccttgcaccagaggagattaagactatttttggtagcatcccagatatctttgatgtacacactaagataaaggatgatcttgaagaccttatagttaattgggatgagagcaaaagcattggtgacatttttctgaaatattcaaaagatttggtaaaaacctaccctccctttgtaaacttctttgaaatgagcaaggaaacaattattaaatgtgaaaaacagaaaccaagatttcatgcttttctcaagataaaccaagcaaaaccagaatgtggacggcagagccttgttgaacttcttatccgaccagtacagaggttacccagtgttgcattacttttaaatgatcttaagaagcatacagctgatgaaaatccagacaaaagcactttagaaaaagctattggatcactgaaggaagtaatgacgcatattaatgaggataagagaaaaacagaagctcaaaagcaaatttttgatgttgtttatgaagtagatggatgcccagctaatcttttatcttctcaccgaagcttagtacagcgggttgaaacaatttctctaggtgagcacccctgtgacagaggagaacaagtaactctcttcctcttcaatgattgcctagagatagcaagaaaacggcacaaggttattggcacttttaggagtcctcatggccaaacccgacccccagcttctcttaagcatattcacctaatgcctctttctcagattaagaaggtattggacataagagagacagaagattgccataatgcttttgccttgcttgtgaggccaccaacagagcaggcaaatgtgctactcagtttccagatgacatcagatgaacttccaaaagaaaactggctaaagatgctgtgtcgacatgtagctaacaccatttgtaaagcagatgctgagaatcttatttatactgctgatccagaatcctttgaagtaaatacaaaagatatggacagtacattgagtagagcatcaagagcaataaaaaagacttcaaaaaaggttacaagagcattctctttctccaaaactccaaaaagagctcttcgaagggctcttatgacatcccacggctcagtggagggaagaagtccttccagcaatgataagcatgtaatgagtcgtctttctagcacatcatcattagcaggtatcccttctccctcccttgtcagccttccttccttctttgaaaggagaagtcatacgttaagtagatctacaactcatttgatatga

SEQ ID NO: 92814 - DNA, 2745 bp, Artificial Sequence
  derived and/or modified sequence
atggcagagaattcggtccttacctccacaaccggcaggaccagccttgcagactccagtatcttcgattctaaggtgaccgaaatttccaaggagaacttattgattggcagcaccagctatgtcgaagaagagatgcctcagatcgaaacccgcgtcattctcgtgcaggaagctggaaagcaggaagagctcatcaaggcgctgaagactatcaagattatggaagtccccgtgattaaaatcaaggaaagttgtccaggcaagagcgacgagaaactcatcaaatccgtaattaacatggatataaaggtgggatttgtgaagatggaatccgtcgaagaatttgagggcctggattctcctgagtttgaaaacgttttcgtcgtcaccgattttcaagattccgtgttcaacgacctgtataaggcagattgtagggttattggcccccctgtagtgctcaactgttcacagaaaggcgaacccttgcctttctcttgcagaccattgtactgcaccagcatgatgaatttggtcctgtgcttcacgggctttcgtaagaaggaggagctggtgaggctcgtgacactggtccaccacatgggcggagtcattcgcaaagactttaactccaaggtgacccaccttgtggccaactgtacacagggcgagaagttccgagtcgccgtgtcactggggactccaattatgaaaccagagtggatctacaaggcctgggagcgtcggaacgaacaggatttttacgccgcggttgatgattttaggaacgagttcaaagtgcctcctttccaggattgcattttgtccttcctgggcttttcggatgaagagaaaacgaacatggaggagatgactgaaatgcaaggaggaaagtatctgccactgggagatgaacgctgtacccacctcgtcgttgaagagaatattgtcaaggacctgccctttgagccctccaaaaaactatacgtggtgaagcaagaatggttttgggggtctatccaaatggacgctcgggccggtgagacaatgtacctgtacgagaaagccaacaccccagaattaaagaagagcgtgtctatgctctccctgaacacaccaaactccaacagaaagcgcagacggctcaaggaaaccttagctcagctgagtcgggaaacagatgtcagcccctttccccctcgcaagcgcccgtccgcagagcattcactgagcattggcagccttctggatatttctaacacgccagagtctagcattaattacggggacacccccaaaagctgcacgaaaagttccaagtcctctactccagtgcctagtaaacagtcagctagatggcaagtggctaaggagctgtatcagacagagtctaactacgttaatatcctcgcaaccattatccagctctttcaagttccgctggaagaagaaggccaacggggcggccctattctggccccagaagaaatcaagactatttttggatccatccccgatattttcgacgtgcacacaaagattaaggacgaccttgaggacctcatcgtaaactgggacgaaagcaagtccataggagatatcttcttaaagtactccaaggaccttgttaaaacctaccccccctttgttaattttttcgagatgagtaaagagacaattataaaatgcgaaaagcaaaagcctagattccacgcttttttgaaaataaatcaagctaagccagagtgtggtcgccaatctctggtggagcttttgattagacccgtgcaaagactgccgagtgtggctctgctcctgaatgacctgaagaagcataccgccgacgaaaatcccgacaagagcaccttggaaaaagccatcgggagcttaaaggaagtaatgacacacatcaatgaagacaagcgaaaaactgaggcccagaagcagatcttcgatgtggtgtatgaggtggacggctgtcctgctaacctgctttcaagccatagaagtctggttcaaagggtggagactatttctttgggggagcacccatgcgatagaggcgagcaggtgaccctgttcctgttcaacgattgcctggaaatcgctaggaaacggcacaaggttatcggcactttcagaagccctcacgggcagacaaggcctccagccagtcttaagcacatccacctgatgcctctttctcaaattaaaaaggttttggacatccgagagacagaggactgccataatgccttcgcactgctggttagacctcctaccgaacaggcaaacgtactgttgtccttccagatgacctctgatgaattaccgaaagagaactggctcaaaatgctgtgccgacacgtcgcaaataccatctgtaaggcagatgccgaaaacctgatctataccgcggatccggagtcctttgaggtaaacacaaaggatatggattcaacactgtcacgggcatctagagctattaagaaaacatccaagaaagtgacccgggcattctccttctccaagactcctaagagagcattgagacgggcccttatgacttcacatgggtctgtcgaaggcagaagccccagtagtaatgataagcacgtgatgtcccgcctgagctctacaagttctctggccggtatcccatcaccaagtctggtgtccctgccttcattttttgagaggcgaagtcacaccctcagcagaagcactacacacctgatctag

SEQ ID NO: 92815 - DNA, 2745 bp, Artificial Sequence
  derived and/or modified sequence
atggcagagaactctgttttgactagcactaccggcaggacatcattagccgattctagtatttttgatagcaaggtgacagagatcagcaaggaaaatctgttgatcggttcaacgtcttatgtggaggaggaaatgccacagatcgaaacacgcgtgatcttggtgcaggaagccgggaagcaggaggaactgatcaaagcacttaaaacgattaagatcatggaagtgccagttataaagatcaaggagtcttgtccggggaagtctgacgaaaagttgatcaagtccgtgataaacatggatatcaaagttggttttgttaagatggagtccgtagaagagttcgaagggctggattctcccgaatttgagaatgtcttcgtggttactgatttccaagacagtgtattcaatgatttgtataaggcagattgtcgcgtgattggaccacccgtcgtactgaactgctctcagaaaggcgaaccgttgccattttcctgcagacccctttactgcacctcaatgatgaacctcgtgctgtgtttcacagggtttaggaagaaggaggagctggttcgtctcgtcaccctggtccaccatatgggaggggtgattcggaaggactttaacagcaaggtcacccacctagtggcaaactgtacacagggcgagaagttccgtgttgcggtgtcacttggtactccgatcatgaaacccgagtggatatacaaggcctgggaacgaagaaatgaacaggacttctacgcggctgtcgatgactttaggaacgaattcaaagtcccaccctttcaagactgcatactatcatttttggggttttctgacgaggagaaaaccaacatggaggagatgaccgagatgcaagggggtaagtacctcccacttggagatgagagatgtactcaccttgtggtagaagagaacattgtcaaggacctgcctttcgagcctagtaaaaagctgtacgtggtgaagcaggagtggttttggggatctattcagatggacgcaagagcgggcgaaacaatgtacctgtatgagaaagccaatactcccgaactgaagaagtccgtgtccatgctgtcactcaatacacctaattcaaaccgcaaacggagaagactgaaagagaccttagcgcagcttagtcgcgagactgacgtttcccctttccctccccggaagagaccctcggcagaacatagcctcagcatcgggtcactgctggatataagtaacactccggagtcgagtatcaactatggcgatacacctaagtcatgcaccaaaagcagcaaaagtagcacacccgttccctcaaagcaatctgctcgctggcaggtggctaaggagctgtatcagacagagtccaactatgtgaatatactcgccacaatcattcaactgttccaggtgcccttggaagaagagggtcagcgaggagggccgatcctggcaccagaggagattaagacaatctttggtagcattcccgacatattcgacgtccatacaaagatcaaagacgacttggaagacttgattgtgaattgggatgaaagtaagagtataggcgacatcttcctgaaatattctaaagatctagtcaagacttaccccccatttgttaattttttcgaaatgtccaaagagacaataataaagtgcgagaagcagaagcctagatttcatgctttccttaagatcaatcaggccaagcccgaatgcggacgccaatccctcgtggagctgctgatccggcctgttcagcgactgccctcggttgcactcctgctgaatgatctcaaaaaacacaccgcagacgagaatcccgacaagtctaccctcgagaaagccatcggaagcctcaaagaagtaatgacacatattaacgaagataaacggaagacagaagcccaaaagcaaatcttcgatgtcgtgtatgaagtggacgggtgtcccgccaatctactgtcgtcgcacagatcgctggtgcagagggtagagacaatctcactcggcgaacatccatgcgataggggtgagcaggtgaccctatttctttttaacgattgcctcgagattgcccggaaaaggcataaggtcattggaactttcagatcacctcatggacagaccaggcctccagcttccctcaaacatatccacctcatgcccctctcccagatcaaaaaggtgcttgacatacgggaaactgaagattgtcataatgcatttgccttgttggtgcgacctccaacagagcaggctaatgtcttattgtcatttcagatgacctcagatgaactccctaaggaaaattggcttaagatgctgtgcaggcatgtggctaacaccatctgtaaggccgacgctgaaaaccttatctacacagccgacccagagagctttgaagtcaacaccaaagatatggattcaaccctcagtagggcctcaagagctattaagaaaacctcaaaaaaggtaacaagagctttttctttttctaaaacccccaaaagagccctaagaagggcattgatgacttctcacggctccgtcgaagggagatccccaagtagtaatgataagcacgtgatgagtaggctcagcagcacctctagtttggctggaataccttctccctcccttgtctccctgccttcattttttgaaagaaggtctcataccttgtcccgctccaccactcatttgatctag

SEQ ID NO: 92816 - DNA, 2745 bp, Artificial Sequence
  derived and/or modified sequence
atggctgaaaattctgtgctgaccagcaccactggaagaaccagcctggccgacagcagcatctttgacagcaaggtgacagagatcagcaaggagaacctgctgattggcagcaccagctatgtggaggaggagatgccccagatcgagaccagggtcatcctggtgcaggaggccggcaagcaggaggagctgatcaaggccctgaagaccatcaagatcatggaggtgcctgtgatcaagatcaaggagagctgccctgggaagagtgatgagaagctgatcaagagcgtcatcaacatggacatcaaggtgggctttgtgaagatggagagcgtggaggagtttgagggcctggacagccctgagtttgaaaatgtgtttgtggtgacagacttccaggacagcgtcttcaatgacctgtacaaggctgactgccgggtgattggcccccctgtggtgctgaactgcagccagaagggggagcccctgcccttcagctgccggcccctgtactgcacctccatgatgaacctggtgctgtgcttcaccggcttcaggaagaaggaggagctggtgcggctggtgaccctggtgcaccacatgggcggcgtcatcaggaaggacttcaacagcaaggtgacccacctggtggccaactgcacccagggcgagaagttccgggtggccgtgtccctgggcacccccatcatgaagccagagtggatctacaaggcctgggagaggagaaatgagcaggacttctatgctgctgtggatgacttcagaaatgagttcaaggtgccccccttccaggactgcatcctgtccttcctgggcttcagtgatgaggagaagaccaacatggaggagatgacagagatgcagggcggcaagtacctgcccctgggagatgagcgctgcacccacctggtggtggaggagaacatcgtgaaggacctgccctttgagcccagcaagaagctgtatgtggtgaagcaggagtggttctggggcagcatccagatggatgcccgggccggggagaccatgtacctgtatgagaaggccaacaccccagagctgaagaagtctgtgtccatgctgagcctgaacacccccaacagcaacaggaagagaagaaggctgaaggagaccctggcccagctgagccgggagacagatgtgagccccttcccccccaggaagaggcccagcgctgagcacagcctgagcatcggcagcctgctggacatcagcaacaccccagagagcagcatcaactatggagacacccccaagagctgcaccaagagcagcaagagcagcacccctgtgcccagcaagcagagcgcccgctggcaggtggccaaggagctgtaccagacagagagcaactacgtgaacatcctggccaccatcatccagctgttccaggtgcccctggaggaggagggccagagaggaggccccatcctggcccctgaggagatcaagaccatcttcggcagcatcccagacatctttgatgtgcacaccaagatcaaggatgacctggaggacctgattgtgaactgggatgagagcaagagcatcggggacatcttcctgaagtacagcaaggacctggtgaagacctaccccccatttgtgaacttctttgagatgagcaaggagaccatcatcaagtgtgagaagcagaagccccgcttccacgccttcctgaagatcaaccaggccaagccagaatgtggccggcagagcctggtggagctgctgatccggcctgtgcagaggctgcccagcgtggccctgctgctgaatgacctgaagaagcacacagcagatgaaaatccagacaagagcaccctggagaaggccatcggcagcctgaaggaggtgatgacccacatcaatgaagacaagaggaagacagaggcccagaagcagatctttgatgtggtgtatgaggtggatggctgcccagccaacctgctgagcagccacaggagcctggtgcagagggtggagaccatcagcctgggggagcacccctgtgacagaggagagcaggtgaccctcttcctgttcaatgactgcctggagatcgccaggaagaggcacaaggtgattggcaccttccgcagcccccacggccagacccggcccccagccagcctgaagcacatccacctgatgcccctgagccagatcaagaaggtgctggacatccgggagacagaggactgccacaatgcctttgccctgctggtgcggcccccaacagagcaggccaacgtgctgctgtccttccagatgaccagtgatgagctgcccaaggagaactggctgaagatgctgtgccgccacgtggccaacaccatctgcaaggcagatgctgaaaatctcatctacacagctgaccctgagagctttgaggtgaacaccaaggacatggacagcaccctgagccgggccagccgggccatcaagaagaccagcaagaaggtgacccgggccttctccttcagcaagacccccaagagggccctgcggcgggccctgatgaccagccacggctctgtggagggccgcagccccagcagcaatgacaagcacgtgatgagccggctgagcagcaccagcagcctggccggcatccccagccccagcctggtgtccctgcccagcttctttgaaagaagaagccacaccctgagccgcagcaccacccacctgatctag

SEQ ID NO: 92817 - DNA, 2745 bp, Artificial Sequence
  derived and/or modified sequence
atggccgagaacagcgtgctgaccagcaccaccggccggaccagcttggccgactcctccatcttcgactccaaagtgacggagatttccaaagagaatctgcttatcggatccacaagttacgtcgaagaggaaatgcctcagatcgagacaagagtcattttggtgcaggaggctggcaagcaagaggaactcattaaagccctgaagactatcaagatcatggaagtgccagttatcaagatcaaggagagttgtcccgggaaaagcgacgagaagctgatcaagtctgttattaatatggacattaaggtaggcttcgtaaaaatggagtctgtggaagagttcgagggcctagattcccctgagttcgaaaatgtttttgtggtaaccgattttcaagatagtgtctttaacgacttatataaagctgactgcagagtcataggccctcctgtggtgctaaactgctcccaaaaaggcgaaccattaccctttagctgtaggccgttgtattgtaccagtatgatgaacctagtgttatgctttactggattccgaaaaaaggaggagctggtcagactcgttaccttggtgcaccatatgggcggcgtgattagaaaagacttcaattcaaaggtcacgcacttagtcgccaactgcacccaaggcgaaaaattcagagtcgccgtgagcctcggcacaccaattatgaaacccgagtggatatacaaggcctgggagcgccgcaatgaacaggatttttatgccgcagtcgacgatttccgcaacgagttcaaggtccccccattccaggactgtatattgagcttcctcggtttctccgacgaagagaagacaaacatggaagagatgacagagatgcaaggcgggaagtacctaccactgggagacgagagatgcacccacctggtcgtggaggagaatatagtgaaagatttgccttttgaaccgtcaaagaaactctatgtggtgaagcaggaatggttctggggtagcatccagatggacgccagagcaggggagacgatgtatctatacgagaaggccaacacacctgaactgaagaaatccgtatccatgctatcccttaatactccgaactctaatcgcaagcggcgccggctaaaagaaacactcgcgcagttgtcaagggagaccgacgtaagcccttttccaccccgcaaaagaccatccgcagaacattcactatcaattgggtcactcctggacattagtaatacccctgaatctagcattaactacggtgataccccaaaatcttgcacgaaatcgtccaagagctccactcctgtgcctagcaaacaatccgccaggtggcaggtggccaaagaactgtaccagacagaatcaaattacgtgaacattctggccaccataattcaactcttccaggtacctttagaggaggagggccagagaggaggccctattttggctcctgaagaaatcaagacaatatttggctcgattccggatattttcgacgtccatactaaaatcaaagacgatctggaagacctaatcgtgaattgggacgagagtaagtcgattggagatatctttctgaaatatagtaaagaccttgtgaaaacatatccacctttcgtgaattttttcgagatgtctaaggagaccataatcaagtgtgaaaagcagaagccacgctttcacgccttcctgaagatcaatcaagccaagccagagtgtggtcggcagtccttggtcgaattgctgattaggccagtccagcgcctgcctagtgtggcactgctgctcaatgatctgaagaaacacaccgcggatgagaacccggacaagtccacactggaaaaagccatcggcagcctcaaagaggtgatgacgcacattaatgaggataagcgaaagacagaagcacaaaagcagatcttcgatgtcgtctatgaggtggatggctgtccagctaatttgttgagtagtcataggagccttgttcagcgtgtggagactatttcactcggggaacatccctgtgataggggggaacaggtgacccttttcttattcaatgattgcttggagatcgctcgcaagcgccataaggtgattggcacttttaggtcccctcacggacagacccgtcctccagcctccctgaagcacatccacctgatgcctttgtcacagataaagaaagttctggacattcgcgagacggaggactgccataatgcctttgcccttctcgtgaggcctcctaccgagcaggctaatgtgcttctaagttttcagatgacatccgacgaacttcccaaagagaactggctgaaaatgctgtgtcggcacgtggctaacacaatctgtaaggccgatgccgaaaatctaatctacaccgcggacccggaaagctttgaggtgaatacgaaggatatggattccactctttccagggccagccgcgccatcaaaaagacatcaaagaaggtcacccgggcttttagcttctccaagactcccaagagagctctgcggagggctctgatgacgtctcatgggagcgttgaagggcgatcccccagctcaaatgacaagcacgtgatgtcgcgcctcagctccacttcatccttggcagggattccctcgcctagtctcgtctctctcccaagcttttttgagagaaggagccatactctgagtagatcaaccactcatctgatctag

SEQ ID NO: 92818 - DNA, 2745 bp, Artificial Sequence
  derived and/or modified sequence
atggccgagaacagcgtgctgaccagcaccaccggccggaccagcctggcagactcaagcatctttgattccaaggttaccgagatttcgaaagaaaatctgctgatcggtagcacatcttatgtggaagaggagatgcctcaaatcgaaactcgggttattctggtgcaagaagcgggcaagcaagaagagctgataaaggctcttaagacaattaaaattatggaagttccggtgattaagatcaaggagtcatgtcccggtaagtcagatgagaagctgataaaatccgtgatcaacatggacatcaaggtcgggtttgtgaaaatggagtcggtggaggaatttgagggactggattccccggagtttgagaatgtgttcgtcgttaccgactttcaggactccgtgtttaatgacctttacaaagcagattgccgggtgattgggccacctgtcgtcctcaactgctcacagaaaggagaacccctgccattcagctgcaggccactttattgcaccagtatgatgaatctggtgctgtgttttacgggcttcagaaaaaaggaggaactagtgcggcttgtgacactggtgcaccatatgggcggcgtcatcagaaaggacttcaactcaaaagtaacccatctggtagccaactgtactcagggtgaaaagttccgcgtcgctgtttcccttggcacacccattatgaagcctgaatggatatataaagcctgggagagacggaatgaacaggacttttacgcagccgtggacgatttcaggaacgaatttaaggtgccacccttccaggattgtatactctcattcctgggcttctcagatgaggagaaaaccaacatggaagaaatgaccgaaatgcagggaggcaagtacttgcctctgggagatgagcggtgcactcatttggttgtggaagaaaatatagtgaaggatcttcccttcgagccttctaaaaaattgtacgtagtcaaacaggagtggttctggggaagcatccagatggatgctagggccggggagaccatgtacctgtacgaaaaggctaacacccccgaattaaaaaagtccgtgtcaatgctgtccctgaacacacctaattcaaatcgtaaacgcagacgactgaaagagacactggcccagctgtcaagagaaaccgatgtcagcccctttccccctagaaagcgaccttccgccgaacactccctgtccatcgggtctttgctggatattagcaacaccccggagagttctattaactacggcgatacacctaagtcctgtacaaaatcctcaaagtcgtccacccctgtgccgagtaagcagtccgctcggtggcaggtggcaaaggagctgtatcagaccgaatccaattacgtcaacatcctggcaactataatacaactgtttcaggtaccactggaagaggagggtcagagaggcggccccatcctagctccagaggaaatcaagacaatatttgggtctatcccagatatcttcgatgtgcatacaaagataaaagatgatctagaggatctgatagtcaactgggacgagtccaaatccatcggtgacatattcttaaaatatagtaaagatctcgttaaaacgtacccaccctttgttaattttttcgagatgtctaaagagaccatcataaagtgcgagaagcagaagcctagatttcatgcttttctcaagatcaatcaggctaaaccagaatgcggaaggcagtcgctggtcgagctgctaattcggcccgtgcagcggcttccttctgttgccctgttgctgaatgatctcaaaaagcacactgctgacgagaacccagacaagagtacgctggaaaaggccattggcagtctcaaagaggtgatgacgcatataaatgaagataaacgcaagactgaggcccagaaacagattttcgacgttgtttacgaggtggatggatgcccagccaatctgctgagttcacacagaagcttagtccagagggttgaaacaatctcactaggcgaacatccttgcgaccgaggtgagcaagttactctgtttctgtttaacgactgtctcgaaatagcgcggaaacgccataaggtgatcggaaccttccgttcccctcacggccaaaccagaccaccagcgtctctcaaacacatacatctcatgcccctgagccagataaagaaagtgctcgacatacgggaaaccgaagactgtcacaatgcattcgctttactggtgagacctcctactgaacaggcaaatgttctccttagcttccaaatgacatcggacgaattaccgaaagagaactggctaaagatgttatgtagacatgtcgcaaatactatatgtaaagctgacgcagaaaatctgatctacacggctgatcctgaaagcttcgaagtgaacaccaaagacatggattcaaccctctctcgagctagccgggccatcaaaaagacgtccaagaaagtgactcgtgccttctccttcagtaaaactcccaaaagggccctgcgcagagcactcatgacttctcatggatccgtggaaggccgaagtccctcttcaaacgataagcatgttatgagcagactttcctctaccagttctctggcaggaattccaagcccatcactggtgtctctgcctagcttttttgaacggcggtcgcacacactgtccagaagcactacacacctgatttag

SEQ ID NO: 92819 - DNA, 2745 bp, Artificial Sequence
  derived and/or modified sequence
atggccgagaattctgtgctgacctccacaacgggcagaaccagcctggccgatagttccatctttgacagcaaggtgaccgagattagcaaagagaatttattgatcggctcgacaagctacgtagaggaggagatgccacaaatcgagacccgtgtaatcctggtgcaggaggctggcaagcaagaagagttaatcaaagctctgaagactatcaagattatggaagtgcctgtgatcaaaattaaagaatcatgccctggcaagtcggatgaaaaactgatcaaatctgtcatcaatatggacatcaaggtgggctttgtcaagatggagtcagtcgaggagttcgaggggctagacagccccgagttcgaaaacgtatttgtagttacggacttccaggacagcgtcttcaatgatttgtacaaagcagattgcagagtcattgggccacccgtggtcctaaattgtagtcagaagggggagcctctcccattcagctgtcgcccactttattgtacctccatgatgaacctggtgttgtgttttaccggttttcgcaaaaaagaggagctagtgcgcctggtgacactggtgcatcacatgggcggagtcatacggaaagattttaacagcaaagtcacacacttagttgccaactgtacgcagggcgagaaattcagagtggcagtgtccttagggacccctattatgaagccggagtggatttataaggcttgggagcgacgaaacgagcaggacttctatgcagcggtggatgacttccggaacgaattcaaggttcctccttttcaggactgtatactgtcttttctgggatttagcgacgaggagaaaactaacatggaagagatgaccgagatgcaggggggaaagtacctgccactcggagatgagcggtgcacccatctggtagtggaagaaaacattgttaaggacctcccattcgagccctccaagaagctgtatgttgttaagcaggagtggttctgggggtcgattcagatggacgccagggccggtgagaccatgtacctgtacgagaaagctaacacgcccgaattgaagaaatccgttagtatgttgtccctaaacaccccaaactctaatagaaaaaggcgacgcctgaaagagaccctggcccaactgtcacgggagacagatgtctctccctttcctccacgtaagcggccatcagctgagcactctttgagcatcgggtccctgcttgacatttctaacacaccggagtcatccattaattacggcgacactcctaaatcatgcaccaagagttccaagtcttcaacaccagtgcctagtaaacagtccgcacggtggcaggttgccaaggaattgtatcaaaccgagtccaactacgtgaacatcctggccaccatcatccaattatttcaggtgccgcttgaggaggaaggacagcggggaggacctatcctggcacctgaagagataaagactatttttggcagtattcctgacattttcgacgtgcacacgaagattaaggacgacctcgaagatcttattgtgaactgggatgagagcaagtcaattggagacatcttcctcaagtactctaaagacctggtaaaaacttacccacccttcgtcaacttcttcgagatgtctaaagaaacgattataaagtgtgagaagcaaaagcctagatttcacgcgttcctaaaaataaaccaggctaagcccgagtgtgggaggcagtctctagttgaactcctgataaggcccgtgcaacggctgccgagcgtggccctcttactgaatgacctgaagaagcacacagccgacgaaaatccggataagtcaaccctggagaaggcaattgggtctctgaaggaggtcatgacacatatcaatgaggacaaacggaagacagaagcccagaagcagatatttgatgtggtttacgaagtggatgggtgcccagccaatctgttgtcgagccatcgcagtctcgtgcagagagtcgaaacaatatccctgggcgaacacccatgtgaccgcggagaacaagtgaccctcttcctgtttaacgactgcctggaaattgccaggaaaagacataaagtgattggaacctttcgcagcccgcatggccaaaccagaccccctgccagtctcaagcacattcacttaatgcccttgagccagatcaagaaagtcttggacattcgcgagaccgaggactgtcataacgcttttgcgctgctcgtcagaccacctactgagcaggctaatgttctactctcgttccagatgacctcggacgagcttcccaaggaaaactggcttaagatgctctgtcgtcatgtggccaataccatctgcaaagccgacgctgaaaacctcatctatactgcagatcccgaatcttttgaagtaaacaccaaggatatggattctacacttagtcgcgcttctagggccattaaaaagacaagcaagaaggtgactagggcattctctttttcaaagacacccaagcgagcgctgaggcgggctctcatgacgtctcatggaagcgtggagggaagaagccccagctccaacgacaagcacgtcatgtcccgcctgagttctaccagctccctggcgggaattcctagcccatccttggtctctctgccctcgttctttgaaagaaggtcccacactctgtctaggtctacgactcatctgatatag

SEQ ID NO: 92820 - DNA, 2745 bp, Artificial Sequence
  derived and/or modified sequence
atggccgagaatagcgttctgacctctaccaccgggcgaaccagcctcgctgacagcagcatctttgactcaaaagtcacagaaatcagcaaggaaaacctgttaattggaagcacatcatatgtagaagaggagatgccccagattgagacgcgagtgatcctggtgcaagaagccggaaaacaggaggagctgattaaggcgcttaagaccattaagattatggaggtccccgtcattaaaattaaggaaagttgtcctggcaaaagtgatgagaagctcatcaaaagcgttataaatatggatattaaggtggggttcgtaaaaatggagagtgttgaagagtttgagggattagactctcccgaatttgagaacgtgttcgtggtgaccgattttcaggattccgtgttcaacgatctgtacaaagcggactgtagagtgatcggcccaccagtggtactgaactgcagccagaaaggagagccactgccattttcatgccgacctctctattgtacctccatgatgaatctggtgttatgtttcacaggttttcggaaaaaggaggaactcgtaagactggtaaccttggtacaccacatggggggagtaatcagaaaggactttaattctaaagttacacaccttgtggcaaattgcacacagggcgaaaaatttcgcgtcgctgtcagtctgggaactccaattatgaagccagaatggatctataaagcatgggagcgcaggaatgagcaggatttttacgctgccgtggacgactttaggaatgagttcaaagtgccacccttccaagactgtattctgtcgtttctgggattttctgacgaggaaaagacaaatatggaggagatgacagagatgcagggagggaaatatctccccctgggagatgagcggtgcacgcatctggtcgtcgaggaaaacatcgtgaaagatctgcccttcgagccaagtaagaaactttatgtagtgaaacaagagtggttttgggggagtatacagatggacgccagagccggagagactatgtatctgtacgagaaggcaaatacgcccgagttaaagaaaagtgtgagcatgctatctctgaacacaccaaacagcaacaggaagcggcgtagattaaaggagaccctggctcagctgtcaagagagactgatgtgtcaccctttcctcccagaaagcgtccgagcgccgaacattccctctcaataggatcgctgctcgatattagtaatacccctgaaagcagtatcaactacggcgatacgcctaaatcatgtacaaagtccagcaagtcatcgacccccgttccgtccaagcagtcagctaggtggcaggttgccaaggagctgtaccagaccgagagcaactatgtgaatatacttgctaccattattcagctgttccaggtccctctagaagaagagggccagcgcggaggacccatcctcgccccagaggaaataaaaacaatcttcggctcgatccccgatatcttcgatgtgcataccaagatcaaggacgacctagaggacctaatagtcaactgggacgagagcaagagtatcggcgatattttcctcaagtactcgaaggacctggtgaaaacgtaccccccttttgttaatttcttcgaaatgagtaaggaaacaattattaagtgtgagaagcagaaaccgaggtttcatgcctttcttaaaataaatcaagccaagcctgagtgcggaaggcagagcctggtggagcttctgatcagacctgttcaacgattgcccagcgtggctttgctgctcaacgacttgaagaagcataccgcggatgagaatccagacaagtccacactggagaaagccatcgggagtcttaaggaagtcatgacccacatcaatgaagataaacgaaaaacggaagctcaaaaacaaatcttcgatgtggtctatgaggtggatgggtgcccggctaacttgctgagcagtcatagaagcctggttcaacgcgttgagacaatctcccttggagagcatccctgcgatagaggcgaacaggtaacactattcctcttcaacgattgccttgagattgctaggaagcggcataaggtgatcggaacttttcggtctccacacggtcagacccggccaccggcaagcctgaagcacattcacctgatgccattatcacagattaaaaaagtgttagacattagagaaacagaagactgtcacaacgcattcgctctcctggtccgtccacctactgagcaggccaacgttttactctcgtttcagatgacaagcgacgagcttccaaaagagaactggttaaagatgctctgccgtcacgttgccaacacaatctgcaaggctgacgccgaaaatctgatatacacagccgatcccgaatctttcgaagtaaacacaaaggacatggatagcaccctctcacgggcttcgagagccatcaaaaagaccagcaagaaagtcacgcgcgcattctctttctcaaagacccccaaaagggccctgcgtcgagctctaatgacatcccacggttctgtcgaaggcagatcaccctctagtaatgacaaacatgtgatgtctcgcctcagctctacctcaagtcttgccggaattccctcaccatccctcgtttctctgccaagtttctttgaacgccgtagccacactttgagccgctccaccacccacctaatctag

SEQ ID NO: 92821 - protein, 883 aa, Artificial Sequence
  derived and/or modified sequence
MAENSVLTSTTGRTSLADSSIFDSKVTEISKENLLIGSTSYVEEEMPQIETRVILVQEAGKQEELIKALKDIKVGFVKMESVEEFEGLDSPEFENVFVVTDFQDSVFNDLYKADCRVIGPPVVLNCSQKGEPLPFSCRPLYCTSMMNLVLCFTGFRKKEELVRLVTLVHHMGGVIRKDFNSKVTHLVANCTQGEKFRVAVSLGTPIMKPEWIYKAWERRNEQDFYAAVDDFRNEFKVPPFQDCILSFLGFSDEEKTNMEEMTEMQGGKYLPLGDERCTHLVVEENIVKDLPFEPSKKLYVVKQEWFWGSIQMDARAGETMYLYEKANTPELKKSVSMLSLNTPNSNRKRRRLKETLAQLSRETDVSPFPPRKRPSAEHSLSIGSLLDISNTPESSINYGDTPKSCTKSSKSSTPVPSKQSARWQVAKELYQTESNYVNILATIIQLFQVPLEEEGQRGGPILAPEEIKTIFGSIPDIFDVHTKIKDDLEDLIVNWDESKSIGDIFLKYSKDLVKTYPPFVNFFEMSKETIIKCEKQKPRFHAFLKINQAKPECGRQSLVELLIRPVQRLPSVALLLNDLKKHTADENPDKSTLEKAIGSLKEVMTHINEDKRKTEAQKQIFDVVYEVDGCPANLLSSHRSLVQRVETISLGEHPCDRGEQVTLFLFNDCLEIARKRHKVIGTFRSPHGQTRPPASLKHIHLMPLSQIKKVLDIRETEDCHNAFALLVRPPTEQANVLLSFQMTSDELPKENWLKMLCRHVANTICKADAENLIYTADPESFEVNTKDMDSTLSRASRAIKKTSKKVTRAFSFSKTPKRALRRALMTSHGSVEGRSPSSNDKHVMSRLSSTSSLAGIPSPSLVSLPSFFERRSHTLSRSTTHLI

SEQ ID NO: 92822 - protein, 882 aa, Artificial Sequence
  derived and/or modified sequence
MAENSVLTSTTGRTSLADSSIFDSKVTEISKENLLIGSTSYVEEMPQIETRVILVQEAGKQEELIKALKDIKVGFVKMESVEEFEGLDSPEFENVFVVTDFQDSVFNDLYKADCRVIGPPVVLNCSQKGEPLPFSCRPLYCTSMMNLVLCFTGFRKKEELVRLVTLVHHMGGVIRKDFNSKVTHLVANCTQGEKFRVAVSLGTPIMKPEWIYKAWERRNEQDFYAAVDDFRNEFKVPPFQDCILSFLGFSDEEKTNMEEMTEMQGGKYLPLGDERCTHLVVEENIVKDLPFEPSKKLYVVKQEWFWGSIQMDARAGETMYLYEKANTPELKKSVSMLSLNTPNSNRKRRRLKETLAQLSRETDVSPFPPRKRPSAEHSLSIGSLLDISNTPESSINYGDTPKSCTKSSKSSTPVPSKQSARWQVAKELYQTESNYVNILATIIQLFQVPLEEEGQRGGPILAPEEIKTIFGSIPDIFDVHTKIKDDLEDLIVNWDESKSIGDIFLKYSKDLVKTYPPFVNFFEMSKETIIKCEKQKPRFHAFLKINQAKPECGRQSLVELLIRPVQRLPSVALLLNDLKKHTADENPDKSTLEKAIGSLKEVMTHINEDKRKTEAQKQIFDVVYEVDGCPANLLSSHRSLVQRVETISLGEHPCDRGEQVTLFLFNDCLEIARKRHKVIGTFRSPHGQTRPPASLKHIHLMPLSQIKKVLDIRETEDCHNAFALLVRPPTEQANVLLSFQMTSDELPKENWLKMLCRHVANTICKADAENLIYTADPESFEVNTKDMDSTLSRASRAIKKTSKKVTRAFSFSKTPKRALRRALMTSHGSVEGRSPSSNDKHVMSRLSSTSSLAGIPSPSLVSLPSFFERRSHTLSRSTTHLI

SEQ ID NO: 92823 - protein, 106 aa, Artificial Sequence
  derived and/or modified sequence
MAENSVLTSTTGRTSLADSSIFDSKVTEISKENLLIGSTSYVEEEMPQIETRVILVQEAGKQEELIKALKDIKVGFVKMESVEEFEGLDSPEFENVFVVTDFQDSV

SEQ ID NO: 92824 - DNA, 480 bp, Artificial Sequence
  derived and/or modified sequence
atggccgagaacagcgtgctgaccagcaccaccggcagaaccagcctggccgacagcagcatcttcgacagcaaggtgaccgagatcagcaaggagaacctgctgatcggcagcaccagctacgtggaggaggagatgccccagatcgagaccagagtgatcctggtgcaggaggccggcaagcaggaggagctgatcaaggccctgaaggacatcaaggtgggcttcgtgaagatggagagcgtggaggagttcgagggcctggacagccccgagttcgagaacgtgttcgtggtgaccgacttccaggacagcgtgttcaacgacctgtacaaggccgactgcagagtgatcggcccccccgtggtgctgaactgcagccagaagggcgagcccctgcccttcagctgcagacccctgtactgcaccagcatgatgaacctggtgctgtgcttcaccggcttcagaaagaaggagtag

SEQ ID NO: 92825 - DNA, 2649 bp, Artificial Sequence
  derived and/or modified sequence
atggccgagaacagcgtgctgaccagcaccaccggcagaaccagcctggccgacagcagcatcttcgacagcaaggtgaccgagatcagcaaggagaacctgctgatcggcagcaccagctacgtggaggagatgccccagatcgagaccagagtgatcctggtgcaggaggccggcaagcaggaggagctgatcaaggccctgaaggacatcaaggtgggcttcgtgaagatggagagcgtggaggagttcgagggcctggacagccccgagttcgagaacgtgttcgtggtgaccgacttccaggacagcgtgttcaacgacctgtacaaggccgactgcagagtgatcggcccccccgtggtgctgaactgcagccagaagggcgagcccctgcccttcagctgcagacccctgtactgcaccagcatgatgaacctggtgctgtgcttcaccggcttcagaaagaaggaggagctggtgagactggtgaccctggtgcaccacatgggcggcgtgatcagaaaggacttcaacagcaaggtgacccacctggtggccaactgcacccagggcgagaagttcagagtggccgtgagcctgggcacccccatcatgaagcccgagtggatctacaaggcctgggagagaagaaacgagcaggacttctacgccgccgtggacgacttcagaaacgagttcaaggtgccccccttccaggactgcatcctgagcttcctgggcttcagcgacgaggagaagaccaacatggaggagatgaccgagatgcagggcggcaagtacctgcccctgggcgacgagagatgcacccacctggtggtggaggagaacatcgtgaaggacctgcccttcgagcccagcaagaagctgtacgtggtgaagcaggagtggttctggggcagcatccagatggacgccagagccggcgagaccatgtacctgtacgagaaggccaacacccccgagctgaagaagagcgtgagcatgctgagcctgaacacccccaacagcaacagaaagagaagaagactgaaggagaccctggcccagctgagcagagagaccgacgtgagccccttcccccccagaaagagacccagcgccgagcacagcctgagcatcggcagcctgctggacatcagcaacacccccgagagcagcatcaactacggcgacacccccaagagctgcaccaagagcagcaagagcagcacccccgtgcccagcaagcagagcgccagatggcaggtggccaaggagctgtaccagaccgagagcaactacgtgaacatcctggccaccatcatccagctgttccaggtgcccctggaggaggagggccagagaggcggccccatcctggcccccgaggagatcaagaccatcttcggcagcatccccgacatcttcgacgtgcacaccaagatcaaggacgacctggaggacctgatcgtgaactgggacgagagcaagagcatcggcgacatcttcctgaagtacagcaaggacctggtgaagacctacccccccttcgtgaacttcttcgagatgagcaaggagaccatcatcaagtgcgagaagcagaagcccagattccacgccttcctgaagatcaaccaggccaagcccgagtgcggcagacagagcctggtggagctgctgatcagacccgtgcagagactgcccagcgtggccctgctgctgaacgacctgaagaagcacaccgccgacgagaaccccgacaagagcaccctggagaaggccatcggcagcctgaaggaggtgatgacccacatcaacgaggacaagagaaagaccgaggcccagaagcagatcttcgacgtggtgtacgaggtggacggctgccccgccaacctgctgagcagccacagaagcctggtgcagagagtggagaccatcagcctgggcgagcacccctgcgacagaggcgagcaggtgaccctgttcctgttcaacgactgcctggagatcgccagaaagagacacaaggtgatcggcaccttcagaagcccccacggccagaccagaccccccgccagcctgaagcacatccacctgatgcccctgagccagatcaagaaggtgctggacatcagagagaccgaggactgccacaacgccttcgccctgctggtgagaccccccaccgagcaggccaacgtgctgctgagcttccagatgaccagcgacgagctgcccaaggagaactggctgaagatgctgtgcagacacgtggccaacaccatctgcaaggccgacgccgagaacctgatctacaccgccgaccccgagagcttcgaggtgaacaccaaggacatggacagcaccctgagcagagccagcagagccatcaagaagaccagcaagaaggtgaccagagccttcagcttcagcaagacccccaagagagccctgagaagagccctgatgaccagccacggcagcgtggagggcagaagccccagcagcaacgacaagcacgtgatgagcagactgagcagcaccagcagcctggccggcatccccagccccagcctggtgagcctgcccagcttcttcgagagaagaagccacaccctgagcagaagcaccacccacctgatctag

SEQ ID NO: 92826 - DNA, 321 bp, Artificial Sequence
  derived and/or modified sequence
atggccgagaacagcgtgctgaccagcaccaccggcagaaccagcctggccgacagcagcatcttcgacagcaaggtgaccgagatcagcaaggagaacctgctgatcggcagcaccagctacgtggaggaggagatgccccagatcgagaccagagtgatcctggtgcaggaggccggcaagcaggaggagctgatcaaggccctgaaggacatcaaggtgggcttcgtgaagatggagagcgtggaggagttcgagggcctggacagccccgagttcgagaacgtgttcgtggtgaccgacttccaggacagcgtgtag

SEQ ID NO: 92827 - DNA, 2652 bp, Artificial Sequence
  derived and/or modified sequence
atggccgagaacagcgtgctgaccagcaccaccggcagaaccagcctggccgacagcagcatcttcgacagcaaggtgaccgagatcagcaaggagaacctgctgatcggcagcaccagctacgtggaggaggagatgccccagatcgagaccagagtgatcctggtgcaggaggccggcaagcaggaggagctgatcaaggccctgaaggacatcaaggtgggcttcgtgaagatggagagcgtggaggagttcgagggcctggacagccccgagttcgagaacgtgttcgtggtgaccgacttccaggacagcgtgttcaacgacctgtacaaggccgactgcagagtgatcggcccccccgtggtgctgaactgcagccagaagggcgagcccctgcccttcagctgcagacccctgtactgcaccagcatgatgaacctggtgctgtgcttcaccggcttcagaaagaaggaggagctggtgagactggtgaccctggtgcaccacatgggcggcgtgatcagaaaggacttcaacagcaaggtgacccacctggtggccaactgcacccagggcgagaagttcagagtggccgtgagcctgggcacccccatcatgaagcccgagtggatctacaaggcctgggagagaagaaacgagcaggacttctacgccgccgtggacgacttcagaaacgagttcaaggtgccccccttccaggactgcatcctgagcttcctgggcttcagcgacgaggagaagaccaacatggaggagatgaccgagatgcagggcggcaagtacctgcccctgggcgacgagagatgcacccacctggtggtggaggagaacatcgtgaaggacctgcccttcgagcccagcaagaagctgtacgtggtgaagcaggagtggttctggggcagcatccagatggacgccagagccggcgagaccatgtacctgtacgagaaggccaacacccccgagctgaagaagagcgtgagcatgctgagcctgaacacccccaacagcaacagaaagagaagaagactgaaggagaccctggcccagctgagcagagagaccgacgtgagccccttcccccccagaaagagacccagcgccgagcacagcctgagcatcggcagcctgctggacatcagcaacacccccgagagcagcatcaactacggcgacacccccaagagctgcaccaagagcagcaagagcagcacccccgtgcccagcaagcagagcgccagatggcaggtggccaaggagctgtaccagaccgagagcaactacgtgaacatcctggccaccatcatccagctgttccaggtgcccctggaggaggagggccagagaggcggccccatcctggcccccgaggagatcaagaccatcttcggcagcatccccgacatcttcgacgtgcacaccaagatcaaggacgacctggaggacctgatcgtgaactgggacgagagcaagagcatcggcgacatcttcctgaagtacagcaaggacctggtgaagacctacccccccttcgtgaacttcttcgagatgagcaaggagaccatcatcaagtgcgagaagcagaagcccagattccacgccttcctgaagatcaaccaggccaagcccgagtgcggcagacagagcctggtggagctgctgatcagacccgtgcagagactgcccagcgtggccctgctgctgaacgacctgaagaagcacaccgccgacgagaaccccgacaagagcaccctggagaaggccatcggcagcctgaaggaggtgatgacccacatcaacgaggacaagagaaagaccgaggcccagaagcagatcttcgacgtggtgtacgaggtggacggctgccccgccaacctgctgagcagccacagaagcctggtgcagagagtggagaccatcagcctgggcgagcacccctgcgacagaggcgagcaggtgaccctgttcctgttcaacgactgcctggagatcgccagaaagagacacaaggtgatcggcaccttcagaagcccccacggccagaccagaccccccgccagcctgaagcacatccacctgatgcccctgagccagatcaagaaggtgctggacatcagagagaccgaggactgccacaacgccttcgccctgctggtgagaccccccaccgagcaggccaacgtgctgctgagcttccagatgaccagcgacgagctgcccaaggagaactggctgaagatgctgtgcagacacgtggccaacaccatctgcaaggccgacgccgagaacctgatctacaccgccgaccccgagagcttcgaggtgaacaccaaggacatggacagcaccctgagcagagccagcagagccatcaagaagaccagcaagaaggtgaccagagccttcagcttcagcaagacccccaagagagccctgagaagagccctgatgaccagccacggcagcgtggagggcagaagccccagcagcaacgacaagcacgtgatgagcagactgagcagcaccagcagcctggccggcatccccagccccagcctggtgagcctgcccagcttcttcgagagaagaagccacaccctgagcagaagcaccacccacctgatctag

SEQ ID NO: 92828 - DNA, 4087 bp, Artificial Sequence
  derived and/or modified sequence
tctggagactcctgcctatgggaaagaggttgacatcacgcgccaatcggcatggctcttagagagagcagcttagtttttgaatcggttgtggcggccgccggcgaggaatggcggtatttgtgagaggagtcggcgtttgaagaggtggaactcctagggcttttttgagagtgctgatttagaagaatacaaatcatggctgaaaatagtgtattaacatccactactgggaggactagcttggcagactcttccatttttgattctaaagttactgagatttccaaggaaaacttacttattggatctacttcatatgtagaagaagagatgcctcagattgaaacaagagtgatattggttcaagaagctggaaaacaagaagaacttataaaagccttaaaggacattaaagtgggctttgtaaagatggagtcagtggaagaatttgaaggtttggattctccggaatttgaaaatgtatttgtagtcacggactttcaggattctgtctttaatgacctctacaaggctgattgtagagttattggaccaccagttgtattaaattgttcacaaaaaggagagcctttgccattttcatgtcgcccgttgtattgtacaagtatgatgaatctagtactatgctttactggatttaggaaaaaagaagaactagtcaggttggtgacattggtccatcacatgggtggagttattcgaaaagactttaattcaaaagttacacatttggtggcaaattgtacacaaggagaaaaattcagggttgctgtgagtctaggtactccaattatgaagccagaatggatttataaagcttgggaaaggcggaatgaacaggatttctatgcagcagttgatgactttagaaatgaatttaaagttcctccatttcaagattgtattttaagtttcctgggattttcagatgaagagaaaaccaatatggaagaaatgactgaaatgcaaggaggtaaatatttaccgcttggagatgaaagatgcactcaccttgtagttgaagagaatatagtaaaagatcttccctttgaaccttcaaagaaactttatgttgtcaagcaagagtggttctggggaagcattcaaatggatgcccgagctggagaaactatgtatttatatgaaaaggcaaatactcctgagctcaagaaatcagtgtcaatgctttctctaaatacccctaacagcaatcgcaaacgacgtcgtttaaaagaaacacttgctcagctttcaagagagacagacgtgtcaccatttccaccccgtaagcgcccatcagctgagcattccctttccatagggtcactcctagatatctccaacacaccagagtctagcattaactatggagacaccccaaagtcttgtactaagtcttctaaaagctccactccagttccttcaaagcagtcagcaaggtggcaagttgcaaaagagctttatcaaactgaaagtaattatgttaatatattggcaacaattattcagttatttcaagtaccattggaagaggaaggacaacgtggtggacctatccttgcaccagaggagattaagactatttttggtagcatcccagatatctttgatgtacacactaagataaaggatgatcttgaagaccttatagttaattgggatgagagcaaaagcattggtgacatttttctgaaatattcaaaagatttggtaaaaacctaccctccctttgtaaacttctttgaaatgagcaaggaaacaattattaaatgtgaaaaacagaaaccaagatttcatgcttttctcaagataaaccaagcaaaaccagaatgtggacggcagagccttgttgaacttcttatccgaccagtacagaggttacccagtgttgcattacttttaaatgatcttaagaagcatacagctgatgaaaatccagacaaaagcactttagaaaaagctattggatcactgaaggaagtaatgacgcatattaatgaggataagagaaaaacagaagctcaaaagcaaatttttgatgttgtttatgaagtagatggatgcccagctaatcttttatcttctcaccgaagcttagtacagcgggttgaaacaatttctctaggtgagcacccctgtgacagaggagaacaagtaactctcttcctcttcaatgattgcctagagatagcaagaaaacggcacaaggttattggcacttttaggagtcctcatggccaaacccgacccccagcttctcttaagcatattcacctaatgcctctttctcagattaagaaggtattggacataagagagacagaagattgccataatgcttttgccttgcttgtgaggccaccaacagagcaggcaaatgtgctactcagtttccagatgacatcagatgaacttccaaaagaaaactggctaaagatgctgtgtcgacatgtagctaacaccatttgtaaagcagatgctgagaatcttatttatactgctgatccagaatcctttgaagtaaatacaaaagatatggacagtacattgagtagagcatcaagagcaataaaaaagacttcaaaaaaggttacaagagcattctctttctccaaaactccaaaaagagctcttcgaagggctcttatgacatcccacggctcagtggagggaagaagtccttccagcaatgataagcatgtaatgagtcgtctttctagcacatcatcattagcaggtatcccttctccctcccttgtcagccttccttccttctttgaaaggagaagtcatacgttaagtagatctacaactcatttgatatgaagcgttaccaaaatcttaaattatagaaatgtatagacacctcatactcaaataagaaactgacttaaatggtacttgtaattagcacttggtgaaagctggaaggaagataaataacactaaactatgctatttgatttttcttcttgaaagagtaaggtttacctgttacattttcaagttaattcatgtaaaaaatgatagtgattttgatgtaatttatctcttgtttgaatctgtcattcaaaggccaataatttaagttgctatcagctgatattagtagctttgcaaccctgatagagtaaataaattttatgggcgggtgccaaatactgctgtgaatctatttgtatagtatccatgaatgaatttatggaaatagatatttgtgcagctcaatttatgcagagattaaatgacatcataatactggatgaaaacttgcatagaattctgattaaatagtgggtctgtttcacatgtgcagtttgaagtatttaaataaccactcctttcacagtttattttcttctcaagcgttttcaagatctagcatgtggattttaaaagatttgccctcattaacaagaataacatttaaaggagattgtttcaaaatatttttgcaaattgagataaggacagaaagattgagaaacattgtatattttgcaaaaacaagatgtttgtagctgtttcagagagagtacggtatatttatggtaattttatccactagcaaatcttgatttagtttgatagtgtgtggaattttattttgaaggataagaccatgggaaaattgtggtaaagactgtttgtacccttcatgaaataattctgaagttgccatcagttttactaatcttctgtgaaatgcatagatatgcgcatgttcaactttttattgtggtcttataattaaatgtaaaattgaaaattcatttgctgtttcaaagtgtgatatctttcacaatagcctttttatagtcagtaattcagaataatcaagttcatatggataaatgcatttttatttcctatttctttagggagtgctacaaatgtttgtcacttaaatttcaagtttctgttttaatagttaactgactatagattgttttctatgccatgtatgtgccacttctgagagtagtaaatgactctttgctacattttaaaagcaattgtattagtaagaactttgtaaataaatacctaaaacccaagtgta

SEQ ID NO: 92829 - DNA, 637 bp, Artificial Sequence
  derived and/or modified sequence
aggcttcccggatccgggaactccctcgccgcaccccacccccagcagccgggccctgacgcggagtgggagaccgaagcccccagtattgctgggcatcttcgccctcacctgttggctcttttggacagaagagtctgatttagaagaatacaaatcatggctgaaaatagtgtattaacatccactactgggaggactagcttggcagactcttccatttttgattctaaagttactgagatttccaaggaaaacttacttattggatctacttcatatgtagaagaagagatgcctcagattgaaacaagagtgatattggttcaagaagctggaaaacaagaagaacttataaaagccttaaaggacattaaagtgggctttgtaaagatggagtcagtggaagaatttgaaggtttggattctccggaatttgaaaatgtatttgtagtcacggactttcaggattctgtctttaatgacctctacaaggctgattgtagagttattggaccaccagttgtattaaattgttcacaaaaaggagagcctttgccattttcatgtcgcccgttgtattgtacaagtatgatgaatctagtactatgctttactggatttaggaaaaaagaag

SEQ ID NO: 92830 - DNA, 4363 bp, Artificial Sequence
  derived and/or modified sequence
aatcggcatggctcttagagagagcagcttagtttttgaatcggttgtggcggccgccggcgaggaatggcggtatttgtgagaggagtcggcgtttgaagaggtggaactcctagggcttttttgagagtgacggagtctacctcttgttacctagactggagtgcagtggcacgatctcggctcactgcaacctctgcctcccgggttcaagcgattctcctgcctcagcctcctgagtagctgggattacaggtgcctgccaccaagcccagctaatttttgtatttttagtagagacggggtttcattgtgttggccaggctggtctcgaactcctgacctcgtgatccgcccgccttggcctcccaaagtgctaggattacaagtgtgagccaccgcgtccggcctttcaaatggtatttttgattttcctcttccagtccttaaagcagctgatttagaagaatacaaatcatggctgaaaatagtgtattaacatccactactgggaggactagcttggcagactcttccatttttgattctaaagttactgagatttccaaggaaaacttacttattggatctacttcatatgtagaagagatgcctcagattgaaacaagagtgatattggttcaagaagctggaaaacaagaagaacttataaaagccttaaaggacattaaagtgggctttgtaaagatggagtcagtggaagaatttgaaggtttggattctccggaatttgaaaatgtatttgtagtcacggactttcaggattctgtctttaatgacctctacaaggctgattgtagagttattggaccaccagttgtattaaattgttcacaaaaaggagagcctttgccattttcatgtcgcccgttgtattgtacaagtatgatgaatctagtactatgctttactggatttaggaaaaaagaagaactagtcaggttggtgacattggtccatcacatgggtggagttattcgaaaagactttaattcaaaagttacacatttggtggcaaattgtacacaaggagaaaaattcagggttgctgtgagtctaggtactccaattatgaagccagaatggatttataaagcttgggaaaggcggaatgaacaggatttctatgcagcagttgatgactttagaaatgaatttaaagttcctccatttcaagattgtattttaagtttcctgggattttcagatgaagagaaaaccaatatggaagaaatgactgaaatgcaaggaggtaaatatttaccgcttggagatgaaagatgcactcaccttgtagttgaagagaatatagtaaaagatcttccctttgaaccttcaaagaaactttatgttgtcaagcaagagtggttctggggaagcattcaaatggatgcccgagctggagaaactatgtatttatatgaaaaggcaaatactcctgagctcaagaaatcagtgtcaatgctttctctaaatacccctaacagcaatcgcaaacgacgtcgtttaaaagaaacacttgctcagctttcaagagagacagacgtgtcaccatttccaccccgtaagcgcccatcagctgagcattccctttccatagggtcactcctagatatctccaacacaccagagtctagcattaactatggagacaccccaaagtcttgtactaagtcttctaaaagctccactccagttccttcaaagcagtcagcaaggtggcaagttgcaaaagagctttatcaaactgaaagtaattatgttaatatattggcaacaattattcagttatttcaagtaccattggaagaggaaggacaacgtggtggacctatccttgcaccagaggagattaagactatttttggtagcatcccagatatctttgatgtacacactaagataaaggatgatcttgaagaccttatagttaattgggatgagagcaaaagcattggtgacatttttctgaaatattcaaaagatttggtaaaaacctaccctccctttgtaaacttctttgaaatgagcaaggaaacaattattaaatgtgaaaaacagaaaccaagatttcatgcttttctcaagataaaccaagcaaaaccagaatgtggacggcagagccttgttgaacttcttatccgaccagtacagaggttacccagtgttgcattacttttaaatgatcttaagaagcatacagctgatgaaaatccagacaaaagcactttagaaaaagctattggatcactgaaggaagtaatgacgcatattaatgaggataagagaaaaacagaagctcaaaagcaaatttttgatgttgtttatgaagtagatggatgcccagctaatcttttatcttctcaccgaagcttagtacagcgggttgaaacaatttctctaggtgagcacccctgtgacagaggagaacaagtaactctcttcctcttcaatgattgcctagagatagcaagaaaacggcacaaggttattggcacttttaggagtcctcatggccaaacccgacccccagcttctcttaagcatattcacctaatgcctctttctcagattaagaaggtattggacataagagagacagaagattgccataatgcttttgccttgcttgtgaggccaccaacagagcaggcaaatgtgctactcagtttccagatgacatcagatgaacttccaaaagaaaactggctaaagatgctgtgtcgacatgtagctaacaccatttgtaaagcagatgctgagaatcttatttatactgctgatccagaatcctttgaagtaaatacaaaagatatggacagtacattgagtagagcatcaagagcaataaaaaagacttcaaaaaaggttacaagagcattctctttctccaaaactccaaaaagagctcttcgaagggctcttatgacatcccacggctcagtggagggaagaagtccttccagcaatgataagcatgtaatgagtcgtctttctagcacatcatcattagcaggtatcccttctccctcccttgtcagccttccttccttctttgaaaggagaagtcatacgttaagtagatctacaactcatttgatatgaagcgttaccaaaatcttaaattatagaaatgtatagacacctcatactcaaataagaaactgacttaaatggtacttgtaattagcacttggtgaaagctggaaggaagataaataacactaaactatgctatttgatttttcttcttgaaagagtaaggtttacctgttacattttcaagttaattcatgtaaaaaatgatagtgattttgatgtaatttatctcttgtttgaatctgtcattcaaaggccaataatttaagttgctatcagctgatattagtagctttgcaaccctgatagagtaaataaattttatgggcgggtgccaaatactgctgtgaatctatttgtatagtatccatgaatgaatttatggaaatagatatttgtgcagctcaatttatgcagagattaaatgacatcataatactggatgaaaacttgcatagaattctgattaaatagtgggtctgtttcacatgtgcagtttgaagtatttaaataaccactcctttcacagtttattttcttctcaagcgttttcaagatctagcatgtggattttaaaagatttgccctcattaacaagaataacatttaaaggagattgtttcaaaatatttttgcaaattgagataaggacagaaagattgagaaacattgtatattttgcaaaaacaagatgtttgtagctgtttcagagagagtacggtatatttatggtaattttatccactagcaaatcttgatttagtttgatagtgtgtggaattttattttgaaggataagaccatgggaaaattgtggtaaagactgtttgtacccttcatgaaataattctgaagttgccatcagttttactaatcttctgtgaaatgcatagatatgcgcatgttcaactttttattgtggtcttataattaaatgtaaaattgaaaattcatttgctgtttcaaagtgtgatatctttcacaatagcctttttatagtcagtaattcagaataatcaagttcatatggataaatgcatttttatttcctatttctttagggagtgctacaaatgtttgtcacttaaatttcaagtttctgttttaatagttaactgactatagattgttttctatgccatgtatgtgccacttctgagagtagtaaatgactctttgctacattttaaaagcaattgtattagtaagaactttgtaaataaatacctaaaacccaagtgta

SEQ ID NO: 92831 - DNA, 560 bp, Artificial Sequence
  derived and/or modified sequence
gaatcggttgtggcggccgccggcgaggaatggcggtatttgtgagaggagtcggcgtttgaagaggtggaactcctagggcttttttgagagtgacggagtctacctcttgttacctagactggagtgcagtggcacgatctcggctcactgcaacctctgcctcccgggttcaagcgattctcctgcctcagcctcctgagtagctgggattacagctgatttagaagaatacaaatcatggctgaaaatagtgtattaacatccactactgggaggactagcttggcagactcttccatttttgattctaaagttactgagatttccaaggaaaacttacttattggatctacttcatatgtagaagaagagatgcctcagattgaaacaagagtgatattggttcaagaagctggaaaacaagaagaacttataaaagccttaaaggacattaaagtgggctttgtaaagatggagtcagtggaagaatttgaaggtttggattctccggaatttgaaaatgtatttgtagtcacggactttcaggattctgtctt

SEQ ID NO: 92832 - DNA, 2825 bp, Artificial Sequence
  derived and/or modified sequence
ttttgcccaatgaccatgtttatgtatttttattcaaattttattttttcagctgatttagaagaatacaaatcatggctgaaaatagtgtattaacatccactactgggaggactagcttggcagactcttccatttttgattctaaagttactgagatttccaaggaaaacttacttattggatctacttcatatgtagaagaagagatgcctcagattgaaacaagagtgatattggttcaagaagctggaaaacaagaagaacttataaaagccttaaaggacattaaagtgggctttgtaaagatggagtcagtggaagaatttgaaggtttggattctccggaatttgaaaatgtatttgtagtcacggactttcaggattctgtctttaatgacctctacaaggctgattgtagagttattggaccaccagttgtattaaattgttcacaaaaaggagagcctttgccattttcatgtcgcccgttgtattgtacaagtatgatgaatctagtactatgctttactggatttaggaaaaaagaagaactagtcaggttggtgacattggtccatcacatgggtggagttattcgaaaagactttaattcaaaagttacacatttggtggcaaattgtacacaaggagaaaaattcagggttgctgtgagtctaggtactccaattatgaagccagaatggatttataaagcttgggaaaggcggaatgaacaggatttctatgcagcagttgatgactttagaaatgaatttaaagttcctccatttcaagattgtattttaagtttcctgggattttcagatgaagagaaaaccaatatggaagaaatgactgaaatgcaaggaggtaaatatttaccgcttggagatgaaagatgcactcaccttgtagttgaagagaatatagtaaaagatcttccctttgaaccttcaaagaaactttatgttgtcaagcaagagtggttctggggaagcattcaaatggatgcccgagctggagaaactatgtatttatatgaaaaggcaaatactcctgagctcaagaaatcagtgtcaatgctttctctaaatacccctaacagcaatcgcaaacgacgtcgtttaaaagaaacacttgctcagctttcaagagagacagacgtgtcaccatttccaccccgtaagcgcccatcagctgagcattccctttccatagggtcactcctagatatctccaacacaccagagtctagcattaactatggagacaccccaaagtcttgtactaagtcttctaaaagctccactccagttccttcaaagcagtcagcaaggtggcaagttgcaaaagagctttatcaaactgaaagtaattatgttaatatattggcaacaattattcagttatttcaagtaccattggaagaggaaggacaacgtggtggacctatccttgcaccagaggagattaagactatttttggtagcatcccagatatctttgatgtacacactaagataaaggatgatcttgaagaccttatagttaattgggatgagagcaaaagcattggtgacatttttctgaaatattcaaaagatttggtaaaaacctaccctccctttgtaaacttctttgaaatgagcaaggaaacaattattaaatgtgaaaaacagaaaccaagatttcatgcttttctcaagataaaccaagcaaaaccagaatgtggacggcagagccttgttgaacttcttatccgaccagtacagaggttacccagtgttgcattacttttaaatgatcttaagaagcatacagctgatgaaaatccagacaaaagcactttagaaaaagctattggatcactgaaggaagtaatgacgcatattaatgaggataagagaaaaacagaagctcaaaagcaaatttttgatgttgtttatgaagtagatggatgcccagctaatcttttatcttctcaccgaagcttagtacagcgggttgaaacaatttctctaggtgagcacccctgtgacagaggagaacaagtaactctcttcctcttcaatgattgcctagagatagcaagaaaacggcacaaggttattggcacttttaggagtcctcatggccaaacccgacccccagcttctcttaagcatattcacctaatgcctctttctcagattaagaaggtattggacataagagagacagaagattgccataatgcttttgccttgcttgtgaggccaccaacagagcaggcaaatgtgctactcagtttccagatgacatcagatgaacttccaaaagaaaactggctaaagatgctgtgtcgacatgtagctaacaccatttgtaaagcagatgctgagaatcttatttatactgctgatccagaatcctttgaagtaaatacaaaagatatggacagtacattgagtagagcatcaagagcaataaaaaagacttcaaaaaaggttacaagagcattctctttctccaaaactccaaaaagagctcttcgaagggctcttatgacatcccacggctcagtggagggaagaagtccttccagcaatgataagcatgtaatgagtcgtctttctagcacatcatcattagcaggtatcccttctccctcccttgtcagccttccttccttctttgaaaggagaagtcatacgttaagtagatctacaactcatttgatatgaagcgttaccaaaatcttaaattatagaaatgtatagacacctcatactcaaataagaaactgacttaaatggtacttgtaattagcacttggtgaaagc

SEQ ID NO: 92833 - DNA, 480 bp, Artificial Sequence
  derived and/or modified sequence
atggcagagaacagcgttctgaccagtaccacaggacgcacgtcactcgccgatagcagcatctttgactctaaagtcacagagatttccaaagagaacctgctaattgggtcaacaagctacgtggaagaagagatgccacaaattgagacacgggtcatactggttcaagaagctggaaagcaagaggaactcataaaagctctgaaagatattaaggtcggatttgtaaaaatggaatcagtcgaggagtttgagggattggatagtccggagtttgagaatgtgttcgttgtgaccgattttcaagacagtgtctttaacgatctgtacaaggccgattgtcgtgtcatcggtcctcctgtcgtccttaactgctcacagaaaggagagcctctccccttctcttgccggccgttgtactgtacctccatgatgaatctggtcctgtgcttcaccgggttccgtaaaaaagagtag

SEQ ID NO: 92834 - DNA, 2649 bp, Artificial Sequence
  derived and/or modified sequence
atggcagagaactccgtgttgacttcgaccacaggaaggacttccctggccgactcctctatctttgactccaaggtcactgagatatccaaggaaaatttgctcatcggatcaacttcatacgtagaggagatgcctcaaatagagacgcgagtcatcctcgtccaggaggcaggcaaacaggaggagttaatcaaagcactcaaagatattaaggtgggctttgtgaagatggagagtgtagaggagttcgaggggcttgatagtccggaattcgagaacgtgttcgtggtgacagatttccaggattccgtgtttaacgatctctataaggctgactgcagagtgattgggcccccagtagtattaaactgtagccagaaaggcgagcccttgcctttttcctgtaggccattgtattgtacatctatgatgaaccttgtcctgtgctttactgggttccgcaagaaggaggaactggtgaggctggtaaccctcgtacatcacatgggaggcgtgatccggaaagatttcaactcgaaggtgacccacctcgttgctaattgcacacagggcgagaagttcagggtagcagtgtccttgggtacccccattatgaagcccgagtggatttataaggcttgggaacgccggaatgagcaagatttctatgccgcagtagatgattttcgaaacgaattcaaggtccccccatttcaagactgtatcctatcattcctaggcttctctgatgaagagaaaacaaacatggaagagatgactgagatgcagggtggaaaatacttgcctctgggcgacgagagatgtacacatttggttgtcgaggagaacatcgttaaagatttgccttttgaaccaagcaagaaattatatgtggtcaaacaggagtggttctggggatctattcagatggacgcacgagctggagagaccatgtacctttacgaaaaagccaatacacctgagctgaagaaatccgtgtccatgcttagtctgaacacacctaattcaaataggaaaaggaggagacttaaagaaacactggctcagttgagccgcgagactgatgtaagcccctttccgccccgcaaaagaccttccgctgaacacagtttgagcatcggaagcctcctcgacatcagtaacacccccgaatcatctatcaactacggtgacacacctaagtcatgcaccaaatcatccaagagcagtactccagttccttcgaagcaaagtgctagatggcaggtggccaaagagctctatcagacggagtccaattatgtcaatatactcgcgactataatccagctgttccaggtgcccttggaggaggagggtcagcgcggagggcctatcctcgctcccgaggaaataaagacaatctttgggtcgatccccgatatttttgacgtccataccaagatcaaggacgatctcgaggacctgatcgtcaactgggatgagtcgaaatccataggggacatcttcctgaaatattccaaagacttggtaaagacctatcccccattcgtgaactttttcgagatgagcaaggagactatcatcaagtgcgagaaacagaagccgcgatttcacgcgtttttgaaaattaaccaagctaagcccgagtgtggtcggcagtctctggtggagctactgatacggccagtacagcggcttccttccgtcgctcttctcttaaatgacttaaaaaaacacactgccgatgagaacccggacaaaagtaccttggagaaagccatcggatccctgaaagaggtgatgacccacatcaatgaagacaaaagaaagactgaggctcagaagcaaattttcgacgtcgtatatgaggtggacggttgtcctgctaatctgcttagctcccatcgctcactcgttcagcgggtagaaacaatctctctcggggagcatccatgcgatcgcggcgagcaggtgacgctctttcttttcaatgattgtctggagatcgccagaaagcggcataaagtaataggaaccttccgttctccccatggccagactcgcccaccagcttccttgaaacacattcacctcatgcccctgtcccagattaagaaagttctggatatacgggagaccgaggactgtcacaacgcatttgcccttttggtcaggcccccaacagagcaagccaacgtcctattaagcttccagatgacctcagatgagctgcccaaggagaactggttgaagatgctgtgccgccatgtggccaataccatctgtaaagccgatgcagagaatctgatctacacagctgaccctgagtcttttgaggttaatacaaaggatatggactccaccctcagtagagcgagtagagctattaagaagacctctaaaaaggtcaccagagcattttccttttctaaaacccctaagcgtgcgctgcgcagggccctcatgactagccacgggagcgtagagggccggtccccaagctccaacgataaacacgttatgagccgcctttcctccaccagttccttggcaggaatccctagtccgtccctcgtgtcactgccttccttttttgaacgaagaagccatacactgtcccgtagcaccacgcatttaatctag

SEQ ID NO: 92835 - DNA, 321 bp, Artificial Sequence
  derived and/or modified sequence
atggcggagaattccgttctgaccagcactacaggccggacaagcctggctgattcaagtatctttgattcaaaggtgaccgagatcagcaaggagaacctcctgattggatccacaagctacgtggaagaggagatgcctcagattgagacccgcgtaatcttggtgcaggaggcagggaaacaggaggaactgatcaaggctctgaaggatatcaaggtagggttcgtgaaaatggagtctgtggaagaattcgagggccttgacagcccagaattcgaaaacgtgtttgtggtgaccgatttccaggactcagtctag

SEQ ID NO: 92836 - DNA, 2652 bp, Artificial Sequence
  derived and/or modified sequence
atggcagagaattctgtgcttactagtacaaccggtcgtacgagtcttgcagatagttcaatatttgacagtaaggtgactgagatttctaaggaaaatctgctcattggctccacttcttacgttgaggaagagatgccacagatcgagacacgcgtgatcttggtccaagaggccggaaagcaggaagagttaatcaaggctcttaaggacatcaaggtggggtttgttaaaatggagtccgtcgaagaattcgagggattggacagcccagaattcgagaacgtatttgttgtcaccgattttcaggattctgtcttcaatgacctgtataaggccgactgtcgggtgataggccctcccgtggtgctgaattgcagtcagaagggggagccattgccatttagctgtaggcctctgtactgtaccagcatgatgaatttggtgctttgcttcacggggtttcgcaaaaaggaagaactcgtgcgcctggtgaccctggttcaccatatggggggggtcatacgtaaggacttcaacagcaaggtaacacatcttgtggccaattgcacccagggcgagaagttccgtgtggctgtgtccctcggtacgcctattatgaagcccgaatggatttataaagcctgggaacggagaaatgagcaggatttctatgcagccgtcgatgatttcagaaacgaattcaaagtgccgccgttccaggactgcatccttagcttccttggcttttcagatgaagagaagacaaacatggaagaaatgactgagatgcaaggcgggaaatacttgcccctgggggacgagcggtgcactcacctggtggtggaggagaacatcgtaaaagacttgccatttgagccctcaaagaagctgtatgtggtaaagcaagagtggttctggggctctatccaaatggatgccagggcaggagagactatgtatctgtatgagaaggctaacaccccagagctgaaaaagagtgtcagcatgctctctctgaatacacccaatagcaaccgcaaaagacgccggctcaaagagacgcttgcccagctgagccgagagacagatgtgtctccattccctccccgaaagcgaccctccgcggaacatagcctatccatcgggagccttctggatatttctaacacacccgagtcctctattaactatggcgacacaccaaaaagctgcacgaagagctctaagtcaagcactcccgttccttcaaaacagtcggcccgatggcaagtcgcgaaggaactttatcagacagagtccaactacgtgaacattcttgccacaataatccagctttttcaggtcccgctggaggaggagggtcagcgtggtggccctatcctggcccccgaagagattaagaccatcttcgggtcaatacctgacattttcgatgtgcacacaaaaattaaggacgatttagaggaccttatcgttaactgggatgaatcaaaatccattggcgatatcttcttaaagtactccaaggatctcgtgaaaacatatcctccatttgtcaactttttcgagatgtcaaaggagaccattatcaagtgcgaaaagcagaaacctcggttccacgcctttttgaagatcaaccaggccaagcccgagtgtggacggcagagcctggtggagcttctgatccggcctgtgcagcgcttaccatccgtggctttactgctcaatgatctgaagaaacacacagcggacgagaacccggataagagcaccctcgagaaagccatcgggagtctgaaggaggttatgacacacattaacgaggataagaggaagaccgaggctcagaaacagatattcgatgtggtatacgaagtcgacggttgccccgccaatctgctatcgtcacaccgatcactcgtccaacgtgtcgaaacaatctcgcttggagaacacccctgtgatcggggcgaacaagttacacttttcctgttcaacgattgccttgaaatcgcgcggaaaagacataaggtgatcggcactttcagatctcctcacgggcagactaggcccccagcgtccctgaaacacattcacctgatgcccttatctcagatcaagaaagtgctggatatacgggagacagaggattgccacaacgcattcgctttattggtcagaccccctacagagcaggctaacgttctcctgagtttccagatgacctcggatgaattgccgaaagaaaattggctgaagatgctatgtcgacacgtggccaacactatttgcaaggcggacgccgaaaatctgatctataccgccgacccagagtcatttgaagttaacacaaaagatatggacagcaccctatctagagcctccagggccatcaagaaaacctccaaaaaggtgacccgcgcattcagcttctcaaagacccccaaacgggccctgaggcgggccctcatgacatcccatggatcagtggaagggcgctcgccctcttcaaatgataaacacgtgatgtctcgactctcctccacctcgagcttagcagggatcccctccccctccctggtttcactcccttctttttttgagcgcagatcccatacactctctcggagcactacgcacctgatctag

SEQ ID NO: 92837 - DNA, 480 bp, Artificial Sequence
  derived and/or modified sequence
atggctgaaaattctgtgctgaccagcaccactggaagaaccagcctggccgacagcagcatctttgacagcaaggtgacagagatcagcaaggagaacctgctgattggcagcaccagctatgtggaggaggagatgccccagatcgagaccagggtcatcctggtgcaggaggccggcaagcaggaggagctgatcaaggccctgaaggacatcaaggtgggctttgtgaagatggagagcgtggaggagtttgagggcctggacagccctgagtttgaaaatgtgtttgtggtgacagacttccaggacagcgtcttcaatgacctgtacaaggctgactgcagggtcatcggcccccctgtggtgctgaactgcagccagaagggggagcccctgcccttcagctgccggcccctgtactgcacctccatgatgaacctggtgctgtgcttcaccggcttcaggaagaaggagtag

SEQ ID NO: 92838 - DNA, 2649 bp, Artificial Sequence
  derived and/or modified sequence
atggctgaaaattctgtgctgaccagcaccactggaagaaccagcctggccgacagcagcatctttgacagcaaggtgacagagatcagcaaggagaacctgctgattggcagcaccagctatgtggaggagatgccccagatcgagaccagggtcatcctggtgcaggaggccggcaagcaggaggagctgatcaaggccctgaaggacatcaaggtgggctttgtgaagatggagagcgtggaggagtttgagggcctggacagccctgagtttgaaaatgtgtttgtggtgacagacttccaggacagcgtcttcaatgacctgtacaaggctgactgccgggtgattggcccccctgtggtgctgaactgcagccagaagggggagcccctgcccttcagctgccggcccctgtactgcacctccatgatgaacctggtgctgtgcttcaccggcttcaggaagaaggaggagctggtgcggctggtgaccctggtgcaccacatgggcggcgtcatcaggaaggacttcaacagcaaggtgacccacctggtggccaactgcacccagggcgagaagttccgggtggccgtgtccctgggcacccccatcatgaagccagagtggatctacaaggcctgggagaggagaaatgagcaggacttctatgctgctgtggatgacttcagaaatgagttcaaggtgccccccttccaggactgcatcctgtccttcctgggcttcagtgatgaggagaagaccaacatggaggagatgacagagatgcagggcggcaagtacctgcccctgggagatgagcgctgcacccacctggtggtggaggagaacatcgtgaaggacctgccctttgagcccagcaagaagctgtatgtggtgaagcaggagtggttctggggcagcatccagatggatgcccgggccggggagaccatgtacctgtatgagaaggccaacaccccagagctgaagaagtctgtgtccatgctgagcctgaacacccccaacagcaacaggaagagaagaaggctgaaggagaccctggcccagctgagccgggagacagatgtgagccccttcccccccaggaagaggcccagcgctgagcacagcctgagcatcggcagcctgctggacatcagcaacaccccagagagcagcatcaactatggagacacccccaagagctgcaccaagagcagcaagagcagcacccctgtgcccagcaagcagagcgcccgctggcaggtggccaaggagctgtaccagacagagagcaactacgtgaacatcctggccaccatcatccagctgttccaggtgcccctggaggaggagggccagagaggaggccccatcctggcccctgaggagatcaagaccatcttcggcagcatcccagacatctttgatgtgcacaccaagatcaaggatgacctggaggacctgattgtgaactgggatgagagcaagagcatcggggacatcttcctgaagtacagcaaggacctggtgaagacctaccccccatttgtgaacttctttgagatgagcaaggagaccatcatcaagtgtgagaagcagaagccccgcttccacgccttcctgaagatcaaccaggccaagccagaatgtggccggcagagcctggtggagctgctgatccggcctgtgcagaggctgcccagcgtggccctgctgctgaatgacctgaagaagcacacagcagatgaaaatccagacaagagcaccctggagaaggccatcggcagcctgaaggaggtgatgacccacatcaatgaagacaagaggaagacagaggcccagaagcagatctttgatgtggtgtatgaggtggatggctgcccagccaacctgctgagcagccacaggagcctggtgcagagggtggagaccatcagcctgggggagcacccctgtgacagaggagagcaggtgaccctcttcctgttcaatgactgcctggagatcgccaggaagaggcacaaggtgattggcaccttccgcagcccccacggccagacccggcccccagccagcctgaagcacatccacctgatgcccctgagccagatcaagaaggtgctggacatccgggagacagaggactgccacaatgcctttgccctgctggtgcggcccccaacagagcaggccaacgtgctgctgtccttccagatgaccagtgatgagctgcccaaggagaactggctgaagatgctgtgccgccacgtggccaacaccatctgcaaggcagatgctgaaaatctcatctacacagctgaccctgagagctttgaggtgaacaccaaggacatggacagcaccctgagccgggccagccgggccatcaagaagaccagcaagaaggtgacccgggccttctccttcagcaagacccccaagagggccctgcggcgggccctgatgaccagccacggctctgtggagggccgcagccccagcagcaatgacaagcacgtgatgagccggctgagcagcaccagcagcctggccggcatccccagccccagcctggtgtccctgcccagcttctttgaaagaagaagccacaccctgagccgcagcaccacccacctgatctag

SEQ ID NO: 92839 - DNA, 321 bp, Artificial Sequence
  derived and/or modified sequence
atggctgaaaattctgtgctgaccagcaccactggaagaaccagcctggccgacagcagcatctttgacagcaaggtgacagagatcagcaaggagaacctgctgattggcagcaccagctatgtggaggaggagatgccccagatcgagaccagggtcatcctggtgcaggaggccggcaagcaggaggagctgatcaaggccctgaaggacatcaaggtgggctttgtgaagatggagagcgtggaggagtttgagggcctggacagccctgagtttgaaaatgtgtttgtggtgacagacttccaggacagcgtgtag

SEQ ID NO: 92840 - DNA, 2652 bp, Artificial Sequence
  derived and/or modified sequence
atggctgaaaattctgtgctgaccagcaccactggaagaaccagcctggccgacagcagcatctttgacagcaaggtgacagagatcagcaaggagaacctgctgattggcagcaccagctatgtggaggaggagatgccccagatcgagaccagggtcatcctggtgcaggaggccggcaagcaggaggagctgatcaaggccctgaaggacatcaaggtgggctttgtgaagatggagagcgtggaggagtttgagggcctggacagccctgagtttgaaaatgtgtttgtggtgacagacttccaggacagcgtcttcaatgacctgtacaaggctgactgcagggtcatcggcccccctgtggtgctgaactgcagccagaagggggagcccctgcccttcagctgccggcccctgtactgcacctccatgatgaacctggtgctgtgcttcaccggcttcaggaagaaggaggagctggtgcggctggtgaccctggtgcaccacatgggcggcgtcatcaggaaggacttcaacagcaaggtgacccacctggtggccaactgcacccagggcgagaagttccgggtggccgtgtccctgggcacccccatcatgaagccagagtggatctacaaggcctgggagaggagaaatgagcaggacttctacgccgctgtggatgacttcagaaatgagttcaaggtgccccccttccaggactgcatcctgtccttcctgggcttcagtgatgaggagaagaccaacatggaggagatgacagagatgcagggcggcaagtacctgcccctgggagatgagcgctgcacccacctggtggtggaggagaacatcgtgaaggacctgccctttgagcccagcaagaagctgtatgtggtgaagcaggagtggttctggggcagcatccagatggatgcccgggccggggagaccatgtacctgtatgagaaggccaacaccccagagctgaagaagtctgtgtccatgctgagcctgaacacccccaacagcaacaggaagagaagaaggctgaaggagaccctggcccagctgagccgggagacagatgtgagccccttcccccccaggaagaggccttctgctgagcacagcctgagcatcggcagcctgctggacatcagcaacaccccagagagcagcatcaactacggggacacccccaagagctgcaccaagagcagcaagagcagcacccctgtgcccagcaagcagagcgcccgctggcaggtggccaaggagctgtaccagacagagagcaactacgtgaacatcctggccaccatcatccagctgttccaggtgcccctggaggaggagggccagaggggcggccccatcctggcccctgaggagatcaagaccatcttcggcagcatcccagacatctttgatgtgcacaccaagatcaaggatgacctggaggacctgattgtgaactgggatgagagcaagagcattggagacatcttcctgaagtacagcaaggacctggtgaagacctaccccccatttgtgaacttctttgagatgagcaaggagaccatcatcaagtgtgagaagcagaagccccgcttccacgccttcctgaagatcaaccaggccaagccagaatgtggccggcagagcctggtggagctgctgatccggcctgtgcagaggctgcccagcgtggccctgctgctgaatgacctgaagaagcacacagcagatgagaacccagacaagagcaccctggagaaggccatcggcagcctgaaggaggtgatgacccacatcaatgaagacaagaggaagacagaggcccagaagcagatctttgatgtggtgtatgaggtggatggctgcccagccaacctgctgagcagccacaggagcctggtgcagagggtggagaccatcagcctgggggagcacccctgtgacagaggagagcaggtgaccctcttcctgttcaatgactgcctggagatcgccaggaagaggcacaaggtgattggcaccttccgcagcccccacggccagacccggcccccagccagcctgaagcacatccacctgatgcccctgagccagatcaagaaggtgctggacatccgggagacagaggactgccacaatgcctttgccctgctggtgcggcccccaacagagcaggccaacgtgctgctgtccttccagatgaccagtgatgagctgcccaaggagaactggctgaagatgctgtgcagacatgtggccaacaccatctgcaaggcagatgctgagaacctgatctacacagctgaccctgagagctttgaggtgaacaccaaggacatggacagcaccctgagccgggccagccgggccatcaagaagaccagcaagaaggtgacccgggccttctccttcagcaagacccccaagagggccctgcggcgggccctgatgaccagccacggctctgtggagggccgcagccccagcagcaatgacaagcacgtgatgagccggctgagcagcaccagcagcctggccggcatccccagccccagcctggtgtccctgcccagcttctttgagcggcgcagccacaccctgagccgcagcaccacccacctgatctag

SEQ ID NO: 92841 - DNA, 480 bp, Artificial Sequence
  derived and/or modified sequence
atggccgagaacagcgtgctgaccagcaccaccggccggaccagcctggcggactcctccatttttgatagtaaagttactgaaataagtaaagagaacctgctgattgggtcaacctcctatgtcgaggaagagatgcctcagatcgagacccgggtcattttagttcaggaagcaggaaaacaggaagagctgatcaaggcattaaaggacatcaaagtcggcttcgttaaaatggaaagcgtagaagagtttgaaggattagactcgcccgagtttgagaacgttttcgtggtaacggacttccaggatagcgtttttaatgacctctacaaagcggactgcagagtgataggccctcccgtcgtgctgaattgcagtcaaaagggggagcccctaccttttagctgccggcccttgtactgtacctccatgatgaacctggtgctgtgcttcacagggtttagaaagaaagaatag

SEQ ID NO: 92842 - DNA, 2649 bp, Artificial Sequence
  derived and/or modified sequence
atggccgagaacagcgtgctgaccagcaccaccggccggaccagcctcgcggatagcagcatctttgactccaaggtaaccgagatctcaaaggagaaccttctgataggcagtacaagttacgtggaagaaatgccacagatcgaaacaagggtaatcttagtgcaggaggcgggaaagcaggaggagctcattaaagctctgaaggatatcaaggtgggcttcgtcaaaatggaatctgtagaggaatttgaagggctggacagccctgagttcgagaatgtgttcgtggtgaccgatttccaggattctgtgttcaatgatctctacaaggctgactgccgggtgattggtcccccagtggtcctgaattgtagccagaaaggggagcctttacccttctcatgtagaccactgtattgcacaagtatgatgaacctggtactctgcttcacgggcttccgaaaaaaggaggagttagttaggcttgtaaccctcgtacaccacatgggcggagtgatccgaaaggactttaactccaaagtgacccacctggtggcgaactgcacccagggagagaaattccgagtggccgtgagcctcggtacccctattatgaaaccagagtggatatacaaggcgtgggaacggcgcaatgagcaagacttctacgcggcagtcgatgattttcgcaatgagtttaaagtaccgcccttccaggactgtatcctgtcatttcttggtttcagcgacgaggagaagaccaacatggaggaaatgaccgagatgcagggggggaagtatctccctttgggggacgagcgctgtacgcacttagtggtggaagaaaatattgtcaaagacctgcctttcgagccaagtaaaaagctatacgtcgtcaaacaagagtggttctgggggagcattcaaatggatgcccgggccggcgagacaatgtacctgtacgagaaggcgaacactccagagctgaagaagtctgtatcaatgctgagtctgaacacaccaaactccaataggaaacgccgccgactgaaggaaactctagcccagctgtcacgcgagaccgacgtaagccccttccctccgcgcaagcgcccatccgcagagcattctctctccattggttcactgctggacatctccaacacgccggaaagttctatcaattacggagatacaccgaaaagttgtaccaaatcaagtaagagcagtaccccagtccccagcaagcaatccgcgcgctggcaggtggccaaggaactgtaccagaccgagtctaactacgtcaatatcctcgccacgattatccagctattccaagttccgctagaagaggagggccagcgggggggccccatattggcccctgaggagatcaagaccattttcggctcaatccctgacatcttcgatgtgcacactaagattaaagacgaccttgaggatctcatcgtgaactgggacgagagtaagagcatcggcgacatattcttaaagtactcaaaggatctcgtcaagacatacccccctttcgtgaatttttttgaaatgtcaaaagagacgattattaagtgtgagaaacaaaagccgaggttccacgcgttcctgaaaattaaccaggccaagccagagtgcggacgccagtctctggtggaactattgattagacctgtgcaaagactgcccagcgtggccctattgctgaacgatttgaaaaaacacacagccgatgagaaccctgacaagagcaccttagaaaaagccataggctccttaaaggaagtgatgacccacataaatgaggataagcgcaagactgaagcccagaaacagatctttgatgttgtgtacgaggtcgatggctgtcctgcgaacctattgtcttcccacagaagcctggttcagagggtggagactatctccttgggggaacacccttgtgatcggggagaacaagtgaccctgtttctgttcaatgactgcttggagattgctcgtaagcgacacaaggtgataggaacctttcgcagccctcatggccagacacggccaccggctagtctaaagcatatccacctcatgccactgtctcagattaagaaagtcctggatattagagagactgaagactgtcataacgcattcgccctgttagttcgtcctcccactgagcaagccaatgtcttactgtcgtttcagatgacttcagatgaactgccaaaggagaattggctgaagatgctttgcaggcatgtcgcaaataccatttgcaaggcggacgccgaaaacctgatttatactgctgatccagagtctttcgaggtcaatactaaagacatggacagtacactgagtagagcaagccgcgctattaagaagacctcaaagaaagtaactcgggctttttccttttcgaagacccctaagagagcccttcggcgggccctcatgacctcacacgggtctgtcgaggggagaagcccttcctccaatgataagcacgtgatgagtcggctgagttccacatcatctctggcaggcatccctagcccgagcctggtgagcctgccgagcttcttcgagcggagatcacacactctgtctaggagcaccactcacctcatttag

SEQ ID NO: 92843 - DNA, 321 bp, Artificial Sequence
  derived and/or modified sequence
atggccgagaacagcgtgctgaccagcaccaccggccggaccagcttggcagattcgagtattttcgattctaaagtaacagagataagcaaggaaaacctcttgattggaagtacaagttatgtggaagaggagatgccacagatcgaaacccgggtgattcttgtacaggaagccgggaaacaagaggaacttatcaaggcccttaaagacatcaaggtaggtttcgtcaagatggagagcgttgaagagttcgaggggctcgatagccctgaatttgagaacgtattcgtggttaccgactttcaggacagtgtatag

SEQ ID NO: 92844 - DNA, 2652 bp, Artificial Sequence
  derived and/or modified sequence
atggccgagaacagcgtgctgaccagcaccaccggccggaccagccttgcggactcctcaatcttcgacagcaaagtaactgagattagtaaagaaaacttacttatcggaagtacgtcctacgtggaagaagagatgcctcagattgagacgagagtgattctggtccaagaagcaggcaagcaggaggaactgatcaaggccctgaaagacatcaaggtgggatttgtgaagatggagtcagtcgaggagttcgaaggtcttgactcacctgagtttgagaacgtgtttgtcgtaactgatttccaagattccgtgttcaacgacctgtataaagcggattgccgggtaatcggaccaccggtggtgttaaactgctcccagaagggtgaacctcttccattttcatgtcggcccctgtactgcacctctatgatgaatctagtgctatgcttcactgggttccgtaagaaggaggaactggtccgtctggtcacactcgtgcatcacatgggtggggtcattcggaaggattttaatagcaaagtcacacacttggttgcaaattgcacccaaggagaaaaatttagagtagccgtctccctcggtaccccgattatgaagccagaatggatctacaaggcatgggaaagaagaaatgaacaagatttctacgctgcagtcgacgacttccgaaacgagttcaaggtgcccccattccaggactgcatactctctttcctcggcttttcagatgaagaaaagaccaatatggaggagatgacagagatgcagggcggaaagtaccttcccctcggagacgagcgatgcacccacctggtggtggaggaaaacatagtcaaagacctgccctttgagcctagcaagaagctgtacgtggttaagcaagagtggttttggggtagtattcagatggatgcccgagccggggaaaccatgtacctgtacgagaaagccaacacccctgagctcaaaaagtcagtcagcatgctgtcgctgaacacccctaattccaataggaagagaagacgcctgaaagagactctagcccagctgtcgcgagagactgacgttagcccgttccctccaaggaagcggcccagcgccgaacactcattatctataggaagtttgttggacatttctaacacacctgagtcctccatcaactacggagacacaccaaaatcctgtacgaagagctccaagagcagtacccctgtcccctccaaacagtctgccaggtggcaggtggcaaaggagttatatcaaaccgagtccaattacgtcaacatcctggcaaccatcatccaattattccaggtgcccctggaggaggagggtcagcgcgggggccccattttagcacccgaggaaattaagaccattttcggaagcatcccagatatcttcgatgttcacactaaaatcaaggatgacctggaggatctgattgttaactgggatgaatctaagtcaattggtgatattttcctgaagtacagcaaggatctcgtaaagacgtatccccctttcgtgaattttttcgagatgtccaaagaaacgattataaagtgtgagaaacagaaacctcggtttcatgcattcctgaagatcaaccaggcaaagcccgagtgtggcaggcagagcctcgtcgagctccttatccggccggtgcagcgtctgcccagcgtcgccctgttactgaacgatctcaaaaagcacacagccgatgagaatcccgataaatctacattggagaaggcaatcggcagtctcaaagaggttatgactcacataaacgaagacaaacgcaagaccgaagcacagaagcaaatcttcgacgtcgtgtacgaggtggatggatgtcctgctaatctgttgtcaagccacaggagtttggtgcaacgagtggaaactatctcccttggtgaacacccctgtgatcggggcgaacaagtaacactattcctgttcaacgattgtctcgagatagcgcggaaacggcacaaggtgatcgggacttttagatcacctcatgggcagacgagacccccagcaagtctcaaacacatacacctgatgccactgtcacaaatcaaaaaagtactagacattagagaaacagaggactgtcacaatgcctttgccctcttggtgcgtccccctacagaacaagctaatgtactactgtcctttcagatgacttctgatgaacttccgaaggaaaattggctcaaaatgttatgtcgacacgttgccaacactatatgcaaggcggacgcggaaaatctgatatacacagccgaccccgagagcttcgaagtcaacacgaaggatatggactcgaccctgtcaagggcgtctcgcgctatcaagaagacatctaagaaggtcaccagggcgttctctttcagcaagactcccaaaagagcattgcgcagggccctgatgacctctcatggttcggtagaagggcgatcccccagctccaatgacaaacatgtgatgtcgaggttgtcaagtacaagcagcttggccgggattccttccccctctctggtgtctctcccaagcttcttcgaacggagatcacacaccctgtcacgtagcaccacccacctgatctag

SEQ ID NO: 92845 - DNA, 480 bp, Artificial Sequence
  derived and/or modified sequence
atggcggagaactcagttcttacatcaaccaccgggagaacaagtctggcagactcctcaatttttgattccaaggtcactgaaatctcaaaagaaaacttgttgataggcagcaccagctacgtggaggaagaaatgcctcagatcgagacccgcgtaattctcgtccaggaggctggcaagcaggaagagctgatcaaggcactgaaggacataaaggtgggctttgttaagatggagtccgtggaggaattcgagggtctggactcgcccgagttcgaaaacgtctttgtcgtgaccgacttccaggatagcgtcttcaacgatctctataaagctgattgtagagtgatcggtccacccgtcgtcctcaattgttctcagaaaggagaaccactcccgttcagctgtcgacctctatactgtacttcaatgatgaacttagtgttatgtttcactggatttaggaaaaaggagtag

SEQ ID NO: 92846 - DNA, 2649 bp, Artificial Sequence
  derived and/or modified sequence
atggcagagaactcagtgctgactagtaccacggggagaacctctctggcggactcatctatcttcgactcgaaggtaaccgagatcagcaaggaaaatctcttgatcggcagcacttcatacgtcgaagaaatgccccagattgagacgcgtgtgattctggtccaggaagcgggtaagcaggaggagcttataaaggcgctgaaagatatcaaggttggttttgttaaaatggaatccgtcgaagaatttgaggggcttgactcccctgaattcgagaatgtatttgttgtgaccgacttccaggatagtgtattcaacgatctgtacaaggcagattgccgtgtcattggaccccctgtcgtcctgaactgctctcagaagggggaacctctccccttcagctgtagacccctatactgcacaagcatgatgaatctcgtgctctgcttcactggattcagaaagaaagaggagttggtacgcttagtgaccttagtccatcatatgggcggtgtaatcagaaaagactttaactcaaaggtaactcatctggtcgcgaactgcacccagggagaaaagttccgtgtagctgttagtttaggaactcctatcatgaagccggagtggatttacaaagcgtgggaacgcagaaatgaacaggatttttatgctgcagtagacgattttaggaatgagttcaaggtcccgccattccaagattgtatcctttctttcctaggttttagcgacgaagagaagactaatatggaagagatgactgagatgcaggggggtaagtatctgcctcttggagatgagagatgcactcacctcgtcgtagaggagaatatcgtcaaggacctgccttttgaaccaagcaaaaagctttatgtcgtcaaacaagagtggttctggggttccattcagatggacgcgagggctggggaaacgatgtacctctatgaaaaagccaatacgcctgagctgaagaagagtgtctccatgctgagtctgaatacacccaacagcaaccgtaaacgacgtaggctgaaggaaacactcgctcagctcagtagggaaaccgacgtcagcccattcccaccacgaaaaaggcccagcgccgagcactctctgtccatcggttcattgttggacataagtaacacccctgaaagttccatcaattacggcgacaccccgaaaagctgcacaaaaagttcaaaatcatcaacccccgtgccctctaagcagagcgctcgctggcaggttgcaaaagagctgtaccagactgagagcaattatgtaaatatcctggccacgatcattcagctcttccaagtacccctggaggaggaggggcagaggggaggccctattctggcgccagaggagatcaagacaatattcgggtcaattcccgatatattcgacgtgcacactaaaatcaaggacgatctcgaagatctcattgtcaactgggacgaaagtaagagcatcggagacatcttcctgaagtactctaaggacctggtgaaaacctaccccccatttgtgaacttttttgagatgtctaaggagacaataataaaatgtgaaaagcaaaagcctaggttccacgcatttcttaagatcaaccaggcaaaacctgagtgcggacgccaaagcctcgtggagctacttatccggcctgtgcagcggcttccctctgtggccctgctgctgaacgacctgaaaaagcacaccgccgatgagaatccagataaatctacactggagaaggctatcggttctttaaaggaggttatgactcatataaatgaagacaaacgaaagaccgaggctcaaaagcagattttcgatgtggtctacgaggtcgatggttgccccgctaacctcctgtcatctcacaggagcctggtccaaagggtggaaacaatatcactgggggagcatccatgcgaccgcggagagcaagtaacactcttcctgttcaatgactgcctggagatagctcgcaagcggcacaaagtcattggaacgttccggagtccacatggtcaaactagaccaccggctagcctcaagcacattcatctcatgcccctgagccagattaagaaagtcctggatatacgcgaaacggaagattgccacaatgcatttgcattgcttgtccgtccccctaccgaacaggccaatgtgctgctctccttccaaatgacatccgacgagctgcctaaggagaattggctgaagatgctttgccgacacgtggccaacactatttgcaaagcggacgcagagaacttaatctatacagccgatccggagagctttgaggtaaacacaaaagatatggacagcaccttgtctagagcctctcgagccattaagaagacatcaaaaaaggtcacacgcgcatttagcttctctaagactccaaaaagggctctccgcagggcgcttatgacttctcacggatcagtggaggggcgatcccctagtagtaatgataagcacgtgatgtccagactcagctccactagttcactggccggaataccatccccctccctggtgtctcttccaagcttctttgagcgtcggtcccacaccctttccagaagcacaacacacctcatatag

SEQ ID NO: 92847 - DNA, 321 bp, Artificial Sequence
  derived and/or modified sequence
atggccgaaaactcagtgctgacatccaccacgggacgcactagcctggccgacagctccatcttcgattctaaggtgacagaaatctctaaggaaaatttactcatagggtctacatcctacgttgaggaggagatgccccagatagagactagagtgattttggtccaggaggccggaaagcaagaggagttgatcaaagcactgaaggatatcaaagtcggctttgttaaaatggaatcagtagaagaatttgaaggcctagacagtccagagttcgagaacgtgtttgtcgtgactgatttccaggattccgtgtag

SEQ ID NO: 92848 - DNA, 2652 bp, Artificial Sequence
  derived and/or modified sequence
atggccgagaattccgtgctcacttctaccaccggaagaacgagtttggctgattccagtatatttgattcaaaggtgaccgaaatatcaaaagagaacctgctgattggctccacctcatacgtagaggaggaaatgccccagatagagacccgtgtcatccttgtacaggaggcaggaaagcaggaagagttgatcaaagccctgaaggacattaaagtgggttttgtgaaaatggagagcgttgaagaatttgagggcctggacagtcctgaattcgagaatgtcttcgtggttacagactttcaggacagtgtgtttaatgatctctataaggccgattgccgcgttatcggccctcccgtggttttgaattgctcacagaaaggggaaccgctgcccttctcctgtcgacccctgtactgtacttcaatgatgaatttggtgctgtgtttcactggatttaggaagaaagaggagctagtgcgacttgtgaccctggttcatcatatgggcggagtgattagaaaagactttaattctaaggtgactcacctggtcgccaattgcactcaaggagagaaatttcgggttgccgtcagcctgggtactccgataatgaaacctgagtggatttataaagcgtgggagagaagaaacgaacaggacttttacgccgcagtggatgatttcaggaacgagtttaaagttccaccttttcaggactgcatattaagcttcctgggatttagtgatgaggagaagactaatatggaagagatgaccgagatgcagggtggcaaatacctgccgctcggcgacgagaggtgcacgcacctcgtcgtggaggaaaacatagtgaaagaccttccgtttgaaccaagtaagaaactgtacgtagtcaaacaagagtggttttgggggagcatccagatggatgccagagctggcgagaccatgtatttgtatgagaaggccaatacaccggagctgaagaaatcggtgagcatgctgagcctgaacacgcctaactctaatcggaaaagaaggcgattgaaggagactcttgcacaactgtctcgggagaccgacgtgagcccctttcctccccgtaaacgcccatccgccgagcattcactgtcaatcggtagtctgctggacatcagcaacacacccgaatcatccatcaactatggggataccccaaagtcttgcacaaagagctcaaagtctagcacacccgtgcccagtaaacagagtgcacggtggcaggtggcgaaggaactgtaccagaccgagtcaaattacgtgaatattctggcgaccattatccagctgttccaggtccccctagaagaggagggccagagaggaggacccatcctcgcaccggaggaaatcaagaccatctttggaagtatccccgatatttttgatgtgcacacaaagatcaaggacgatctcgaagacctcatagttaactgggacgaatctaaaagcattggcgatatttttcttaagtactctaaagacctggttaaaacatacccccctttcgtcaacttctttgaaatgtcaaaagagaccattattaaatgcgagaaacaaaaacccaggttccacgcgttcctcaaaataaaccaggcaaaacctgagtgtggtcgccaaagtcttgtcgaattgctgatccggcctgtgcagagactgccttctgtagctctcctgctgaatgacctgaaaaagcacactgcagacgagaatcctgacaagagtaccctggaaaaagccattggatcccttaaggaagtgatgacccacatcaatgaagacaagcggaagacggaggcccagaagcagattttcgacgtcgtgtacgaggtggatggatgtcccgctaacctcctgtctagccaccgttccctcgtgcagagggtggaaactattagtctcggggagcacccatgcgaccggggtgagcaggtcaccctgttcctgttcaacgactgccttgaaattgcgaggaagagacacaaggttatcggaaccttcaggtcccctcacgggcagacgagaccacccgctagcctgaagcacatacacttgatgccgctatcccaaatcaaaaaggtgctggatataagggaaaccgaggactgccataatgcttttgccctcttagtgcgacctccaacagagcaggccaatgtgctgctcagcttccagatgacgagtgatgaactacctaaggaaaattggctgaagatgctgtgccgacacgtggccaacaccatctgcaaggctgatgctgagaatttgatatacacagctgatccagagtcatttgaagtgaatacaaaagatatggactctaccttgagcagagcatcccgcgctatcaagaaaacgtccaaaaaagtgaccagggctttctccttctcaaaaaccccgaaaagggctctaaggagggcgctgatgacttctcatggatccgtggagggacgcagccccagctctaatgataagcacgttatgtcccgtctcagcagtacttcctcacttgccggaataccctcgcctagtcttgtgtctctcccaagcttcttcgaaagaaggagccacaccctgagcaggtccaccacccacctcatctag

SEQ ID NO: 92849 - DNA, 2652 bp, Artificial Sequence
  derived and/or modified sequence
atggccgagaactcagtgttaacatctacaaccggccggacttcgcttgccgactcttcgatcttcgacagtaaagtgaccgaaatttctaaagaaaatctgctaattgggtcaacctcatacgtagaagaggaaatgccacagattgagacacgtgtgattctggtgcaggaagcagggaagcaggaagaactgataaaggcactaaaagatattaaagtgggctttgtgaagatggagtcagtagaagaatttgagggactggatagtcctgagtttgagaatgtcttcgtggtgacagacttccaagactcagtttttaacgatctgtataaggctgactgtagagtgatcggacctccagtggtcctcaattgttctcagaagggtgaaccgttgcctttttcttgtaggccattgtactgcacttctatgatgaatctggttctttgcttcaccgggtttagaaaaaaggaggagctggtcaggctggtcactctagtccatcatatgggtggggtgattaggaaagacttcaactccaaagttactcacctcgtcgctaattgtacccagggcgagaagttcagggttgctgtgtctctcggtacacccattatgaaaccagaatggatctataaagcctgggaacggaggaacgaacaggacttctacgccgccgtagacgactttaggaacgagtttaaagtgccaccgttccaggactgtattcttagttttctgggattctcagatgaggagaaaacgaacatggaagagatgacagaaatgcagggaggcaagtatcttcccctcggggacgagcgctgcacacatctggtggtggaagagaatattgttaaagacctcccatttgaaccatcaaagaagctttacgtcgtcaagcaggaatggttttggggctcgatccagatggatgcccgcgcaggagagaccatgtatctgtacgagaaggcgaacacccccgagctgaaaaagtccgtgtccatgctctctttaaacaccccaaatagcaataggaaacgacgccgcctgaaggaaacgctggctcaactttctagagaaaccgatgttagcccttttcctccccgcaaaaggccaagcgcagagcactctctcagcattggcagcctgttagacatcagcaacacacccgagtcttctatcaattatggagacacacctaaatcttgtaccaagtcctctaagtcctcaactccagttcctagcaaacagtctgccagatggcaggtggcaaaggagttgtaccaaacagagagcaactacgttaatatactggcgaccatcattcagctgttccaggtccccctggaggaggaggggcaacgcggggggccaatactggccccagaagaaatcaagacaatcttcggatcaatccccgatatttttgatgtccacaccaaaattaaggatgacctcgaagatctgatcgtcaactgggacgaaagtaagtcgattggggacatctttctcaagtactcaaaggacctcgttaagacttacccccctttcgttaatttttttgagatgtccaaagagacaattattaagtgcgagaaacagaagccccggttccatgcattcctgaagataaaccaagccaagcccgagtgcggccggcagagcctggtggagttgttaattaggcctgtccagaggctgcccagtgttgccttattgctgaatgacttgaaaaagcatacagcagacgaaaatccagataagagcacgctggagaaggccatagggagtcttaaagaagtcatgacacacatcaatgaggataagagaaaaacagaagcccagaagcagatcttcgacgtagtgtatgaagtggacgggtgcccggcaaatctgctgagttcacacaggagccttgttcagagggtagaaactattagtttgggggagcacccttgtgacaggggtgagcaggttaccctctttctgttcaatgattgtctggagatcgctcgcaaacgacataaggttattggcaccttcagatctcctcacggacagactcgtcctccagcgtcacttaaacacatccacttgatgcccctgagtcagataaagaaggtgcttgacatcagggagacagaggattgtcacaatgcattcgcgctgcttgtgcgtcctcccactgaacaagctaacgtgctgctgagctttcagatgacatccgacgagctccccaaagagaattggctgaaaatgctgtgtaggcatgtggccaacactatctgcaaagctgacgccgagaacctgatctatacggcagaccccgagagcttcgaggtgaacacaaaagatatggattctacgctctcacgggcttctagggccattaaaaaaaccagcaaaaaggtgacgagagcttttagtttttccaaaacgccgaagagggccctgagacgggcacttatgaccagtcatggtagcgtggagggtagatctcccagctcaaatgacaagcacgtaatgtcccgcctgtcgagcacaagcagccttgcaggcatcccttcaccgtcactcgtgtctctccctagtttcttcgaacggcggagtcacaccttatcaaggtctaccacacatttgatatag

SEQ ID NO: 92850 - DNA, 2652 bp, Artificial Sequence
  derived and/or modified sequence
atggccgagaacagcgtgctgaccagcaccaccggccggaccagccttgcagatagctccatctttgatagcaaggtgaccgagatctccaaagagaatctgctgatcggaagcacttcctatgttgaggaggaaatgccacagatcgagacacgcgtgattcttgttcaagaggccgggaagcaggaagagctaataaaagctttgaaggacatcaaagtggggtttgtgaagatggaaagcgtagaagagtttgagggcctggacagtccggagttcgagaatgtgttcgtcgtaacagatttccaggactccgtctttaacgacctgtacaaggcagattgcagagtcattggcccaccggtggttcttaactgttcccagaaaggggagccactgcccttttcatgcaggccactgtactgtacaagtatgatgaatttggtactgtgttttaccgggttcaggaaaaaggaggaactcgttcgcttggtgacccttgttcaccatatggggggagtgattcggaaggacttcaatagcaaggtgacccatcttgtagctaattgcacccaaggggaaaagttccgggttgcggtcagtctggggacccccattatgaagccggaatggatttataaggcttgggaaagacgcaacgaacaggatttctatgccgccgtggatgatttcaggaatgagtttaaggtgcctcctttccaggattgtatcctgtcatttttaggcttcagcgacgaggagaagaccaatatggaggagatgactgagatgcagggaggaaagtatcttccacttggtgacgaacgttgtactcatttggtggtggaggaaaatatcgttaaggacctcccctttgaacctagtaagaagctgtacgtggtcaagcaggagtggttttggggcagcatacagatggacgctagggctggagagaccatgtatctatatgagaaggctaatactcccgagttgaaaaaatcggtgagcatgttaagcttaaatacgccaaactctaacagaaagcgccgccggctgaaggaaacgttggcccagctgtcacgggaaacagacgtgtcaccattccctccaaggaaacggcctagcgctgagcactcattgtctatcgggtcccttcttgatatcagtaatacacccgagtccagcatcaattatggcgatacgcctaaaagctgcaccaagagttcaaagagcagtactcccgtcccgagtaagcagagtgcaagatggcaggtcgccaaggaattataccagaccgagtctaattatgtgaacatcctggcaaccatcatccagctgtttcaagtgcccctggaggaggagggccaacgcggcggaccgatcctggcccctgaggagatcaagacgatcttcggaagcataccagacatttttgacgttcatactaagattaaggatgatctcgaagatctcatcgtaaattgggatgagtccaagagtatcggtgatatcttcttaaaatacagtaaagaccttgtgaaaacctatcctccatttgtgaatttctttgagatgtcgaaagagactataatcaagtgtgagaagcagaagcccaggttccacgcctttctgaagattaatcaggctaaacctgagtgtggccggcagtccctggtagagctgttaattcggcccgtacaacgcctgcccagtgtggcccttctattgaacgacctgaaaaagcatactgccgacgagaaccctgataagagcacactggagaaagctatcggctctctcaaagaggtgatgacccacatcaatgaggataaaaggaagaccgaagctcaaaagcagatttttgacgtcgtctatgaggtcgacggatgtcccgccaaccttttatcttcccaccgatcattagttcaacgagtcgaaacaatctcattgggagaacacccctgtgacagaggggaacaggtgactttgttcctcttcaatgactgcctggagattgctcgcaagagacataaagtgattggcacgtttcggagcccccacggtcaaacacggccccccgcttctctgaaacatatccatctaatgccactgtcccagattaagaaagtgttggacattcgggagacggaagactgtcacaacgcctttgccctgctggtgagaccaccaaccgagcaggcaaacgtgctgctgagctttcagatgacctctgatgagttgcccaaggaaaactggctcaaaatgctgtgtcgtcatgtggctaatactatctgtaaagctgacgcggagaacctgatttacacagcggaccccgaaagtttcgaggtgaacaccaaagatatggatagcaccctgtctagggcatctcgcgctatcaagaagacttccaagaaagtaaccagagccttttccttttccaagacccctaagagggctttacgccgcgctcttatgacatcacacgggtctgtcgagggcagatcacccagttctaacgataaacacgtgatgagtaggctgtcttctacgtcttcactggcagggataccatcgcccagccttgtgtctttacctagctttttcgagcgaagatcacacaccttatcccgatccaccacacatctgatctag

SEQ ID NO: 92851 - DNA, 2652 bp, Artificial Sequence
  derived and/or modified sequence
atggccgaaaatagcgtgttgactagcacgacggggagaacctcgctcgctgattcttcaatcttcgacagcaaagtgacggagattagcaaagagaacttgttgatcggaagcacatcctacgttgaggaagaaatgcctcagatagaaactagggtcattctggtacaggaggccggtaaacaggaagagttgattaaagctctgaaagacatcaaggtgggattcgtgaagatggaatcagtagaggaatttgagggtttggacagcccggaattcgaaaacgtgtttgtcgtaacagacttccaggatagtgtctttaatgatctttacaaggccgactgtagggtcattgggcctcccgtcgtcctgaactgtagccagaagggcgaaccgctcccatttagctgcaggcccctttactgcacttcgatgatgaatctcgtgctgtgttttaccgggtttagaaagaaagaggagttggtcagactcgttaccctcgttcatcatatggggggagtgatacgaaaggattttaattctaaagtgacccacctggtcgctaattgcactcagggcgaaaagttccgcgtcgctgtgtctctgggaacccctataatgaagcccgagtggatatacaaggcgtgggagaggcggaatgaacaagacttctatgctgcagtagacgattttcgcaatgaattcaaagtacctccgtttcaggattgtatcctatcttttctgggattcagcgatgaagagaagactaacatggaagaaatgactgaaatgcaaggagggaaatacctgcctttgggcgacgaacggtgtacacatttggtggtcgaggagaacattgtgaaagacctcccgtttgaaccttccaagaaactctacgttgttaaacaagaatggttctggggaagtatccaaatggacgcccgtgccggtgaaaccatgtatctgtacgaaaaggccaatacacccgagctgaagaagtctgtctctatgttgagtttgaataccccaaactccaaccgcaaacgtcgcaggctgaaagagacactggcccagctttcaagagaaacagacgtgtctccgttcccccctaggaagcgaccctccgctgagcattcgttgtccattggaagtctgttggacataagtaatacgcccgaatccagcatcaactatggtgatacccctaaaagctgcaccaaatccagcaagagtagtaccccggtacctagcaaacaaagcgcccgttggcaggtggccaaagagttataccagaccgaatccaactacgtcaatatacttgcaactattattcaactcttccaagttccactggaagaagaaggccagcgtgggggtccaattctggcaccagaggaaatcaaaaccattttcgggtcgatccctgacatctttgacgtgcacaccaagatcaaggatgacttggaagacctgattgtcaactgggacgagagtaaatctatcggcgacatctttctgaagtactctaaggaccttgtgaaaacgtatccaccattcgtaaatttcttcgaaatgagtaaggaaaccattatcaagtgcgaaaagcaaaagccacgatttcatgcatttctcaagatcaatcaggcaaaaccagagtgtgggcgtcagtcgttagtggagttgctaattagaccagtgcagagattacccagtgtggcattactgctcaacgatctaaagaaacacacggcggacgaaaacccggataagtctaccttagagaaggccatcggctcactcaaagaagtcatgacacacatcaatgaagataagcggaaaacggaggcccagaaacagatcttcgatgtggtgtacgaggtcgatggatgtccagccaacctacttagctcccatcggtctctcgttcagcgcgtggaaacaattagtctcggcgaacacccgtgtgaccgcggtgagcaggtgacactgttcctgtttaacgactgtctagagatagcaaggaaacgccacaaggtgattggaaccttcaggtcaccccacggccagactcgtccaccggcttccttgaaacatatacatctcatgcctctctctcagatcaagaaggtgctggatatccgtgaaacggaagactgtcataatgccttcgctctcctggtgagaccccctacagagcaagctaacgtcctgctgagcttccagatgacaagcgatgaactgcctaaagagaattggcttaagatgctttgccggcacgtggccaataccatatgtaaagccgacgcagagaacctaatatacaccgcagacccagagtcgttcgaggtaaataccaaagatatggactctacattgtccagagcatctagagccatcaaaaagacctctaagaaagtgaccagagccttcagtttttccaagacccctaaaagggccctgagacgggcactgatgacatcccacgggtctgttgaaggtaggtcccctagctctaatgataagcacgtcatgtcaaggctgtctagcactagttcactagccggaatccccagtccgtctttggtgtcactcccaagtttttttgagcgacgatcccatacgctgtcccgcagcacaacccacctcatctag

SEQ ID NO: 92852 - protein, 189 aa, Artificial Sequence
  derived and/or modified sequence
MAAKQPPPLMKKHSQTDLVSRLKTRKILGVGGEDDDGEVHRSKISQVLGNEIKFTIREPLGLRVWQFVSAVLFSGIAIMALAFPDQLYDAVFDGAQVTSKTPIRLYGGALLSISLIMWNALYTAEKVIIRWTLLTEACYFGVQFLVVTATLAETGLMSLGILLLLVSRLLFVVISIYYYYQVGRRPKKA

SEQ ID NO: 92853 - protein, 98 aa, Artificial Sequence
  derived and/or modified sequence
MAAKQPPPLMKKHSQTDLVSRLKTRKILGVGGEDDDGEVHRSKISQVLGNEIKFTIREPLGLRVWQFVSAVLFSGIAIMALAFPDQLYDAVFDGAQVT

SEQ ID NO: 92854 - protein, 73 aa, Artificial Sequence
  derived and/or modified sequence
MAAKQPPPLMKKHSQTDLVSRLKTRKILGVGGEDDDGEVHRSKISQVLGNEIKFTIREPLGLRVWQFVSAVLF

SEQ ID NO: 92855 - protein, 158 aa, Artificial Sequence
  derived and/or modified sequence
MAAKQPPPLMKKHSQTDLVSRLKTRKILGVGGEDDDGEVHRSKISQVLGNEIKFTIREPLGLRVWQFVSAVLFSGIAIMALAFPDQLYDAVFDGAQVTSKTPIRLYGGALLSISLIMWNALYTAEKVIIRWTLLTEACYFGVQFLVVTATLAETGLMS

SEQ ID NO: 92856 - protein, 79 aa, Artificial Sequence
  derived and/or modified sequence
MAAKQPPPLMKKHSQTDLVSRLKTRKILGVGGEDDDGEVHRSKISQVLGNEIKFTIREPLGLRVWQFVSAVLFSGIAIM

SEQ ID NO: 92857 - protein, 93 aa, Artificial Sequence
  derived and/or modified sequence
MAAKQPPPLMKKHSQTDLVSRLKTRKILGVGGEDDDGEVHRSKISQVLGNEIKFTIREPLGLRVWQFVSAVLFSGIAIMALAFPDQLYDAVFD

SEQ ID NO: 92858 - protein, 62 aa, Artificial Sequence
  derived and/or modified sequence
MAAKQPPPLMKKHSQTDLVSRLKTRKILGVGGEDDDGEVHRSKISQVLGNEIKFTIREPLGL

SEQ ID NO: 92859 - DNA, 570 bp, Artificial Sequence
  derived and/or modified sequence
atggccgccaagcagcccccccccctgatgaagaagcacagccagaccgacctggtgagcagactgaagaccagaaagatcctgggcgtgggcggcgaggacgacgacggcgaggtgcacagaagcaagatcagccaggtgctgggcaacgagatcaagttcaccatcagagagcccctgggcctgagagtgtggcagttcgtgagcgccgtgctgttcagcggcatcgccatcatggccctggccttccccgaccagctgtacgacgccgtgttcgacggcgcccaggtgaccagcaagacccccatcagactgtacggcggcgccctgctgagcatcagcctgatcatgtggaacgccctgtacaccgccgagaaggtgatcatcagatggaccctgctgaccgaggcctgctacttcggcgtgcagttcctggtggtgaccgccaccctggccgagaccggcctgatgagcctgggcatcctgctgctgctggtgagcagactgctgttcgtggtgatcagcatctactactactaccaggtgggcagaagacccaagaaggcctag

SEQ ID NO: 92860 - DNA, 477 bp, Artificial Sequence
  derived and/or modified sequence
atggccgccaagcagcccccccccctgatgaagaagcacagccagaccgacctggtgagcagactgaagaccagaaagatcctgggcgtgggcggcgaggacgacgacggcgaggtgcacagaagcaagatcagccaggtgctgggcaacgagatcaagttcaccatcagagagcccctgggcctgagagtgtggcagttcgtgagcgccgtgctgttcagcggcatcgccatcatggccctggccttccccgaccagctgtacgacgccgtgttcgacggcgcccaggtgaccagcaagacccccatcagactgtacggcggcgccctgctgagcatcagcctgatcatgtggaacgccctgtacaccgccgagaaggtgatcatcagatggaccctgctgaccgaggcctgctacttcggcgtgcagttcctggtggtgaccgccaccctggccgagaccggcctgatgagctag

SEQ ID NO: 92861 - DNA, 570 bp, Artificial Sequence
  derived and/or modified sequence
atggcggccaagcagccccctccattaatgaagaaacacagtcagactgacctggtgtccagactcaagaccagaaagattcttggcgttgggggtgaggatgacgacggggaagtccatagaagtaagatctcccaggtgttgggaaacgaaatcaagttcactatacgggagccactcggcctcagggtctggcagttcgtttcagccgtgctgttctctggcatagcaataatggcactggcctttcccgaccagttatacgatgctgtttttgacggcgcgcaggtaaccagcaagactccaatccggctttacggaggggccctgctctctattagcctaattatgtggaacgcactgtatactgctgaaaaagtgatcatccggtggactctgttgacagaggcttgttattttggcgtgcagtttttggtcgttactgccacgttggcagagactggcttaatgagtctggggatcttgcttctcctcgtcagtcgcctgctgttcgtggtcataagcatttactactattaccaggtcggcaggcggcccaaaaaggcatag

SEQ ID NO: 92862 - DNA, 570 bp, Artificial Sequence
  derived and/or modified sequence
atggccgccaaacaaccccctccccttatgaagaagcactcccagacagatttagtatcccgactgaaaacgcgcaagattctgggtgtgggcggggaggacgacgatggtgaggtccaccgctccaaaatcagtcaggtgctaggtaatgaaatcaagttcaccatccgcgaaccacttggcctcagggtgtggcagttcgtgtccgccgtcctcttcagcggcatcgccatcatggctctggcattccccgatcaactgtacgatgcagtattcgatggcgcccaggtgacatctaagaccccaattagactctacggcggcgccctgctgtctatctcgctgataatgtggaacgcactgtacacagcagaaaaagtgattatccgctggacgctcctcactgaggcctgctattttggggtgcagtttctggtggtgaccgcgaccctggcagagaccggtttaatgagcctgggaatccttcttttgctcgtgagtaggctgctgtttgtcgtgattagcatctattactactaccaggtggggagacggcctaaaaaagcatag

SEQ ID NO: 92863 - DNA, 570 bp, Artificial Sequence
  derived and/or modified sequence
atggcagctaagcagcccccacccctgatgaagaaacactcacagaccgatctcgtgtcccggctgaagacccgaaaaattctcggagttggaggggaagatgacgatggtgaggtgcacaggagtaagatttctcaggtgctgggcaatgaaatcaaatttacaatccgtgagccgttaggcttacgcgtgtggcagtttgttagtgctgtgctgttcagtggtattgccattatggccctcgctttcccagatcagctatatgacgccgtgtttgatggcgcgcaagtaacttctaagacaccaatcagactctacggcggtgccttgctaagcatttcactgataatgtggaacgctctgtacacggcagaaaaggtcatcattcgctggacgttacttacggaggcttgttacttcggggtccaattccttgttgtgaccgctacattggcggagaccggcttgatgagtctgggcatcctgctgctactcgtcagcaggctgctctttgtggtgatcagcatttactactactatcaggtcgggcggaggcccaaaaaggcatag

SEQ ID NO: 92864 - DNA, 477 bp, Artificial Sequence
  derived and/or modified sequence
atggcagcaaaacagccaccccctctcatgaagaaacactcgcaaacagaccttgtgtctaggttgaagacaagaaaaatattaggtgtcggaggcgaggatgatgatggcgaagtccatcgctcaaagatcagccaggtattgggcaacgagattaagtttacaataagggaaccactcggccttagggtgtggcaatttgtcagcgcggtgttgttctctggcattgccataatggccctggctttccccgatcagctgtatgatgccgttttcgacggcgctcaagttacctctaaaacccctatccgcctttacggcggggccctgctctctattagtctgatcatgtggaatgctctgtatacagccgaaaaagttattatcaggtggaccttgctgactgaagcttgttactttggcgtgcagttcttagttgttactgccactctggctgagaccggcttaatgagttag

SEQ ID NO: 92865 - DNA, 570 bp, Artificial Sequence
  derived and/or modified sequence
atggccgccaagcagccacctcccttgatgaaaaagcattcacagaccgatctagtgtcacggttgaagacgagaaagattctgggcgtcggaggagaggacgacgacggcgaagtgcatcggtcaaaaatttcccaggtcctgggaaatgaaataaaatttacaattcgggaaccactcggcctgcgagtttggcaattcgtcagcgcggtactatttagtgggattgctatcatggccctggcttttccagaccagctgtacgacgccgtgttcgacggtgcgcaagttacctccaaaacacctatacggctttatggcggagctctcttaagtatcagcctgataatgtggaacgccctgtataccgctgagaaggtgatcataagatggacactgctgaccgaggcttgttacttcggagttcaattcctagtggtcaccgcaactttagccgagactggcctgatgtctctgggcattctcctattactcgttagccgcctgctgttcgtggttatctctatttattactattatcaagtggggagaagacccaaaaaggcttag

SEQ ID NO: 92866 - DNA, 570 bp, Artificial Sequence
  derived and/or modified sequence
atggccgccaagcagcccccacccctgatgaagaagcacagccagacagacctggtgtcccggctgaagaccaggaagatcctgggcgtgggcggagaagatgatgatggagaggtgcacaggagcaagatcagccaggtgctgggcaatgagatcaagttcaccatccgggagcccctgggcctgcgggtgtggcagtttgtgtctgctgtgctcttcagcggcatcgccatcatggccctggccttcccagaccagctgtatgatgctgtgtttgatggagcccaggtgaccagcaagacccccatccggctgtatggaggagccctgctgagcatcagcctcatcatgtggaatgccctgtacacagctgagaaggtgatcatccgctggaccctgctgacagaggcctgctactttggagtgcagttcctggtggtgacagccaccctggccgagaccggcctgatgagcctgggcatcctgctgctgctggtgtcccggctgctgtttgtggtgatcagcatctactactactaccaggtgggccggcggcccaagaaggcctag

SEQ ID NO: 92867 - DNA, 477 bp, Artificial Sequence
  derived and/or modified sequence
atggccgccaagcagcccccacccctgatgaagaagcacagccagacagacctggtgtcccggctgaagaccaggaagatcctgggcgtgggcggagaagatgatgatggagaggtgcacaggagcaagatcagccaggtgctgggcaatgagatcaagttcaccatccgggagcccctgggcctgcgggtgtggcagtttgtgtctgctgtgctcttcagcggcatcgccatcatggccctggccttcccagaccagctgtatgatgctgtgtttgatggagcccaggtgaccagcaagacccccatccggctgtatggaggagccctgctgagcatcagcctcatcatgtggaatgccctgtacacagctgagaaggtgatcatccgctggaccctgctgacagaggcctgctactttggagtgcagttcctggtggtgacagccaccctggccgagaccggcctgatgtcctag

SEQ ID NO: 92868 - DNA, 570 bp, Artificial Sequence
  derived and/or modified sequence
atggccgccaagcagcccccccccctgatgaagaagcacagccagaccgacctggtcagtaggctcaagacaagaaagatcctgggcgttggtggcgaggatgacgacggagaagtccataggagcaaaatcagccaggtgctggggaacgaaattaaattcaccattagggaacctttaggactgagggtgtggcagttcgtgtccgccgttttgttctctggaatcgcgattatggcgttagcattcccagaccagctgtacgatgctgtctttgatggagcacaggtgaccagcaagacacctataaggttgtatggcggggcactgttgagcatcagccttataatgtggaacgcattgtataccgccgagaaggtcattatcagatggacactgctcaccgaggcctgttatttcggcgtccagtttttggtcgtgactgctacgctggctgagactggtctgatgagcctgggcattctcctgcttctggtctccagactgctgtttgtggtcatttcgatatattactactatcaggttggacgcaggcctaagaaagcatag

SEQ ID NO: 92869 - DNA, 570 bp, Artificial Sequence
  derived and/or modified sequence
atggccgccaagcagcccccccccctgatgaagaagcacagccagactgatcttgtttcgaggctaaagacgagaaagatattaggtgttgggggagaagacgatgacggtgaagtgcacaggagtaagatctcccaggtgctcgggaatgagatcaagttcacgattagggagcctctcggccttcgagtctggcagtttgttagcgccgtgctattcagcggcatcgcaatcatggccctggccttccctgaccagttatatgacgccgtgtttgacggagcacaagttaccagcaagacaccaattaggctctatggaggtgccctgctgtctatcagtttgatcatgtggaacgccctgtatactgccgaaaaggtgataatacggtggaccttactgaccgaagcgtgctacttcggagtacaatttcttgtggttactgcaacgctggcagagacaggcctgatgagcctgggcattctccttctgctggtgagtcgtctcctttttgtagttatctccatttactactattaccaggtgggcagaaggccaaaaaaagcttag

SEQ ID NO: 92870 - DNA, 570 bp, Artificial Sequence
  derived and/or modified sequence
atggccgccaagcagcccccccccctgatgaagaagcacagccagactgacttggtgtcccgtctgaagaccagaaagatactaggggtgggcggtgaggacgatgatggtgaggtgcaccggtccaagatcagccaagtgctcggaaacgagatcaaattcaccataagggagccacttggactgcgcgtgtggcaattcgtgtccgcagtgttgtttagtggaattgcaataatggctctggcttttccagaccaattatatgacgccgtcttcgacggtgcacaagttacaagtaagactccaatccgtctctacggcggagccctcttatccatttccctgattatgtggaatgccttgtatacggccgagaaagtgattatccgatggacactgctgactgaggcgtgctattttggagtccaattcctggtagttaccgctacactggccgagactggactaatgagcctagggattctccttctattggtatcccgacttttgttcgtggtaatctccatttactattactatcaggtaggtcgacgaccaaagaaggcttag

SEQ ID NO: 92871 - DNA, 477 bp, Artificial Sequence
  derived and/or modified sequence
atggccgccaagcagcccccccccctgatgaagaagcacagccagactgacctcgttagcaggctgaagacaagaaaaattctgggcgttggaggcgaggacgatgacggcgaggtgcataggagtaagatcagccaggtgctcggtaatgagattaaattcactataagggagccattgggcctgcgggtctggcagttcgtgagcgctgtattatttagcggcatcgccattatggcgttggcgttccctgatcagctctatgacgccgtcttcgacggggcacaggtgacatccaaaacccccattaggctatatggtggggccctcctgagcattagcctgatcatgtggaacgccctgtacacagccgagaaggtgatcattcgctggaccctgttaacagaggcttgttactttggagtgcagtttctggtggtgaccgccaccttagcagagaccggactaatgtcatag

SEQ ID NO: 92872 - DNA, 570 bp, Artificial Sequence
  derived and/or modified sequence
atggccgccaagcagcccccccccctgatgaagaagcacagccagaccgacttagtgagtaggctgaagacgcgaaaaattctgggagtcgggggggaggatgacgatggcgaggtgcatcgttccaaaatcagtcaggtcctgggcaacgagatcaagttcaccattcgggaaccactgggcctgagagtgtggcagttcgtctctgccgtactgttctcaggtattgctatcatggccctcgctttccccgaccagctttacgacgccgtgtttgacggagcccaggtcacatccaagacacctatcaggctgtacgggggcgcccttttatcgattagtttgattatgtggaacgccctgtataccgccgaaaaagtaataattcggtggaccttgctgaccgaggcgtgttatttcggcgtgcaatttttggtcgtcacagccactctcgcagaaacaggactaatgtcgttagggattctgctgcttcttgtatcaaggctgctgttcgtcgtgatctccatttattattactatcaagttgggcgaagaccgaaaaaagcttag

SEQ ID NO: 92873 - DNA, 570 bp, Artificial Sequence
  derived and/or modified sequence
atggcagccaagcagcctccccctcttatgaaaaaacactcgcagactgacctggtcagcaggctgaaaacacgaaagatcctcggtgtaggcggtgaggatgatgacggcgaggtccaccggtccaagatctcccaagttctcggaaacgagatcaaattcacgatccgcgagccattagggcttcgtgtctggcaatttgtgtccgccgtgctgtttagtggcatcgctattatggcactggcctttcccgaccagctatatgacgccgtgtttgacggggctcaggtaacttcgaagactcctataagactttatggcggagcgttactgtctatttcattaattatgtggaatgcgctgtacaccgccgagaaggtgattatcagatggacgcttctaacagaagcctgttacttcggagtacagttccttgttgtcaccgctacactggctgagacgggcctgatgagccttggcattttattgctcctggtgtccaggctgctcttcgtggtcataagtatttactactattatcaggtcggaaggaggccgaaaaaagcttag

SEQ ID NO: 92874 - DNA, 570 bp, Artificial Sequence
  derived and/or modified sequence
atggcagccaaacagcctccacctctgatgaaaaaacattctcagaccgacctagtgtccagactgaagactaggaagatcctcggggtggggggagaggatgacgatggtgaggtccataggagcaaaatcagccaagtgcttggtaacgaaatcaaattcactattcgggagccccttggtctcagagtttggcagttcgtaagcgccgttctcttttctggtattgctatcatggcactggccttcccggaccagttgtacgacgctgtgtttgacggcgcacaggttacctcaaagacaccaatcaggctatatggtggcgcactcctgagtatttccctcattatgtggaatgccttatatactgctgagaaggtgatcatccgttggactcttctgacagaggcctgctactttggggtgcagtttctcgtcgtaaccgccacgctggcagaaacaggactgatgtcgcttgggatcttgctcctcttggtctccagactactgtttgtggtgatttcaatatattattactaccaggttggcagacgccctaaaaaggcgtag

SEQ ID NO: 92875 - DNA, 570 bp, Artificial Sequence
  derived and/or modified sequence
atggctgcaaaacagccccctcctttgatgaaaaagcatagccagactgacctggtgtccagactgaagacccgtaagattctgggcgtcggaggagaggacgatgatggggaagtacatcgatcaaagatctcgcaggtacttggcaacgagatcaagttcaccatccgggagccccttggtctccgcgtttggcaattcgtgtcggccgtactgttttctgggatagccataatggccctggccttccctgaccagctatatgatgccgtcttcgacggcgctcaggtcaccagtaagacccctataaggctgtacgggggagccctgttatccataagcctgattatgtggaacgccctctatactgcagaaaaggttataattcgctggacgctgctcaccgaggcctgctatttcggggtacaatttctcgtggttacagcaaccctagccgagaccggtcttatgtctcttggcatccttcttctgctggtcagccgcttactgttcgtagttatttcgatctactactactatcaggttggtcggaggccgaaaaaggcttag

SEQ ID NO: 92876 - DNA, 477 bp, Artificial Sequence
  derived and/or modified sequence
atggccgctaagcagccgcctcccctgatgaagaagcatagccagactgacctcgtgtcacgcctgaaaacccgaaagatcctaggtgttggcggagaagacgacgacggcgaggttcaccgctctaaaatcagtcaggtattggggaatgagattaagtttactattcgcgaacctctcggattgagagtgtggcagttcgtctctgccgtcctgttcagcgggatcgcaattatggctctggctttccccgaccagttatatgacgcagtatttgacggtgcacaggtaacgagcaagaccccaattcgcctgtacggaggcgctctgctgagcattagcttaatcatgtggaatgctctctacacggctgagaaggtgattattagatggacactcttaaccgaggcttgctatttcggagttcaattcctcgtcgtcacggctacactggccgaaaccgggctgatgtcatag

SEQ ID NO: 92877 - DNA, 570 bp, Artificial Sequence
  derived and/or modified sequence
atggctgcgaagcagcctcccccactcatgaagaagcactcacagaccgatctggtgtccaggctgaaaacacgcaagattttaggagtgggcggagaggacgacgatggggaagtgcatcggtcaaaaatatctcaagttctcggcaatgagattaaattcactatcagagagcctttgggcctacgcgtgtggcagttcgtgtcggccgtcctgttttccggaatagcaattatggccctggcctttcccgatcagctctatgatgctgttttcgacggggcacaagttaccagcaaaactccaatacgcctgtatggaggcgcactcctcagtatctcgctcatcatgtggaacgccttatataccgccgaaaaggtgattatcagatggaccctgctcaccgaggcttgctattttggagtgcagttcctcgtggtgaccgcaacgctggctgagacgggcctgatgagtctcggaatactcctgctgctggtgagtcgcctcctctttgtggtcatttccatatattactactatcaggtcggaagacgccctaagaaggcatag

SEQ ID NO: 92878 - DNA, 3648 bp, Artificial Sequence
  derived and/or modified sequence
caggcggcccccgggagagcctcgcgggggagccgggagcctggtttccccgccaacccccatcccgcccgccccggcggccaccctgggggcgaggcagcccggcgcgtgggaggggacggcgcgccattggcttgtgcgcggaaccgagaggagggaccagcgcgggccgccagactcggtaagccccggccgcgcagggcgccgcgcgcagtccagccggcccggccctgccctgccctgccctgtcctgccctgccctgccctgccctgccctgcactgcccggcccggcacgggcggcgcgatgtgaggcgtccgagcccggagcctccgcctggcatcagctccacgtagcccagcgccggcacgcgcgaggccccgcccatcttgcagggcagctgtgattagagaagccagggccaccccggagccagcctctgaggcttcacctcaccccgtttacactgctgtctcctctgcatagatttggctgactgaggacgcgacagcccttctgcagaggccgggctggaggagaagatggcggccaagcagcccccgcctctgatgaagaagcacagccagacggacctcgtgagccgcctgaagacccgcaagatcctcggcgtgggcggggaggatgacgacggggaggtgcatcgctccaagatcagccaggtcttaggcaatgaaatcaagtttaccattcgggagcctttggggctcagggtctggcagttcgtctctgctgtgctcttctccggcattgccatcatggcgcttgccttccctgaccagctctatgatgcggtctttgatggagcccaggtgaccagcaagacccccatccgcctctacggcggtgccctcctcagcatctccctgatcatgtggaacgctctctacacggctgagaaggtcatcattcgatggaccctgctcaccgaagcttgctatttcggggtccagttcttggtggtcactgccacgctagctgagacgggcctcatgtccctggggatcctgctgctcctggtcagccgcctcctttttgtcgtcatcagcatttactactattaccaagtcggccgaagacccaagaaggcctagttgcccgctgggcctggggccctgcccatgcctgggccagagtggcgctggggcctcggcttccctttggctcctggaaggcaggagggtcccctgccctgccccagtcctgccccagggaggcagggggtggggggccttcctttcctcctgggcaccccgtgtgctgtgatctcctgggctttcaggcttgacatgctggtctggggagagacagggcctctgctgccctgttcttcaccctcacagtgatacctcctttccttgggtctcttggcctccagaccccctcaatagacactgactaaagtcaggctggagtcatgagggtagtgggctaagtcgagggtccagcctcttctgccaggaagcccttcttgcttttgagagaggctgtgaccaccccccatccttctccctacactcccagccaacctagtgcccaagcagctaaacttggcttccttctaatcctggaaaaccctgtacccctcctcctcaatctggccctctccacatgcacaccctgaaaacacacacagacacacaacacacacacatacacacccctgaacacacacacagacacacatacacccatgatgtgagcaaacacacacacgtgcgccttcatagcccagccaagggcatgcaggcagggtgtgctgcctgagatggcacctccctttcagccattcttcaagaatgggccacacacagctagaagtcctctcccagctagaagtcctgtccccactctcctggcctgacaagatgagctctcctgggaccttgctctagggcactctgcctctaccctaggacactggaatgccctgggagccccctccctgcaaccagcctgagttcagccccacggacaaagggacacacagcccccaatggagaccattgtaagtggtggggctgggagaggaggaacagaaggaaagccatagcgctctcttgccccttggcatgtaccccaaggcctgatggccactgggctcagcctgtcccccactcctgcctgcttcccggtgagctgccccccacacgtgcagcccgggctgcctccagggtctggctgagtgggatcaggtggccctccaactcagcacaggaaataagtagaaacatttcagcaggccacctcccctcatcttccccgccctgtccagcgccctggcaaaggctgacaactggctgtcttggggccgaacagcccctgccctgcctctgagggcccaccagcctgtgctgcatacccaccgcccagcttctccctgagggcccaccagcctgtgctgcatacccaccgcccagcttctccctgagggcccaccagcctgtgctgtacaccccgttagtccctgatcccaaccttctccctcctgccagcacaccgatgcacacaccggaagtggcgagcccaagccctggggacaggtgtagggagaaaagcagccccaggcctcagactcgcttcccatcctggcatagagtgggggatggctggagggtgtctataggtacagcccgctctggctgctgccaggtgggcccctgccaggggtcctcacccctgtccaccctgtgcctggctgtccctgcacccagatacagcaacatggcctgtacccagcagagtggtggcaccaccatggttacagcggatgccccgagactctgcttggtaaacgtggcagagcagaatgggaggctggaccctgaggaagggcccctctcctggcatctgtctcttgctacctaagcctgtgcctctccctaaagagctgcctccctgctgccgagccctggtctggccacgagccaccactgcctcccgctgctgcccacaggtggtgccgccaatgggcagtgccctcaggccgaagcctcaatcccccatctgagccaggcctaatcctctaatagtgatggttggtttgtcctcccataactgcaggtggattccacctggggaatgaggctgcgtgtcgggcgtctgctggccctgagacatccagtcttccacactcaactgtgggatgggagggtggcgtggccttaccccatgaggctgtccaggctctggcacacagctgtgctcacaaaatactgggtggcttggttagagctaattgtagtggagcctgcaggtgagggtgagggagggggctgcaggtcaggtaagatctggaagacagacgtacagcttggagggcagggggactctaaggcaaggagatttacagttgggaaggaggcagtggcagaggggtgagggacaggggcccttaagtccagcgaggaaagctcggtgtgggcccgctctacgctccgtttggggtgacctggaacgcctcttctcccagctccctccagccatcagcagcctcttgtcaagcttctgcctcgccccagtctatccccaaccccaaatcaagaccacctttcttcacggtcactatttattctttgttcctttttctttttgtaagaaacattcacaaaaaccagtgcaaaaccatca

SEQ ID NO: 92879 - DNA, 3381 bp, Artificial Sequence
  derived and/or modified sequence
agtccagccggcccggccctgccctgccctgccctgtcctgccctgccctgccctgccctgccctgcactgcccggcccggcacgggcggcgcgatgtgaggcgtccgagcccggagcctccgcctggcatcagctccacgtagcccagcgccggcacgcgcgaggcccgaagtgggaatgatggctccatttcacagatgaggaaaccgagactcagagcacaaggccacacagcaggaagagcccttctgcagaggccgggctggaggagaagatggcggccaagcagcccccgcctctgatgaagaagcacagccagacggacctcgtgagccgcctgaagacccgcaagatcctcggcgtgggcggggaggatgacgacggggaggtgcatcgctccaagatcagccaggtcttaggcaatgaaatcaagtttaccattcgggagcctttggggctcagggtctggcagttcgtctctgctgtgctcttctccggcattgccatcatggcgcttgccttccctgaccagctctatgatgcggtctttgatggagcccaggtgaccagcaagacccccatccgcctctacggcggtgccctcctcagcatctccctgatcatgtggaacgctctctacacggctgagaaggtcatcattcgatggaccctgctcaccgaagcttgctatttcggggtccagttcttggtggtcactgccacgctagctgagacgggcctcatgtccctggggatcctgctgctcctggtcagccgcctcctttttgtcgtcatcagcatttactactattaccaagtcggccgaagacccaagaaggcctagttgcccgctgggcctggggccctgcccatgcctgggccagagtggcgctggggcctcggcttccctttggctcctggaaggcaggagggtcccctgccctgccccagtcctgccccagggaggcagggggtggggggccttcctttcctcctgggcaccccgtgtgctgtgatctcctgggctttcaggcttgacatgctggtctggggagagacagggcctctgctgccctgttcttcaccctcacagtgatacctcctttccttgggtctcttggcctccagaccccctcaatagacactgactaaagtcaggctggagtcatgagggtagtgggctaagtcgagggtccagcctcttctgccaggaagcccttcttgcttttgagagaggctgtgaccaccccccatccttctccctacactcccagccaacctagtgcccaagcagctaaacttggcttccttctaatcctggaaaaccctgtacccctcctcctcaatctggccctctccacatgcacaccctgaaaacacacacagacacacaacacacacacatacacacccctgaacacacacacagacacacatacacccatgatgtgagcaaacacacacacgtgcgccttcatagcccagccaagggcatgcaggcagggtgtgctgcctgagatggcacctccctttcagccattcttcaagaatgggccacacacagctagaagtcctctcccagctagaagtcctgtccccactctcctggcctgacaagatgagctctcctgggaccttgctctagggcactctgcctctaccctaggacactggaatgccctgggagccccctccctgcaaccagcctgagttcagccccacggacaaagggacacacagcccccaatggagaccattgtaagtggtggggctgggagaggaggaacagaaggaaagccatagcgctctcttgccccttggcatgtaccccaaggcctgatggccactgggctcagcctgtcccccactcctgcctgcttcccggtgagctgccccccacacgtgcagcccgggctgcctccagggtctggctgagtgggatcaggtggccctccaactcagcacaggaaataagtagaaacatttcagcaggccacctcccctcatcttccccgccctgtccagcgccctggcaaaggctgacaactggctgtcttggggccgaacagcccctgccctgcctctgagggcccaccagcctgtgctgcatacccaccgcccagcttctccctgagggcccaccagcctgtgctgcatacccaccgcccagcttctccctgagggcccaccagcctgtgctgtacaccccgttagtccctgatcccaaccttctccctcctgccagcacaccgatgcacacaccggaagtggcgagcccaagccctggggacaggtgtagggagaaaagcagccccaggcctcagactcgcttcccatcctggcatagagtgggggatggctggagggtgtctataggtacagcccgctctggctgctgccaggtgggcccctgccaggggtcctcacccctgtccaccctgtgcctggctgtccctgcacccagatacagcaacatggcctgtacccagcagagtggtggcaccaccatggttacagcggatgccccgagactctgcttggtaaacgtggcagagcagaatgggaggctggaccctgaggaagggcccctctcctggcatctgtctcttgctacctaagcctgtgcctctccctaaagagctgcctccctgctgccgagccctggtctggccacgagccaccactgcctcccgctgctgcccacaggtggtgccgccaatgggcagtgccctcaggccgaagcctcaatcccccatctgagccaggcctaatcctctaatagtgatggttggtttgtcctcccataactgcaggtggattccacctggggaatgaggctgcgtgtcgggcgtctgctggccctgagacatccagtcttccacactcaactgtgggatgggagggtggcgtggccttaccccatgaggctgtccaggctctggcacacagctgtgctcacaaaatactgggtggcttggttagagctaattgtagtggagcctgcaggtgagggtgagggagggggctgcaggtcaggtaagatctggaagacagacgtacagcttggagggcagggggactctaaggcaaggagatttacagttgggaaggaggcagtggcagaggggtgagggacaggggcccttaagtccagcgaggaaagctcggtgtgggcccgctctacgctccgtttggggtgacctggaacgcctcttctcccagctccctccagccatcagcagcctcttgtcaagcttctgcctcgccccagtctatccccaaccccaaatcaagaccacctttcttcacggtcactatttattctttgttcctttttctttttgtaagaaacattcacaaaaaccagtgcaaaaccatca

SEQ ID NO: 92880 - DNA, 2647 bp, Artificial Sequence
  derived and/or modified sequence
aagccccggccgcgcagggcgccgcgcgcagtccagccggcccggccctgccctgccctgccctgtcctgccctgccctgccctgccctgccctgcactgcccggcccggcacgggcggcgcgatgtgaggcgtccgagcccggagcctccgcctggcatcagctccacgtagcccagcgccggcacgcgcgaggccccccttctgcagaggccgggctggaggagaagatggcggccaagcagcccccgcctctgatgaagaagcacagccagacggacctcgtgagccgcctgaagacccgcaagatcctcggcgtgggcggggaggatgacgacggggaggtgcatcgctccaagatcagccaggtcttaggcaatgaaatcaagtttaccattcgggagcctttggggctcagggtctggcagttcgtctctgctgtgctcttctccggcattgccatcatggcgcttgccttccctgaccagctctatgatgcggtctttgatggagcccaggtgaccagcaagacccccatccgcctctacggcggtgccctcctcagcatctccctgatcatgtggaacgctctctacacggctgagaaggtcatcattcgatggaccctgctcaccgaagcttgctatttcggggtccagttcttggtggtcactgccacgctagctgagacgggcctcatgtccctggggatcctgctgctcctggtcagccgcctcctttttgtcgtcatcagcatttactactattaccaagtcggccgaagacccaagaaggcctagttgcccgctgggcctggggccctgcccatgcctgggccagagtggcgctggggcctcggcttccctttggctcctggaaggcaggagggtcccctgccctgccccagtcctgccccagggaggcagggggtggggggccttcctttcctcctgggcaccccgtgtgctgtgatctcctgggctttcaggcttgacatgctggtctggggagagacagggcctctgctgccctgttcttcaccctcacagtgatacctcctttccttgggtctcttggcctccagaccccctcaatagacactgactaaagtcaggctggagtcatgagggtagtgggctaagtcgagggtccagcctcttctgccaggaagcccttcttgcttttgagagaggctgtgaccaccccccatccttctccctacactcccagccaacctagtgcccaagcagctaaacttggcttccttctaatcctggaaaaccctgtacccctcctcctcaatctggccctctccacatgcacaccctgaaaacacacacagacacacaacacacacacatacacacccctgaacacacacacagacacacatacacccatgatgtgagcaaacacacacacgtgcgccttcatagcccagccaagggcatgcaggcagggtgtgctgcctgagatggcacctccctttcagccattcttcaagaatgggccacacacagctagaagtcctctcccagctagaagtcctgtccccactctcctggcctgacaagatgagctctcctgggaccttgctctagggcactctgcctctaccctaggacactggaatgccctgggagccccctccctgcaaccagcctgagttcagccccacggacaaagggacacacagcccccaatggagaccattgtaagtggtggggctgggagaggaggaacagaaggaaagccatagcgctctcttgccccttggcatgtaccccaaggcctgatggccactgggctcagcctgtcccccactcctgcctgcttcccggtgagctgccccccacacgtgcagcccgggctgcctccagggtctggctgagtgggatcaggtggccctccaactcagcacaggaaataagtagaaacatttcagcaggccacctcccctcatcttccccgccctgtccagcgccctggcaaaggctgacaactggctgtcttggggccgaacagcccctgccctgcctctgagggcccaccagcctgtgctgcatacccaccgcccagcttctccctgagggcccaccagcctgtgctgcatacccaccgcccagcttctccctgagggcccaccagcctgtgctgtacaccccgttagtccctgatcccaaccttctccctcctgccagcacaccgatgcacacaccggaagtggcgagcccaagccctggggacaggtgtagggagaaaagcagccccaggcctcagactcgcttcccatcctggcatagagtgggggatggctggagggtgtctataggtacagcccgctctggctgctgccaggtgggcccctgccaggggtcctcacccctgtccaccctgtgcctggctgtccctgcacccagatacagcaacatggcctgtacccagcagagtggtggcaccaccatggttacagcggatgccccgagactctgcttggtaaacgtggcagagcagaatgggaggctggaccctgaggaagggcccctctcctggcatctgtctcttgctacctaagcctgtgcctctccctaaagagctgcctccctgctgccgagccctggtctggccacgagccaccactgcctccc

SEQ ID NO: 92881 - DNA, 658 bp, Artificial Sequence
  derived and/or modified sequence
gatgtgaggcgtccgagcccggagcctccgcctggcatcagctccacgtagcccagcgccggcacgcgcgaggcccatttggctgactgaggacgcgacaggtactcagcttctttctgcatctcagttgcccagcacaggggctggcacgcacccttctgcagaggccgggctggaggagaagatggcggccaagcagcccccgcctctgatgaagaagcacagccagacggacctcgtgagccgcctgaagacccgcaagatcctcggcgtgggcggggaggatgacgacggggaggtgcatcgctccaagatcagccaggtcttaggcaatgaaatcaagtttaccattcgggagcctttggggctcagggtctggcagttcgtctctgctgtgctcttctccggcattgccatcatggcgcttgccttccctgaccagctctatgatgcggtctttgatggagcccaggtgaccagcaagacccccatccgcctctacggcggtgccctcctcagcatctccctgatcatgtggaacgctctctacacggctgagaaggtcatcattcgatggaccctgctcaccgaagcttgctatttcggggtccagttcttggtggtcactgccacgctagctgagacgggcctcatgtcc

SEQ ID NO: 92882 - DNA, 3703 bp, Artificial Sequence
  derived and/or modified sequence
agtctttgcccccgcagggccgcggacggaggtggtggcggagttcccgctgcccacaagtctggcccgaccttctggggtgggggcctgggggcaggggccctgggccggagaacccggggccgcctaacggctcggagctcaccgccgggggacaccggcgctgaggcctgggtctcagaaagtgggaagtgggaatgatggctccatttcacagatgaggaaaccgagactcagagcacaaggccacacagcaggaagagagaaatgaaaacttacggtcccacagaaacgcgggtttgtagcagctctattcataatcatcaacaactggaaacaacccacatggccttcagtgaccgaatggataaacaagctgttacacgtaccccagggaatactgctctccaataaaaaggagcggactcttgatacacacagtgacttggaggaatctcaaaggcattctgctcaatgacaggagccagcctcaaaagatttggctgactgaggacgcgacaggtactcagcttctttctgcatctcagttgcccagcacaggggctggcacgcacccttctgcagaggccgggctggaggagaagatggcggccaagcagcccccgcctctgatgaagaagcacagccagacggacctcgtgagccgcctgaagacccgcaagatcctcggcgtgggcggggaggatgacgacggggaggtgcatcgctccaagatcagccaggtcttaggcaatgaaatcaagtttaccattcgggagcctttggggctcagggtctggcagttcgtctctgctgtgctcttctccggcattgccatcatggcgcttgccttccctgaccagctctatgatgcggtctttgatggagcccaggtgaccagcaagacccccatccgcctctacggcggtgccctcctcagcatctccctgatcatgtggaacgctctctacacggctgagaaggtcatcattcgatggaccctgctcaccgaagcttgctatttcggggtccagttcttggtggtcactgccacgctagctgagacgggcctcatgtccctggggatcctgctgctcctggtcagccgcctcctttttgtcgtcatcagcatttactactattaccaagtcggccgaagacccaagaaggcctagttgcccgctgggcctggggccctgcccatgcctgggccagagtggcgctggggcctcggcttccctttggctcctggaaggcaggagggtcccctgccctgccccagtcctgccccagggaggcagggggtggggggccttcctttcctcctgggcaccccgtgtgctgtgatctcctgggctttcaggcttgacatgctggtctggggagagacagggcctctgctgccctgttcttcaccctcacagtgatacctcctttccttgggtctcttggcctccagaccccctcaatagacactgactaaagtcaggctggagtcatgagggtagtgggctaagtcgagggtccagcctcttctgccaggaagcccttcttgcttttgagagaggctgtgaccaccccccatccttctccctacactcccagccaacctagtgcccaagcagctaaacttggcttccttctaatcctggaaaaccctgtacccctcctcctcaatctggccctctccacatgcacaccctgaaaacacacacagacacacaacacacacacatacacacccctgaacacacacacagacacacatacacccatgatgtgagcaaacacacacacgtgcgccttcatagcccagccaagggcatgcaggcagggtgtgctgcctgagatggcacctccctttcagccattcttcaagaatgggccacacacagctagaagtcctctcccagctagaagtcctgtccccactctcctggcctgacaagatgagctctcctgggaccttgctctagggcactctgcctctaccctaggacactggaatgccctgggagccccctccctgcaaccagcctgagttcagccccacggacaaagggacacacagcccccaatggagaccattgtaagtggtggggctgggagaggaggaacagaaggaaagccatagcgctctcttgccccttggcatgtaccccaaggcctgatggccactgggctcagcctgtcccccactcctgcctgcttcccggtgagctgccccccacacgtgcagcccgggctgcctccagggtctggctgagtgggatcaggtggccctccaactcagcacaggaaataagtagaaacatttcagcaggccacctcccctcatcttccccgccctgtccagcgccctggcaaaggctgacaactggctgtcttggggccgaacagcccctgccctgcctctgagggcccaccagcctgtgctgcatacccaccgcccagcttctccctgagggcccaccagcctgtgctgcatacccaccgcccagcttctccctgagggcccaccagcctgtgctgtacaccccgttagtccctgatcccaaccttctccctcctgccagcacaccgatgcacacaccggaagtggcgagcccaagccctggggacaggtgtagggagaaaagcagccccaggcctcagactcgcttcccatcctggcatagagtgggggatggctggagggtgtctataggtacagcccgctctggctgctgccaggtgggcccctgccaggggtcctcacccctgtccaccctgtgcctggctgtccctgcacccagatacagcaacatggcctgtacccagcagagtggtggcaccaccatggttacagcggatgccccgagactctgcttggtaaacgtggcagagcagaatgggaggctggaccctgaggaagggcccctctcctggcatctgtctcttgctacctaagcctgtgcctctccctaaagagctgcctccctgctgccgagccctggtctggccacgagccaccactgcctcccgctgctgcccacaggtggtgccgccaatgggcagtgccctcaggccgaagcctcaatcccccatctgagccaggcctaatcctctaatagtgatggttggtttgtcctcccataactgcaggtggattccacctggggaatgaggctgcgtgtcgggcgtctgctggccctgagacatccagtcttccacactcaactgtgggatgggagggtggcgtggccttaccccatgaggctgtccaggctctggcacacagctgtgctcacaaaatactgggtggcttggttagagctaattgtagtggagcctgcaggtgagggtgagggagggggctgcaggtcaggtaagatctggaagacagacgtacagcttggagggcagggggactctaaggcaaggagatttacagttgggaaggaggcagtggcagaggggtgagggacaggggcccttaagtccagcgaggaaagctcggtgtgggcccgctctacgctccgtttggggtgacctggaacgcctcttctcccagctccctccagccatcagcagcctcttgtcaagcttctgcctcgccccagtctatccccaaccccaaatcaagaccacctttcttcacggtcactatttattctttgttcctttttctttttgtaagaaacattcacaaaaaccagtgcaa

SEQ ID NO: 92883 - protein, 1187 aa, Artificial Sequence
  derived and/or modified sequence
MKNLLTEKCISSHNFHQKVIKQRMEKKVDSRYFKDGAVKKPYSAKTLSNKKSSASFGIRRELPSTSHLVQYRGTHTCTRQGRLRELRIRFYYEQRLLRKVFEEWKEEWWVFQHEWKLCVRADCHYRYYLYNLMFQTWKTYVRQQQEMRNKYIRAEVHDAKQKMRQAWKSWLIYVVVRRTKLQMQTTALEFRQRIILRVWWSTWRQRLGQVRVSRALHASALKHRALSLQVQAWSQWREQLLYVQKEKQKVVSAVKHHQHWQKRRFLKAWLEYLQVRRVKRQQNEMAERFHHVTVLQIYFCDWQQAWERRESLYAHHAQVEKLARKMALRRAFTHWKHYMLLCAEEAAQFEMAEEHHRHSQLLLHRFWNLWRSQIEQKKERELLPLLHAAWDHYRIALLCKCIELWLQYTQKRRYKQLLQARADGHFQQRALPAAFHTWNRLWRWRHQENVLSARATRFHRETLEKQVFSLWRQKMFQHRENRLAERMAILHAERQLLYRSWFMWHQQAAARHQEQEWQTVACAHHRHGRLKKAFCLWRESAQGLRTERTGRVRAAEFHMAQLLRWAWSQWRECLALRGAERQKLMRADLHHQHSVLHRALQAWVTYQGRVRSILREVAARESQHNRQLLRGALRRWKENTMARVDEAKKTFQASTHYRRTICSKVLVQWREAVSVQMYYRQQEDCAIWEAQKVLDRGCLRTWFQRWWDCSRRSAQQRLQLERAVQHHHRQLLLEGLARWKTHHLQCVRKRLLHRQSTQLLAQRLSRTCFRQWRQQLAARRQEQRATVRALWFWAFSLQAKVWATWLAFVLERRRKKARLQWALQAYQGQLLQEGATRLLRFAASMKASRQQLQAQQQVQAAHSLHRAVRRCATLWKQKVLGRGGKPQPLAAIAPSRKVTFEGPLLNRIAAGAGDGTLETKRPQASRPLGALGRLAAEEPHALELNTAHSARKQPRRPHFLLEPAQSQRPQKPQEHGLGMAQPAAPSLTRPFLAEAPTALVPHSPLPGALSSAPGPKQPPTASTGPELLLLPLSSFMPCGAAAPARVSAQRATPRDKPPVPSSLASVPDPHLLLPGDFSATRAGPGLSTAGSLDLEAELEEIQQQLLHYQTTKQNLWSCRRQASSLRRWLELNREEPGPEDQEVEQQVQKELEQVEMQIQLLAEELQAQRQPIGACVARIQALRQALC

SEQ ID NO: 92884 - DNA, 3564 bp, Artificial Sequence
  derived and/or modified sequence
atgaaaaatctcctgacagagaagtgtatatccagtcacaatttccaccagaaggttatcaagcagaggatggagaaaaaggtcgatagccgctacttcaaagatggcgcggtgaagaaaccatattccgcgaaaacgctgtcaaacaagaagagctcggcttccttcgggatcaggcgcgagctgccttccacttcccatctggtccaataccggggcacccatacgtgcacccgtcaggggcgcctccgggaactacggattagattctactacgagcagcggttgctccggaaggtgtttgaggagtggaaggaggaatggtgggtgttccaacacgaatggaaactgtgtgttcgtgccgattgtcactacagatactacttgtacaaccttatgttccagacctggaagacatacgtgaggcagcagcaggagatgcggaataagtatatccgggccgaggtgcatgatgctaaacaaaaaatgagacaagcctggaaatcatggttgatctacgttgtggtcagacgaacgaagcttcagatgcagacaactgctttggaatttagacagcgtatcatactcagagtctggtggtctacatggagacagcgcctgggccaggtccgagtctccagagctctgcatgcgagtgcgctcaaacatagggcgctttccctccaggtccaggcttggagccaatggagggaacaacttctctacgttcagaaggaaaagcagaaggtcgtgagcgctgtgaaacaccaccagcattggcagaagcgaagattcctcaaagcctggctggaatacttgcaggtccgccgggtcaaaaggcaacagaatgaaatggccgaaaggttccaccacgttactgttctgcagatctacttttgtgattggcagcaggcctgggagcgccgagaatctctgtatgcccaccatgcccaggtcgaaaaactagctcgaaaaatggcacttcggcgcgcctttactcactggaaacactatatgctactgtgtgctgaggaggctgcacagttcgagatggccgaagagcaccacaggcattcccagcttttgctccatcggttctggaatttatggaggtcacagatcgaacagaagaaagaacgggagctgctgcccctcctacacgccgcctgggatcactacagaatcgccctgctctgcaaatgtatcgaactgtggcttcagtacacccaaaagcggcggtacaaacagctgctgcaggcccgcgctgacggacatttccagcagcgtgcactccctgctgcgttccatacatggaatcggctctggcggtggcggcatcaagagaatgtcctgagtgctcgggctactcgatttcaccgggaaactctcgaaaagcaggttttttctctctggcgccaaaagatgttccagcacagggaaaaccgcctagccgagcgaatggcaatcctacacgccgaacgccagcttctgtatcgctcttggtttatgtggcaccaacaagcggccgctcgccaccaggaacaggagtggcagaccgtcgcatgcgcccatcaccggcatggcaggctaaaaaaggcattctgtctgtggagggagtccgcccaaggactgcggacagaacgcacgggtagagtgagggcagcagagtttcacatggctcaactgttgcggtgggcatggagccaatggcgggaatgcctggccctgaggggcgcagagagacagaaattgatgagggccgatttgcaccatcagcattctgttcttcatcgagcactgcaggcctgggtgacataccagggaagggttcgctccattctgagagaggtggcagcacgtgagagccagcataataggcagctgttgcgtggggcactccgcaggtggaaggaaaatacaatggctcgagtagatgaagctaaaaaaacctttcaggcatctacccactacaggcggaccatatgttccaaagtgctcgtccagtggagggaggctgtcagcgtgcaaatgtattacaggcaacaagaggactgcgcaatttgggaggcacagaaggttctggataggggatgcctgcgtacctggttccagagatggtgggactgtagcagacggtccgcccagcagcggctccaacttgaacgggcggttcagcaccaccatcgccagttgctcctagagggccttgcccgctggaagacccaccatctgcagtgtgtgcgtaagcgcctcctccatcgtcaatctacccagctgctagcccagcggctgagtagaacatgttttcgacagtggaggcagcagttagccgctcgccgacaggagcaaagagccactgtgcgtgcactttggttttgggccttctctctacaagcaaaggtatgggctacctggttagcttttgtcttggagcgtcgcagaaagaaagcccggctccaatgggccctccaggcgtatcagggacagttgctgcaagaaggagcaactaggttgctgcgttttgccgccagcatgaaggcctccagacagcagctgcaagcacagcaacaggtccaggcagcccattctctgcaccgcgcagtgcgcagatgcgctacactgtggaaacagaaggtgctgggaaggggaggcaaaccccagccactggctgcaattgctccctccaggaaggttactttcgagggccccctattgaacaggattgccgccggggctggtgacggcactctggagactaaacgtccgcaagccagtagacccctgggggctctgggtagactggctgcggaagagccccacgctcttgaactgaacaccgctcacagcgcaagaaaacagccacgccgtccacacttcctgcttgagcccgctcagagtcagcgtcctcagaaacctcaggaacacgggcttggaatggcccagcctgcggcaccatccctgaccagacccttcttggccgaggctcccacggctctggtcccccattcacctttgcccggagcccttagttccgcccctggcccaaaacagcccccaaccgctagcaccggacctgagcttttacttttgccccttagttcatttatgccctgcggagcggctgcccctgcccgggttagcgcgcagagagcaacaccccgggacaaaccgccggtccccagctctctagccagtgtgcccgatccccacctcttgcttccaggagatttcagtgccactagggccggcccaggactgtcgacagccggcagcctggatctggaagccgagctcgaagaaattcagcaacaactcctacactaccagaccactaaacagaatctgtggtcatgccgacgacaagcctcgagtctgaggcgctggctggaactgaaccgggaggagcccggacccgaggatcaggaggtcgagcagcaagtgcagaaagaactggagcaggtagaaatgcagattcagttgctggctgaagaactgcaggcgcaacgccagcccataggggcatgcgttgctcgcatccaagccttacgacaggctctgtgttag

SEQ ID NO: 92885 - DNA, 3564 bp, Artificial Sequence
  derived and/or modified sequence
atgaagaacctgctgacagagaagtgcatcagcagccacaacttccaccagaaggtgatcaagcagaggatggagaagaaggtggacagccgctacttcaaggatggagctgtgaagaagccctacagcgccaagaccctgagcaacaagaagagcagcgccagctttggcatcagaagagagctgcccagcaccagccacctggtgcagtaccggggcacccacacctgcacccggcagggccgcctgcgggagctgcgcatccgcttctactatgagcagaggctgctgaggaaggtgtttgaggagtggaaggaggagtggtgggtgttccagcacgagtggaagctgtgtgtgcgggctgactgccactaccgctactacctgtacaacctgatgttccagacctggaagacctacgtgcggcagcagcaggagatgaggaacaagtacatccgggcagaggtgcatgatgccaagcagaagatgaggcaggcctggaagtcctggctgatctacgtggtggtgcggaggaccaagctgcagatgcagaccacagccctggagttccggcagaggatcatcctgcgggtgtggtggagcacctggaggcagaggctgggccaggtgcgggtgtcccgggccctgcacgccagcgccctgaagcaccgggccctgagcctgcaggtgcaggcctggagccagtggagggagcagctgctgtatgtgcagaaggagaagcagaaggtggtgtctgctgtgaagcaccaccagcactggcagaagaggcgcttcctgaaggcctggctggagtacctgcaggtgcggcgggtgaagaggcagcagaatgagatggccgagcgcttccaccacgtgacagtgctgcagatctacttctgtgactggcagcaggcctgggagcggcgggagagcctgtatgcccaccacgcccaggtggagaagctggccaggaagatggccctgcggcgggccttcacccactggaagcactacatgctgctgtgtgccgaggaggccgcccagtttgagatggccgaggagcaccaccgccacagccagctgctgctgcaccgcttctggaacctgtggaggagccagatcgagcagaagaaggagcgggagctgctgcccctgctgcacgccgcctgggaccactacagaattgccctgctgtgcaagtgcatcgagctgtggctgcagtacacccagaagaggcgctacaagcagctgctgcaggcccgggcagatggccacttccagcagagggccctgcctgctgccttccacacctggaaccggctgtggcgctggaggcaccaggagaatgtgctgagcgcccgggccacccgcttccaccgggagaccctggagaagcaggtgttcagcctgtggaggcagaagatgttccagcaccgggagaaccggctggccgagaggatggccatcctgcacgccgagcggcagctgctgtaccgctcctggttcatgtggcaccagcaggccgccgcccggcaccaggagcaggagtggcagacagtggcctgtgcccaccacagacatggccgcctgaagaaggccttctgcctgtggagggagagcgcccagggcctgaggacagagaggacaggccgggtgcgggctgctgagttccacatggcccagctgctgcgctgggcctggagccagtggagggagtgcctggccctgcggggagctgagcggcagaagctgatgagagctgacctgcaccaccagcacagcgtgctgcaccgggccctgcaggcctgggtgacctaccagggccgggtgcgcagcatcctgcgggaggtggccgcccgggagagccagcacaaccggcagctgctgcggggggccctgcggcgctggaaggagaacaccatggcccgggtggatgaggccaagaagaccttccaggccagcacccactacagaaggaccatctgcagcaaggtgctggtgcagtggagggaggccgtgtctgtgcagatgtactaccggcagcaggaggactgtgccatctgggaggcccagaaggtgctggaccggggctgcctgcggacctggttccagcgctggtgggactgcagcagaagaagtgcccagcagaggctgcagctggagagagctgtgcagcaccaccaccggcagctgctgctggagggcctggcccgctggaagacccaccacctgcagtgtgtgaggaagaggctgctgcaccggcagagcacccagctgctggcccagaggctgagcaggacctgcttccggcagtggaggcagcagctggccgcccggcggcaggagcagagggccaccgtgcgggccctgtggttctgggccttcagcctgcaggccaaggtgtgggccacctggctggcctttgtgctggagaggaggaggaagaaggcccggctgcagtgggccctgcaggcctaccagggccagctgctgcaggagggcgccacccggctgctgcgctttgctgcctccatgaaggccagccggcagcagctgcaggcccagcagcaggtgcaggccgcccacagcctgcacagagctgtgagaagatgtgccaccctgtggaagcagaaggtgctgggccggggcggcaagccccagcccctggccgccatcgcccccagcaggaaggtgacctttgagggccccctgctgaacagaattgctgctggagctggagatggcaccctggagaccaagaggccccaggccagccggcccctgggcgccctgggccgcctggccgctgaggagccccacgccctggagctgaacacagcccacagcgccaggaagcagccccggcggccccacttcctgctggagcccgcccagagccagaggccccagaagccccaggagcacggcctgggcatggcccagcctgctgcccccagcctgacccggcccttcctggccgaggcccccacagccctggtgccccacagccccctgcccggggccctgagcagcgcccctggccccaagcagcccccaacagccagcactggacctgagctgctgctgctgcccctgagcagcttcatgccctgtggggctgctgccccagcccgggtgtctgcccagagggccaccccccgggacaagccccctgtgcccagcagcctggcctctgtgcctgacccccacctgctgctgcccggggacttcagcgccacccgggccggccctggcctgagcacagctggcagcctggacctggaggccgagctggaggagatccagcagcagctgctgcactaccagaccaccaagcagaacctgtggagctgccggcggcaggccagcagcctgcggcgctggctggagctgaaccgggaggagcccggccctgaggaccaggaggtggagcagcaggtgcagaaggagctggagcaggtggagatgcagatccagctgctggccgaggagctgcaggcccagaggcagcccatcggggcctgtgtggcccgcatccaggccctgcggcaggccctgtgctag

SEQ ID NO: 92886 - DNA, 3564 bp, Artificial Sequence
  derived and/or modified sequence
atgaagaacctgctgaccgagaagtgcatcagcagccacaacttccatcagaaggtgatcaagcagaggatggagaaaaaggttgattcaaggtatttcaaggatggagccgtcaaaaagccctactcagccaagactctttccaataaaaagtcgtctgcttcgtttggcatccgccgagaactgcccagtacttcccacttggtgcagtaccgtgggacccacacgtgtaccagacaaggacgcctgagggagctgagaatcagattctattatgagcagcggctcctccgaaaagtgttcgaggaatggaaggaagagtggtgggtgttccaacacgaatggaagctgtgcgtgagagctgactgtcactatcggtactatctttacaacctaatgtttcagacatggaaaacctatgttagacagcaacaggagatgagaaacaagtatatccgcgctgaggtacacgacgccaagcagaagatgaggcaagcatggaagagttggcttatctatgtggttgtcagaaggactaagctgcagatgcagactactgcactggaatttaggcagcgaattatcctgcgggtgtggtggtctacatggcgacaacggttggggcaagtgagagtaagtcgcgcgctgcatgccagtgcactgaaacaccgagccctctcgttacaagtgcaggcttggagccagtggcgggaacagctgctatacgttcaaaaggaaaaacagaaagtcgtttcagctgtgaagcatcaccagcactggcagaagagaagatttctgaaagcatggcttgagtatctgcaagtgcgtcgggtgaagaggcaacagaacgaaatggcagagaggtttcaccatgtgactgtcctgcagatctatttttgcgattggcaacaggcttgggaacgacgagagagcctgtacgctcaccacgcccaagtggaaaagctggcacgcaaaatggccctgcggagagcattcacccattggaaacattatatgttactttgcgccgaagaggccgcacagttcgagatggcagaggagcatcacaggcacagccaactgctgctacatcggttctggaatctctggagatcccagattgaacaaaagaaggagagggagttgctccctttgcttcacgctgcttgggatcactatagaatcgcactcctgtgcaagtgtatcgaattgtggctccaatacacccagaagcggaggtacaaacagctgctccaggctcgtgcggacggccactttcaacagagagcactgccagctgcgtttcacacttggaacagactgtggagatggaggcaccaggaaaacgtgctgagtgcccgtgctacccgattccaccgggagacgctggaaaagcaggtgttcagtttatggcgacaaaaaatgtttcaacacagggaaaaccggttagcggagcggatggcaatactccacgctgagcgccagctcctgtaccggagttggtttatgtggcaccagcaggccgccgccaggcaccaggagcaggaatggcaaacagttgcctgtgcccatcaccggcacggtcggttgaaaaaggctttctgtctttggcgggaaagcgcccagggcctgagaacggagaggaccggccgagtgcgcgcagccgaattccatatggcccagctcctgaggtgggcctggtcccagtggagagaatgcctggccctgcgaggcgccgaacggcagaaactgatgcgggccgacctccaccatcaacactcagtcttacaccgcgcactgcaggcttgggtgacctatcagggtcgggtgagaagcattctgagggaggtcgctgcacgggagtcacaacacaacagacagctgctcagaggtgctctgaggagatggaaagagaacaccatggccagggtggacgaagccaagaaaacgttccaggcaagtacacactaccgacgcacaatctgctcaaaagttctggtccaatggagagaggcagtgtctgtgcagatgtactatcggcagcaggaggactgtgccatttgggaagcacagaaggtactggaccggggttgtctgcgcacttggtttcagcgctggtgggactgttccagaaggagtgcacagcagagactgcagctcgagcgagccgttcagcatcatcaccgccagctgctcctggaaggacttgctcgatggaaaacacatcacctccagtgtgtaagaaagcgacttctccatcgccaatctacgcagctgttagcgcagaggttgtctcggacttgtttccggcaatggcgacagcagcttgcagcaagacgtcaagagcaaagagcaaccgtgcgggctctttggttctgggcctttagcttgcaagcaaaggtgtgggccacctggcttgccttcgtcctggagcggagacggaagaaggcccgcctacagtgggctctgcaggcttatcagggacaactgctgcaggaaggcgcaacacggcttctcagatttgccgcttccatgaaggcctcgagacagcagctacaggcacagcagcaggtgcaggcagcacactcactgcatagagctgtacgcagatgtgctaccctttggaaacaaaaggtgctgggtagggggggtaagcctcagccattagccgctatagcaccctctcggaaggtaacatttgaaggacctcttttgaatcggattgctgctggagcaggggatggcaccttagaaacgaagagaccccaggcctcccgccctctaggcgcactcggcaggctcgctgccgaggagccacacgctctggagctgaatactgcacactccgctcgaaaacagccgagacgcccccatttccttttagagcccgcccagtcccagagaccccagaagccccaggagcatggactgggcatggcccagccagctgctcccagtctgacaagaccatttctggcagaggccccaaccgccttggtgccgcacagccctctacccggagcactctccagtgcccccggtcctaaacagccaccaaccgctagcacaggtcctgagctgctgcttctccccctgagctcattcatgccatgcggcgcggccgcgccagcccgagtgagtgcccagagagctaccccacgggacaagccccctgtgccctctagtctcgcatcagtgccggacccccatctcctgctaccaggcgacttcagtgctacccgtgccggaccaggattgagtaccgccggatccctcgatctcgaagccgagctcgaagaaattcagcaacagctcctgcactaccagacaaccaagcagaacctgtggtcgtgcagacgacaggccagttcactgaggcggtggttggaactgaaccgggaggaacccggccctgaggatcaggaggtagagcagcaagtccagaaagagctggaacaggtggaaatgcaaattcaattactcgccgaggaactgcaggctcagcgtcaacctatcggggcctgcgtggccagaatccaggcacttcgacaggcgctttgctag

SEQ ID NO: 92887 - DNA, 3564 bp, Artificial Sequence
  derived and/or modified sequence
atgaagaacctactaacggaaaagtgcattagctctcataacttccaccagaaagttattaagcagagaatggaaaaaaaggtggatagtagatatttcaaagacggcgcagtcaaaaagccctatagcgccaagacactgtccaataaaaaaagctccgcctcgtttggcatcagacgggagctgccgtcaactagtcacttggtgcagtacaggggaacccatacatgtactcgccaggggaggttgagagagttgaggatcagattttactacgagcagaggctgctgcgcaaggttttcgaagagtggaaggaagaatggtgggtgttccagcacgagtggaaactttgtgtgcgggctgactgccattatagatattatctatacaatcttatgttccagacatggaaaacgtatgtgcgccagcagcaggagatgaggaacaagtatatcagggccgaggtccacgatgccaagcaaaaaatgcggcaggcgtggaagagttggcttatttacgtcgtggtaagacggacgaaactgcagatgcagaccaccgccctcgaattcagacagaggatcatccttcgtgtatggtggtccacatggcggcagaggcttggccaggtgcgggtctcgagagccctacacgcctccgcgcttaaacaccgcgctctctcactgcaggtccaggcctggagccagtggcgagaacaactactgtatgtccaaaaagagaaacaaaaggtagtgtctgccgtgaagcaccaccagcattggcagaaaaggcgtttcctgaaggcttggctcgagtacctccaggtgcggagagtgaaacgccagcagaacgagatggccgagaggtttcatcatgttaccgtcctgcagatctacttctgcgactggcagcaggcctgggaaagaagagaatcgttgtatgcccatcatgctcaggtggagaagcttgccaggaaaatggccttaagaagagcattcacccactggaagcactatatgctgttatgcgctgaagaggcagcccaatttgagatggccgaagagcatcacaggcatagtcaactcctacttcatagattttggaatctgtggcggtctcagattgaacagaaaaaggagagggagcttttgcccctccttcatgcagcatgggatcactatcgaattgctcttttatgtaaatgtatcgaactgtggctgcaatatacccagaaacggagatataaacagctgctgcaagcccgtgccgatggtcacttccagcagcgtgctcttccagcagctttccacacctggaatagattgtggcgatggcggcatcaagagaacgtgcttagcgctcgggctaccaggtttcaccgagagacacttgagaaacaggtgttttccttatggaggcagaagatgtttcagcacagggagaaccggctggcggagcgcatggccatcctccacgcagagagacaattgctgtacaggtcttggttcatgtggcaccaacaggcagcagccagacatcaggagcaagagtggcagacagtcgcctgtgctcaccacagacatggacggttaaagaaagctttctgcctgtggagggagtctgcacaaggcctaaggaccgagcggactggtagagtaagggcggcagaatttcacatggctcaactgctgcgctgggcttggtcccagtggcgcgagtgccttgctctgcgaggcgctgaaagacagaaactaatgcgagccgacctgcatcaccagcattccgtgctgcatagagcccttcaagcctgggtcacttaccagggaagagtccgctctattttgcgggaggtggctgctcgagagtctcagcacaatagacagctgttgcgtggcgctcttagaagatggaaggagaataccatggctagggtggacgaagcgaagaagactttccaggcttcaacccactatcggagaacgatctgctcaaaagtgctggtgcagtggcgggaggccgtgtctgtccagatgtattataggcagcaggaagactgcgcaatatgggaagcccaaaaggtgcttgataggggatgcctgcgaacatggttccagcgctggtgggactgctcacgccgatcagcccagcaacggctccagctcgagcgtgcagttcagcatcaccacagacagttgctactagagggccttgccagatggaagactcatcacctgcagtgtgtgcggaaacgtctcctgcaccgacagagtactcaactcctggcccagcggcttagccggacatgttttcgacaatggcggcagcagctcgccgcacgacgccaggagcagagagctacagtgcgggctctgtggttttgggccttttcccttcaggccaaagtgtgggctacctggttggccttcgtgcttgagaggaggcgaaagaaggctcgacttcagtgggcgctacaagcttaccagggacagctcctgcaagaaggcgctactaggctgttgcggttcgccgctagcatgaaggcaagccgacaacagttgcaggctcagcagcaggtccaagcagcccactcccttcatagggcagtaagacggtgcgccacactttggaagcaaaaagttttggggaggggcggtaagccgcaaccactggcagccatcgcccctagccgcaaagtcacctttgaagggccactgctaaatagaatcgctgctggcgctggcgacggcacacttgagaccaaacgcccacaggccagcagaccattaggagcgttggggagactagcggctgaggagcctcacgcccttgagctgaacacagcccattcagccagaaagcagccgagaaggccccacttccttctggaacctgctcaatcacagcgcccacaaaagccccaagagcacggcctaggcatggcccagcctgccgcaccgtcccttacccgaccattcctggcggaggctcctactgccctggtcccgcatagtcctctgccgggtgcactttcatcagcccctgggcctaagcagcctcctacggcttccaccgggccagaactgttgttgctgcctctttcatcctttatgccttgcggcgcagcagcccctgccagggtgtccgctcagcgcgctaccccaagagacaaaccccctgtgcccagctctctggcctctgttcccgacccacatctgcttttacctggagattttagtgcaacaagagctggcccaggtctgtctaccgccggttccttagatcttgaggccgagctggaggagattcagcaacagcttctccactaccagacaaccaagcagaatctctggagctgtcgcaggcaggctagcagcctccgccgttggctggagttaaatcgggaggagccagggcctgaggaccaggaggtcgaacagcaggtgcaaaaagagctcgagcaggtcgagatgcagattcagctgttggccgaggagttgcaagctcagaggcaacctatcggggcatgtgtcgcaagaattcaggcactgagacaggccctttgttag

SEQ ID NO: 92888 - DNA, 4086 bp, Artificial Sequence
  derived and/or modified sequence
agcaagctgagctcagagcgaagctggcgagccaaggagataaagaaccctcggtggggatgcccagagggtgcatgctccacgcccctcgaaaccgattctcattgctgctgctgcaaagcaacccgaagtgcgccacctacccgactgaggctgcgcaagccccggggtctgggcggggtggtcctcgtgcgcgccgcgtcgccgtggagacgagggcgggcccgcgcgagactggcgtctagaggcgcgcgaagcgctgaggcgggcgtggaccgcgcgggagttaagaagcaggtcccggatcgccgtataccgccgggttttctcccaacgtcaggcccgatggctcggcttccccagttagaaggggaagataaaagactttgattcatgaagaatctgctcactgagaagtgtatatcaagccacaatttccatcaaaaagtgattaagcagagaatggagaagaaggttgattccaggtattttaaggatggtgcagttaagaaaccttattctgcaaagacactgtccaacaagaagtcttctgcatcctttgggatccggagggagttacctagtaccagtcatctagtgcagtatcgtggcacacatacttgtacccgacagggccggttaagagaactgcgcatcagattttactatgagcagcgattactacggaaggtcttcgaagaatggaaagaggagtggtgggttttccagcacgagtggaaactctgtgttcgagctgactgtcactacaggtattacctgtacaacctgatgttccagacgtggaagacctatgtgcgtcagcagcaggagatgaggaacaagtacattagagccgaggttcatgatgcaaagcaaaagatgcgacaggcctggaagtcctggttgatctacgtggttgttcgtaggaccaaacttcagatgcagactacagctctggagtttaggcaacggattatcttacgggtgtggtggagcacgtggaggcagcgactaggacaggtccgtgtgagccgtgccctccatgcctctgctttgaagcacagggccctgagcctccaggtgcaggcttggtcacagtggcgggaacagctcctgtatgtccagaaggagaaacaaaaggttgtctctgcagtgaaacatcatcagcactggcaaaaacggagatttctaaaggcctggcttgaatacctgcaagtccgcagagtgaagagacagcagaatgagatggctgagcgattccatcatgtcactgtgctccagatatacttctgtgactggcagcaggcctgggagcggagggagagcttgtacgctcaccatgcccaggtggagaaactggccaggaagatggccctgcggcgcgcctttactcactggaaacactacatgctgctgtgtgcagaagaagctgcccagtttgagatggcagaagagcaccacaggcacagccagctgctgctgcacaggttctggaacctctggcggtctcagattgagcagaaaaaggaaagagagctgctccccttactgcatgctgcctgggaccactacagaatagcactgctgtgcaaatgtatcgaattgtggctacagtatactcagaagaggcggtacaagcagctgctacaggccagagcggatggtcatttccagcagagagccctgcctgctgccttccacacatggaacagactctggcgatggcgccaccaggaaaatgtcctcagtgcaagagcaacacgtttccacagggagacattagagaagcaagtattttctctctggaggcagaagatgtttcagcatcgagaaaaccgcctggcagagagaatggccatccttcacgcagagcgacagcttctgtataggtcttggttcatgtggcaccagcaggcagcagcacgtcaccaggagcaggagtggcaaacagtggcctgtgcccaccaccgccacgggcggctcaagaaagctttctgcctctggagggaaagtgcccaagggctcagaacagagaggacgggcagggtgcgggcagcagaattccacatggcccagctcctgcgttgggcctggagccagtggagggagtgcctggccctgcggggagcggagcggcagaagctgatgcgagcagacctgcaccaccagcacagcgtgctgcacagggcgctgcaggcatgggtgacttaccagggcagggtgcgaagcatcctccgggaggtggcagccagggagagccagcacaacaggcagctgctgcgcggggcattacgtcgctggaaagagaacaccatggcccgagtggatgaagccaaaaaaacctttcaagcaagtactcattacagaaggaccatatgttccaaggtcctggtccagtggcgggaagctgtgtcagtgcagatgtattaccgacagcaggaggactgtgccatctgggaggcccagaaggtgctggacaggggctgtctgcggacctggtttcagcgctggtgggactgcagccggaggtcagcccagcagagactgcagctggagagggcagtgcaacaccaccaccggcagctgctgctggaggggctggcccggtggaagacgcaccatctgcagtgtgtcaggaagaggctcctgcacaggcagagcacccaactgctggcacagagactcagccggacctgcttccgccagtggagacaacagctggcagccaggaggcaggagcagcgggcgacagtgcgggccctgtggttctgggccttctcgctgcaggcaaaggtgtgggccacgtggctggcctttgtactggaaaggaggagaaagaaggcgcggctgcagtgggcgctccaggcctaccaggggcagctcctccaggagggtgccacgcggctcctgcgctttgcagccagcatgaaggcctcccggcagcagctgcaggcccagcagcaggtccaggcggctcacagtctccatcgtgccgtccgccgctgtgccacgctctggaaacagaaagtgctgggccggggcgggaagcctcagcccctggcagccatcgcacccagcaggaaagtgacgtttgagggtccccttctcaaccgcattgctgctggggctggggatggcacccttgagaccaagaggccacaggcttctcggcctctgggagctctgggccgcctggctgctgaggagccccacgccctggagctcaacactgcccactcagcgaggaagcagccgcgacgcccacacttcctgttggagcctgcgcagagccagaggcctcagaagccacaggaacatggcctaggcatggctcagccagcagccccctccctgacgcggcccttcctggcagaggccccgacagcactggtcccacacagccccctgcctggggccctgtcaagcgcccctggcccgaagcagcccccgacggcaagcacaggcccggagctgctgctgctgcctctttcctccttcatgccctgcggggcggctgcaccagccagggtgtcagcacagcgggctactcctagggataagcccccggtcccctcatccctggccagtgtccctgacccccatctactccttcctggggacttctcagccaccagggctgggcctggactttcaactgcaggcagcctggaccttgaggctgaacttgaggagatccagcagcaactactgcactaccagaccaccaagcagaacctctggtcctgtcggcggcaagcgagcagcctgcgcaggtggctggagctgaacagagaggagccggggcctgaggaccaggaagtagagcagcaggtgcagaaagagctggaacaggtggaaatgcagatccagctgctggcagaggagctccaggctcagcgccagcccattggcgcctgcgttgcccgcatccaggccctgcggcaggccctgtgctagcgtgttcgcaccaggaacgcaggtgctgggctgtcggggaggcctcaggccacctccaggaacagaacacagttttaagtttgattttttttatttcaaaatgctttgcaattaaatgaattactgttc

SEQ ID NO: 92889 - DNA, 3564 bp, Artificial Sequence
  derived and/or modified sequence
atgaagaacctgctgaccgagaagtgcatcagcagccacaacttccaccagaaggtgatcaagcagagaatggagaagaaggtggacagcagatacttcaaggacggcgccgtgaagaagccctacagcgccaagaccctgagcaacaagaagagcagcgccagcttcggcatcagaagagagctgcccagcaccagccacctggtgcagtacagaggcacccacacctgcaccagacagggcagactgagagagctgagaatcagattctactacgagcagagactgctgagaaaggtgttcgaggagtggaaggaggagtggtgggtgttccagcacgagtggaagctgtgcgtgagagccgactgccactacagatactacctgtacaacctgatgttccagacctggaagacctacgtgagacagcagcaggagatgagaaacaagtacatcagagccgaggtgcacgacgccaagcagaagatgagacaggcctggaagagctggctgatctacgtggtggtgagaagaaccaagctgcagatgcagaccaccgccctggagttcagacagagaatcatcctgagagtgtggtggagcacctggagacagagactgggccaggtgagagtgagcagagccctgcacgccagcgccctgaagcacagagccctgagcctgcaggtgcaggcctggagccagtggagagagcagctgctgtacgtgcagaaggagaagcagaaggtggtgagcgccgtgaagcaccaccagcactggcagaagagaagattcctgaaggcctggctggagtacctgcaggtgagaagagtgaagagacagcagaacgagatggccgagagattccaccacgtgaccgtgctgcagatctacttctgcgactggcagcaggcctgggagagaagagagagcctgtacgcccaccacgcccaggtggagaagctggccagaaagatggccctgagaagagccttcacccactggaagcactacatgctgctgtgcgccgaggaggccgcccagttcgagatggccgaggagcaccacagacacagccagctgctgctgcacagattctggaacctgtggagaagccagatcgagcagaagaaggagagagagctgctgcccctgctgcacgccgcctgggaccactacagaatcgccctgctgtgcaagtgcatcgagctgtggctgcagtacacccagaagagaagatacaagcagctgctgcaggccagagccgacggccacttccagcagagagccctgcccgccgccttccacacctggaacagactgtggagatggagacaccaggagaacgtgctgagcgccagagccaccagattccacagagagaccctggagaagcaggtgttcagcctgtggagacagaagatgttccagcacagagagaacagactggccgagagaatggccatcctgcacgccgagagacagctgctgtacagaagctggttcatgtggcaccagcaggccgccgccagacaccaggagcaggagtggcagaccgtggcctgcgcccaccacagacacggcagactgaagaaggccttctgcctgtggagagagagcgcccagggcctgagaaccgagagaaccggcagagtgagagccgccgagttccacatggcccagctgctgagatgggcctggagccagtggagagagtgcctggccctgagaggcgccgagagacagaagctgatgagagccgacctgcaccaccagcacagcgtgctgcacagagccctgcaggcctgggtgacctaccagggcagagtgagaagcatcctgagagaggtggccgccagagagagccagcacaacagacagctgctgagaggcgccctgagaagatggaaggagaacaccatggccagagtggacgaggccaagaagaccttccaggccagcacccactacagaagaaccatctgcagcaaggtgctggtgcagtggagagaggccgtgagcgtgcagatgtactacagacagcaggaggactgcgccatctgggaggcccagaaggtgctggacagaggctgcctgagaacctggttccagagatggtgggactgcagcagaagaagcgcccagcagagactgcagctggagagagccgtgcagcaccaccacagacagctgctgctggagggcctggccagatggaagacccaccacctgcagtgcgtgagaaagagactgctgcacagacagagcacccagctgctggcccagagactgagcagaacctgcttcagacagtggagacagcagctggccgccagaagacaggagcagagagccaccgtgagagccctgtggttctgggccttcagcctgcaggccaaggtgtgggccacctggctggccttcgtgctggagagaagaagaaagaaggccagactgcagtgggccctgcaggcctaccagggccagctgctgcaggagggcgccaccagactgctgagattcgccgccagcatgaaggccagcagacagcagctgcaggcccagcagcaggtgcaggccgcccacagcctgcacagagccgtgagaagatgcgccaccctgtggaagcagaaggtgctgggcagaggcggcaagccccagcccctggccgccatcgcccccagcagaaaggtgaccttcgagggccccctgctgaacagaatcgccgccggcgccggcgacggcaccctggagaccaagagaccccaggccagcagacccctgggcgccctgggcagactggccgccgaggagccccacgccctggagctgaacaccgcccacagcgccagaaagcagcccagaagaccccacttcctgctggagcccgcccagagccagagaccccagaagccccaggagcacggcctgggcatggcccagcccgccgcccccagcctgaccagacccttcctggccgaggcccccaccgccctggtgccccacagccccctgcccggcgccctgagcagcgcccccggccccaagcagccccccaccgccagcaccggccccgagctgctgctgctgcccctgagcagcttcatgccctgcggcgccgccgcccccgccagagtgagcgcccagagagccacccccagagacaagccccccgtgcccagcagcctggccagcgtgcccgacccccacctgctgctgcccggcgacttcagcgccaccagagccggccccggcctgagcaccgccggcagcctggacctggaggccgagctggaggagatccagcagcagctgctgcactaccagaccaccaagcagaacctgtggagctgcagaagacaggccagcagcctgagaagatggctggagctgaacagagaggagcccggccccgaggaccaggaggtggagcagcaggtgcagaaggagctggagcaggtggagatgcagatccagctgctggccgaggagctgcaggcccagagacagcccatcggcgcctgcgtggccagaatccaggccctgagacaggccctgtgctag

SEQ ID NO: 92890 - protein, 1160 aa, Artificial Sequence
  derived and/or modified sequence
MKNLLTEKCISSHNFHQKVIKQRMEKKVDSRFYYEQRLLRKVFEEWKEEWWVFQHEWKLCVRADCHYRYYLYNLMFQTWKTYVRQQQEMRNKYIRAEVHDAKQKMRQAWKSWLIYVVVRRTKLQMQTTALEFRQRIILRVWWSTWRQRLGQVRVSRALHASALKHRALSLQVQAWSQWREQLLYVQKEKQKVVSAVKHHQHWQKRRFLKAWLEYLQVRRVKRQQNEMAERFHHVTVLQIYFCDWQQAWERRESLYAHHAQVEKLARKMALRRAFTHWKHYMLLCAEEAAQFEMAEEHHRHSQLYFCFRALKDNVTHAHLQQIRRNLAHQQHGVTLLHRFWNLWRSQIEQKKERELLPLLHAAWDHYRIALLCKCIELWLQYTQKRRYKQLLQARADGHFQQRALPAAFHTWNRLWRWRHQENVLSARATRFHRETLEKQVFSLWRQKMFQHRENRLAERMAILHAERQLLYRSWFMWHQQAAARHQEQEWQTVACAHHRHGRLKKAFCLWRESAQGLRTERTGRVRAAEFHMAQLLRWAWSQWRECLALRGAERQKLMRADLHHQHSVLHRALQAWVTYQGRVRSILREVAARESQHNRQLLRGALRRWKENTMARVDEAKKTFQASTHYRRTICSKVLVQWREAVSVQMYYRQQEDCAIWEAQKVLDRGCLRTWFQRWWDCSRRSAQQRLQLERAVQHHHRQLLLEGLARWKTHHLQCVRKRLLHRQSTQLLAQRLSRTCFRQWRQQLAARRQEQRATVRALWFWAFSLQAKVWATWLAFVLERRRKKARLQWALQAYQGQLLQEGATRLLRFAASMKASRQQLQAQQQVQAAHSLHRAVRRCATLWKQKVLGRGGKPQPLAAIAPSRKVTFEGPLLNRIAAGAGDGTLETKRPQASRPLGALGRLAAEEPHALELNTAHSARKQPRRPHFLLEPAQSQRPQKPQEHGLGMAQPAAPSLTRPFLAEAPTALVPHSPLPGALSSAPGPKQPPTASTGPELLLLPLSSFMPCGAAAPARVSAQRATPRDKPPVPSSLASVPDPHLLLPGDFSATRAGPGLSTAGSLDLEAELEEIQQQLLHYQTTKQNLWSCRRQASSLRRWLELNREEPGPEDQEVEQQVQKELEQVEMQIQLLAEELQAQRQPIGACVARIQALRQALC

SEQ ID NO: 92891 - protein, 1031 aa, Artificial Sequence
  derived and/or modified sequence
MKNLLTEKCISSHNFHQKVIKQRMEKKVDSRFYYEQRLLRKVFEEWKEEWWVFQHEWKLCVRADCHYRVWWSTWRQRLGQVRVSRALHASALKHRALSLQVQAWSQWREQLLYVQKEKQKVVSAVKHHQHWQKRRFLKAWLEYLQVRRVKRQQNEMAERFHHVTVLQIYFCDWQQAWERRESLYAHHAQVEKLARKMALRRAFTHWKHYMLLCAEEAAQFEMAEEHHRHSQLYFCFRALKDNVTHAHLQQIRRNLAHQQHGVTLLHRFWNLWRSQIEQKKERELLPLLHAAWDHYRIALLCKCIELWLQYTQKRRYKQLLQARADGHFQQRALPAAFHTWNRLWRWRHQENVLSARATRFHRETLEKQVFSLWRQKMFQHRENRLAERMAILHAERQLLYRSWFMWHQQAAARHQEQEWQTVACAHHRHGRLKKAFCLWRESAQGLRTERTGRVRAAEFHMAQLLRWAWSQWRECLALRGAERQKLMRADLHHQHSVLHRALQAWVTYQGRVRSILREVAARESQHNRQLLRGALRRWKENTMARVDEAKKTFQASTHYRRTICSKVLVQWREAVSVQMYYRQQEDCAIWEAQKVLDRGCLRTWFQRWWDCSRRSAQQRLQLERAVQHHHRQLLLEGLARWKTHHLQCVRKRLLHRQSTQLLAQRLSRTCFRQWRQQLAARRQEQRATVRALWFWAFSLQAKVWATWLAFVLERRRKKARLQWALQAYQGQLLQEGATRLLRFAASMKASRQQLQAQQQVQAAHSLHRAVRRCATLWKQKVLGRGGKPQPLAAIAPSRKVTFEGPLLNRIAAGAGDGTLETKRPQASRPLGALGRLAAEEPHALELNTAHSARKQPRRPHFLLEPAQSQRPQKPQEHGLGMAQPAAPSLTRPFLAEAPTALVPHSPLPGALSSAPGPKQPPTASTGPELLLLPLSSFMPCGAAAPARVSAQRATPRDKPPVPSSLASVPDPHLLLPGDFSATRAGPGLSTAAWTLRLNLRRSSSNYCTTRPPSRTSGPVGGKRAACAGGWS

SEQ ID NO: 92892 - DNA, 3483 bp, Artificial Sequence
  derived and/or modified sequence
atgaagaatctgctaacagagaaatgtatctcctcccacaactttcaccagaaggtcattaagcagcgaatggaaaaaaaagtggacagccggttttactatgaacagcggctgctgcgtaaggtgtttgaagagtggaaggaagagtggtgggtatttcagcacgagtggaaactgtgcgttagggctgactgccattacagatactacctgtacaatctgatgtttcagacgtggaagacttatgtacggcagcagcaagagatgcggaacaagtacatacgagccgaggtacacgacgccaaacagaaaatgaggcaggcctggaagagttggcttatttatgtggtggtgaggaggaccaagttgcagatgcagacaaccgccctggaattccggcagcgcattattctgcgcgtgtggtggagcacctggcgccagcgacttgggcaggttagagtctcaagggcactgcatgcatccgccctaaaacacagagccctctcactgcaggtacaggcatggtcacagtggcgggagcagctcctgtacgtgcagaaggaaaaacagaaggtggtgagcgcagttaagcaccaccaacactggcagaagcgccggtttctgaaagcatggttagagtacttacaggtccggagggtcaaaagacagcagaacgagatggccgagaggttccaccatgtaaccgtgctccaaatctatttttgcgattggcaacaagcctgggagcgccgggaatctctctatgcccatcatgctcaggtggagaagcttgctcgcaaaatggcgctgcggagagcgtttacacattggaagcactacatgcttctctgtgccgaagaggcggctcagttcgagatggccgaagaacaccatcgccacagccaactttatttttgcttccgagccttgaaagacaatgtcacccatgctcatctgcagcagatacggcgaaatctggcccatcagcagcacggggtgacacttctgcacaggttttggaacctgtggcgctctcagatcgaacagaaaaaagagcgggaactcttacccttgctgcacgccgcctgggaccactacaggatagctttgttgtgtaaatgcattgaactgtggcttcaatatacacagaagcggcgatacaaacagctcctgcaggctcgggccgatggacattttcagcagagggcgcttccggctgctttccatacatggaatagactgtggcggtggagacatcaggagaatgtgctgtccgctcgggcgactagattccaccgtgagaccctggagaagcaggttttttcgctgtggaggcaaaagatgtttcaacaccgggagaacaggctggctgaaaggatggcaatcctccacgcagagcggcaactcctgtacagatcatggttcatgtggcatcagcaggcggccgcgcgtcatcaggaacaggagtggcagaccgtcgcctgtgcccaccaccggcacggaaggttgaagaaggccttctgcctgtggagggaaagtgcacaagggttgagaacagagcgcaccgggcgcgtacgcgcagctgaattccacatggcacagctcttgcgatgggcttggtctcaatggagggaatgcctggccctacggggtgctgaacgtcagaaactaatgagggccgacttgcaccaccaacatagtgtactacacagggcattacaggcatgggtcacctaccagggcagggtccgcagtattttgagagaagttgcagctagggaaagccagcacaatcgtcagcttttacgcggagcactccgaaggtggaaggagaatactatggctcgggtggacgaagcaaagaagacttttcaagcctcaacccactataggcgaactatctgttctaaagtgctggtccagtggagagaggctgtgtcggtgcagatgtactatcgccagcaggaggattgcgctatctgggaggctcagaaagtccttgatcgggggtgccttcgtacatggttccaacggtggtgggactgctctaggcgatcggcccagcagcgactgcagcttgagcgggctgtgcagcatcatcatcgacagctactcttagagggcttggcccggtggaagacgcaccatctacagtgcgtcagaaaaaggctcctgcacaggcagtccacccagttactggcccagcgtttatctcgcacgtgttttcgccaatggcgccagcagctggcggccaggcgacaggagcagagggccacagtgagagctctatggttttgggctttttctctgcaggccaaggtctgggccacctggcttgccttcgtcttggaacgcagacggaagaaagcgcgtctccagtgggccctccaggcttatcaaggtcagctgctgcaggaaggggctactaggctgctgcgctttgctgcatctatgaaagcctctcggcagcagctccaggctcagcagcaggtccaggctgcgcatagtcttcacagagccgtccggaggtgcgcaacactatggaagcagaaggtgctcggcaggggaggtaaacctcagccactcgcggccattgcacccagccgcaaagttaccttcgaggggccactgctgaaccgcattgccgccggggccggcgacggcacactcgagacaaagaggcctcaagcgtccaggccacttggcgctctgggacgattagccgctgaggagccacatgccctagagctgaacaccgcccactcagctcgtaaacaacccaggaggccccactttctgttagaacccgctcagagtcagcgcccccagaaaccccaagagcatgggctggggatggcgcagcccgcggccccctccctgaccaggcccttcctggcggaagcgcccaccgccttagtccctcattctccgctgcctggagccctgagctcagctcctggacccaagcagccacccaccgcctccaccggacctgaacttttgttgttgcccctgtcaagctttatgccttgtggcgccgccgcgcctgccagagttagtgcacagcgtgcaacccctcgtgataaaccaccagttccaagttctctggctagcgttcctgacccacacctcctgctgcctggggacttcagcgcgacgcgtgcagggccagggttgtctacagccggcagcttggatctggaagccgaactggaggagatccagcagcagctgctgcactaccaaaccaccaaacaaaacctgtggtcgtgccgtaggcaagcttcgtccctaaggcgctggttagaactgaaccgcgaagaacctggacccgaagaccaagaagtcgagcagcaagtccagaaagaattggagcaggtggagatgcagattcagctgttggccgaagagctgcaggctcaacgacaaccgatcggagcctgtgtagctcgaatccaggccctaagacaggctctatgctag

SEQ ID NO: 92893 - DNA, 3483 bp, Artificial Sequence
  derived and/or modified sequence
atgaaaaatctgctgaccgagaagtgtatttccagccacaacttccaccagaaagtcatcaaacagcggatggaaaagaaggtagattcacgcttctactatgagcagcggctgctgcggaaagtcttcgaagagtggaaggaggagtggtgggtcttccagcacgagtggaagctgtgtgtccgggccgactgccattatcgatactacctgtataatctgatgttccagacatggaagacctacgttaggcagcagcaggagatgcgcaataagtacattcgggccgaggttcatgatgctaaacagaagatgaggcaggcctggaaatcttggctcatttacgtcgtcgttcgaaggacgaagctgcagatgcagacgacggcgctggagtttcggcagcgaataattctccgagtgtggtggtccacttggcgacagagacttggtcaggtgcgagtaagcagggcactccacgcctcagctctgaaacaccgggcattgtccctccaggttcaggcatggtcacagtggagagaacagttactgtatgtgcagaaggagaagcagaaagtcgttagcgcggtgaagcatcatcagcactggcaaaaacgaagatttctgaaggcgtggctagaatatctgcaagtgcgtagggtgaaaagacagcagaacgaaatggctgaacgcttccatcacgtaaccgtcctgcagatctatttctgcgattggcaacaggcttgggagcgaagggagagtttgtatgctcaccacgcccaggtggagaaactggcccggaagatggccctgcgtagggctttcactcattggaagcactatatgctgctctgtgcagaggaagccgctcagtttgagatggccgaggaacaccaccggcactcccaactctacttttgctttagagcacttaaggacaacgtcactcatgctcacctgcagcagatcaggcggaacctcgcacatcagcagcacggcgtaacactcctgcaccggttttggaatctatggagaagccagatcgaacagaagaaggagcgggaattattacctctcctacatgccgcatgggatcactacagaatcgccttactttgcaagtgtatcgaactttggctccagtatacacagaagaggaggtataagcagctcctacaggcccgcgctgatgggcactttcaacagagagctctccctgctgcgtttcatacgtggaataggctgtggaggtggaggcatcaggagaatgtactgtctgctagagccacaagatttcaccgcgagacactagaaaagcaggtgttttccctttggagacaaaaaatgttccaacaccgggagaacaggctggccgaacgcatggccatactgcatgccgagcgacagcttctttacaggagttggtttatgtggcaccagcaagctgccgcccgacaccaggagcaggagtggcaaaccgtcgcatgtgcccaccatcgtcacgggcggctcaagaaggccttctgcctatggcgcgaatcggctcaagggctcagaactgagagaactggccgagtcagggctgctgagttccacatggcccaattattacgttgggcgtggtcgcagtggcgcgagtgcttggcactcaggggggcagagcgacaaaaactcatgagggccgatctccatcaccagcacagcgttttacacagagccctgcaggcctgggtgacataccagggtcgcgtgcgcagcattctgagggaagtcgcggctagggagtctcagcacaatagacagctgttaagaggtgccctgaggcgctggaaggaaaatacgatggcccgtgtcgacgaggctaaaaagaccttccaggcaagtactcactacaggagaacgatatgttctaaggtgctcgtccaatggagggaagccgtgtctgtgcagatgtactatcgacagcaggaggattgcgccatctgggaagcacagaaagtgttagaccgcggctgcctgcgcacatggttccagaggtggtgggactgctcacgacgttccgctcagcagagattgcagctggagcgggctgtccagcaccaccatcgacagttattgctagaaggccttgctagatggaaaactcaccatctccagtgcgtgcgtaagagactcctgcacagacaaagtacccagctgctggcccagcggctgagccggacttgcttcagacagtggaggcagcagttggctgccagacggcaggaacagcgggctaccgtcagggccctctggttttgggccttctcacttcaggccaaggtgtgggccacctggttggcctttgtgctagaacgccgcagaaaaaaggcccgactgcagtgggctctgcaggcatatcaaggacaactgcttcaggagggtgcaaccaggttgctccggtttgccgcctccatgaaggcctctcgccaacagctgcaggcccagcaacaggtccaggcggcccatagcttgcatcgcgctgtccgcaggtgtgcaaccttgtggaagcagaaggtcttaggacgcggaggaaaaccccaacctctggccgctatcgccccttcacgtaaagtcactttcgagggaccgttgctgaaccggatcgcagcaggggccggtgatggcacactcgaaactaaacggcctcaagcctcgaggcctctgggggcgctgggcaggctggcagccgaggagccgcacgccttagaattaaacacagctcactccgcacgcaagcagcccagacgaccccatttcttgcttgagccagcacaaagccagcgtcctcagaagccacaggagcacgggctggggatggcgcagccagctgcaccatcactgacacgaccctttctggccgaagcaccaacagctttggtgcctcattcccccttgcccggtgctctctcatctgcgcccggaccaaagcagccacccaccgcttccacgggccctgagctgttacttctgccactgtctagttttatgccctgtggggcagccgccccggcccgtgtatcagcccagagggccacaccgcgcgacaaaccccctgtgcctagctctttggcatccgtgcccgacccccacctgttactccctggcgacttttccgctacccgggcgggtcccggcctgagcaccgctgggagcctggatttggaggctgaacttgaagagatccagcagcagctccttcattaccagacgacgaaacagaacctgtggagctgtcgtcgccaggccagcagcctcaggaggtggctggaacttaatcgggaagaacctggacccgaggatcaggaggtagagcagcaggtgcagaaggagcttgagcaggtggaaatgcagatccagctcttggccgaagaactccaggcgcaaaggcagcctatcggagcgtgcgtggcgcgtatccaggctctgagacaggccctgtgctag

SEQ ID NO: 92894 - DNA, 3483 bp, Artificial Sequence
  derived and/or modified sequence
atgaagaacctgctgacagagaagtgcatcagcagccacaacttccaccagaaggtgatcaagcagaggatggagaagaaggtggacagccgcttctactatgagcagaggctgctgaggaaggtgtttgaggagtggaaggaggagtggtgggtgttccagcacgagtggaagctgtgtgtgcgggctgactgccactaccgctactacctgtacaacctgatgttccagacctggaagacctacgtgcggcagcagcaggagatgaggaacaagtacatccgggcagaggtgcatgatgccaagcagaagatgaggcaggcctggaagtcctggctgatctacgtggtggtgcggaggaccaagctgcagatgcagaccacagccctggagttccggcagaggatcatcctgcgggtgtggtggagcacctggaggcagaggctgggccaggtgcgggtgtcccgggccctgcacgccagcgccctgaagcaccgggccctgagcctgcaggtgcaggcctggagccagtggagggagcagctgctgtatgtgcagaaggagaagcagaaggtggtgtctgctgtgaagcaccaccagcactggcagaagaggcgcttcctgaaggcctggctggagtacctgcaggtgcggcgggtgaagaggcagcagaatgagatggccgagcgcttccaccacgtgacagtgctgcagatctacttctgtgactggcagcaggcctgggagcggcgggagagcctgtatgcccaccacgcccaggtggagaagctggccaggaagatggccctgcggcgggccttcacccactggaagcactacatgctgctgtgtgccgaggaggccgcccagtttgagatggccgaggagcaccaccgccacagccagctgtacttctgcttccgggccctgaaggacaacgtgacccacgcccacctgcagcagatcagaagaaacctggcccaccagcagcacggcgtgaccctgctgcaccgcttctggaacctgtggaggagccagatcgagcagaagaaggagcgggagctgctgcccctgctgcatgctgcctgggaccactaccgcatcgccctgctgtgcaagtgcatcgagctgtggctgcagtacacccagaagaggcgctacaagcagctgctgcaggcccgggcagatggccacttccagcagagggccctgcctgctgccttccacacctggaaccggctgtggcgctggaggcaccaggagaatgtgctgagcgcccgggccacccgcttccaccgggagaccctggagaagcaggtgttcagcctgtggaggcagaagatgttccagcacagagaaaatcggctggccgagaggatggccatcctgcatgctgagcggcagctgctgtaccgctcctggttcatgtggcaccagcaggccgccgcccggcaccaggagcaggagtggcagacagtggcctgtgcccaccaccgccacggccgcctgaagaaggccttctgcctgtggagggagagcgcccagggcctgaggacagagaggacaggccgggtgcgggctgctgagttccacatggcccagctgctgcgctgggcctggagccagtggagagaatgtctggccctgcggggagctgagcggcagaagctgatgagagctgacctgcaccaccagcacagcgtgctgcaccgggccctgcaggcctgggtgacctaccagggccgggtgcgcagcatcctgcgggaggtggccgcccgggagagccagcacaaccggcagctgctgcggggggccctgcggcgctggaaggagaacaccatggcccgggtggatgaggccaagaagaccttccaggccagcacccactacagaaggaccatctgcagcaaggtgctggtgcagtggagggaggccgtgtctgtgcagatgtactaccggcagcaggaggactgtgccatctgggaggcccagaaggtgctggaccggggctgcctgcggacctggttccagcgctggtgggactgcagccgccgcagcgcccagcagaggctgcagctggagagagctgtgcagcaccaccaccggcagctgctgctggagggcctggcccgctggaagacccaccacctgcagtgtgtgaggaagaggctgctgcaccggcagagcacccagctgctggcccagaggctgagcaggacctgcttccggcagtggaggcagcagctggccgcccggcggcaggagcagagggccaccgtgcgggccctgtggttctgggccttcagcctgcaggccaaggtgtgggccacctggctggcctttgtgctggagaggaggaggaagaaggcccggctgcagtgggccctgcaggcctaccagggccagctgctgcaggagggcgccacccggctgctgcgctttgctgcctccatgaaggccagccggcagcagctgcaggcccagcagcaggtgcaggccgcccacagcctgcacagagctgtgcggcgctgtgccaccctgtggaagcagaaggtgctgggccggggcggcaagccccagcccctggccgccatcgcccccagcaggaaggtgacctttgagggccccctgctgaacagaattgctgctggagctggagatggcaccctggagaccaagaggccccaggccagccggcccctgggcgccctgggccgcctggccgctgaggagccccacgccctggagctgaacacagcccacagcgccaggaagcagccccggcggccccacttcctgctggagcccgcccagagccagaggccccagaagccccaggagcacggcctgggcatggcccagcctgctgcccccagcctgacccggcccttcctggccgaggcccccacagccctggtgccccacagccccctgcccggggccctgagcagcgcccctggccccaagcagcccccaacagccagcacaggccctgagctgctgctgctgcccctgagcagcttcatgccctgtggggccgccgccccagcccgggtgtctgcccagagggccaccccccgggacaagccccctgtgcccagcagcctggcctctgtgcctgacccccacctgctgctgcccggggacttcagcgccaccagggctggccctggcctgagcacagctggcagcctggacctggaggccgagctggaggagatccagcagcagctgctgcactaccagaccaccaagcagaacctgtggagctgccggcggcaggccagcagcctgcggcgctggctggagctgaaccgggaggagcccggccctgaggaccaggaggtggagcagcaggtgcagaaggagctggagcaggtggagatgcagatccagctgctggccgaggagctgcaggcccagaggcagcccatcggggcctgtgtggcccgcatccaggccctgcggcaggccctgtgctag

SEQ ID NO: 92895 - DNA, 3483 bp, Artificial Sequence
  derived and/or modified sequence
atgaagaacctgctgaccgagaagtgcatcagcagccacaacttccaccaaaaggtgattaaacagcgaatggagaagaaggtggacagcaggttttattatgagcagcgtttactacggaaggtcttcgaggaatggaaggaagagtggtgggtattccagcatgagtggaagctctgcgtccgagccgattgccattatcgatattacctctacaacctgatgtttcagacatggaagacttacgtgagacagcagcaagaaatgcgcaataagtatatcagggcagaggtccatgacgccaagcaaaaaatgaggcaggcttggaagtcatggctgatctatgtggtggtgagaaggactaagcttcagatgcaaacgacagcgttagaatttcgccaacgaattatactgagagtctggtggagcacatggcggcagcggctagggcaagttcgcgttagcagggccctccacgcctccgcactgaagcacagagctctgtccctccaggtacaggcctggagccagtggcgcgagcaactgctctacgtccaaaaggaaaaacagaaagtcgtgagtgctgtgaagcaccaccagcactggcagaagagaaggtttctgaaggcctggcttgaatatctgcaggtgcgccgtgtaaaaaggcaacagaatgagatggctgagcggttccaccatgtgacagttctccagatttatttttgcgattggcagcaagcatgggagcgaagggaaagcctttacgcacaccatgctcaggtggaaaagctcgccagaaagatggccctgcgaagagccttcactcactggaaacactatatgttgctctgtgcagaggaggctgcacagttcgaaatggcagaagaacaccataggcactctcaactgtacttctgcttccgcgccttaaaggacaacgtcacacacgcgcacttacagcagatccgacgaaacctggctcatcaacaacacggtgtaaccctgctccaccgtttctggaatctgtggcggtcgcagatcgaacagaaaaaagaacgggaattactcccattgttgcacgctgcgtgggatcactaccggatcgccctcctttgtaagtgcatagagttgtggttgcagtacactcagaagaggaggtataaacagctactgcaggcccgcgctgacgggcatttccagcagagggctctccccgcggcatttcatacctggaatcggctgtggagatggcgccaccaagaaaatgtgcttagcgcacgggcaacgcgattccatagagaaaccttggagaagcaggtctttagtttatggaggcagaaaatgtttcagcacagggagaacaggttagccgagaggatggccatccttcacgccgagcgtcagcttctgtatagaagctggttcatgtggcatcagcaagcagctgctaggcaccaggagcaggaatggcaaacagtcgcgtgtgctcaccaccgccatggcaggctgaaaaaggccttttgtctgtggagggaaagtgctcaaggcctgagaactgaacgcacagggcgggtgagagccgccgagttccacatggcccagctactgcgctgggcatggagccagtggagggagtgtctggcattgcgcggggccgaacgccagaagttaatgagagccgacctgcaccatcaacacagtgtcctgcacagagctctgcaggcctgggtgacttatcaaggaagggtgcgctctatcctgagggaggtcgccgctagggagtcccagcataatcgccagttattgcgaggggctttacgccgatggaaggagaacacaatggcacgggtggacgaagctaagaaaacgtttcaagccagcactcattaccggaggaccatttgctccaaagtgctggtccagtggagagaggccgtgagcgtgcagatgtattacaggcaacaggaagattgcgccatttgggaagctcagaaggtcttagaccgagggtgccttaggacttggtttcagcgttggtgggattgcagccgaagatcagcacaacaaagactccagctggagcgcgcggttcaacaccatcaccggcagttattgctggagggacttgcacgctggaagactcaccacctgcagtgcgttcggaaaaggcttcttcaccggcagagcactcaactcctggctcagcgtttaagtcgaacttgcttcagacaatggagacagcaattggccgcccggcgccaggaacagcgagctaccgtcagggcactgtggttttgggccttctcgctccaggctaaagtatgggcaacctggctggcctttgtgctcgaacggaggcgcaaaaaggcccgactgcagtgggctctgcaagcataccaagggcagctcctccaggagggtgcaacacgattactccgttttgctgcgagtatgaaagccagccggcagcagctccaggctcagcagcaggtccaggcggctcactccctacaccgcgccgtccgtagatgtgccaccctgtggaagcagaaggtgctgggccgtggcggcaagcctcagcctctcgctgccatcgccccatcacggaaggtgactttcgaagggcctctgttgaacaggatcgctgctggagccggggacggaaccctggaaacgaaaaggccacaagcctcccggcctctgggggccctcggacgtctggctgccgaggagccccacgcgttggagcttaatactgcccactcagcccgcaaacagccgcggcgcccccactttctgctagagccagcccagtctcagcggccacaaaagccacaggaacatggcttaggcatggcacagcctgccgctccgagtcttacacgaccattccttgctgaggcgcctacggccctggtcccacatagcccccttcctggagctctttcatccgcaccaggcccaaagcaaccccccacagcctcaaccggacctgagttgctcttgctacctctgagctcctttatgccgtgcggcgcagctgcgcctgcaagggttagcgcccaacgagctactccccgggacaaaccgcccgttccgtctagcctagcgagcgtacccgatccccacctattgctcccaggagacttttcagctacccgtgcagggcctggcctttctaccgcgggctcactcgacctcgaggcagaattggaagagatccagcagcagctgttacattaccagaccacaaagcaaaacctgtggagctgtcggcggcaggcctcaagcctgcgccgttggctggagcttaacagagaagagcctggcccggaggaccaggaggttgaacagcaggtgcagaaggagttggagcaggtggaaatgcagatacagctgttagccgaagaactgcaggcccaaagacagccaattggtgcgtgtgtcgcacggatccaggccctgcggcaagcgctctgctag

SEQ ID NO: 92896 - DNA, 3483 bp, Artificial Sequence
  derived and/or modified sequence
atgaagaacctgctgaccgagaagtgcatcagcagccacaacttccaccagaaagtgattaagcagcggatggaaaaaaaggtggacagtaggttctactatgagcagaggttactgcgcaaagtatttgaggagtggaaggaagagtggtgggtgtttcagcacgaatggaaactttgcgtgcgggctgattgccactaccgttactacctttacaatctcatgtttcagacttggaaaacctacgtacgtcagcagcaggagatgaggaacaagtatatccgagccgaagttcacgatgcaaagcagaagatgagacaggcttggaagtcgtggctgatttatgtggttgtgcgccgtactaagttacagatgcaaacgacagccttggaatttcgtcagagaattattctgcgtgtgtggtggtccacctggaggcaacggctgggacaggtgcgagtctcacgcgctctacacgcatccgctctgaagcatagggctctctcgctgcaagtgcaagcttggagccagtggcgggagcaactgctgtacgttcagaaagaaaaacagaaagtcgtttccgcagtgaaacaccatcaacactggcaaaagaggaggtttctcaaggcttggctggagtacctccaggtgcgaagagtgaagcggcagcagaacgaaatggcagaacggttccatcatgtcacggtgctccaaatctatttctgtgactggcagcaggcctgggagcggagggaatctctttatgcccatcacgcccaggttgagaaactggctcgcaagatggctctccggcgggcttttacacattggaagcattatatgctactctgcgctgaggaggcggcccagttcgagatggccgaggagcaccaccggcactcacagctgtacttctgctttcgcgccctgaaggacaacgtgactcacgcacatctgcagcaaatacgccgaaacctcgcccaccagcaacatggggtgaccctccttcaccggttctggaacttatggaggtcgcagattgaacagaagaaagaaagagaacttctgcctctcttgcacgccgcatgggaccactacagaattgccttgctctgtaaatgcattgaactctggttgcagtatacacagaaaagacgttacaagcagctgctccaagctagggcggatggtcacttccagcagcgagcactcccagcagcatttcacacgtggaatagactgtggcgatggcgccaccaggaaaacgtgctctctgcacgagccacacgattccacagagaaacgttagaaaagcaagttttctccctgtggagacagaaaatgttccaacacagagagaaccggttagctgaacgaatggcaattttgcatgccgagaggcagttgctatataggagctggtttatgtggcaccagcaagcagccgcacgacaccaggagcaggaatggcagactgtggcgtgcgcacatcataggcacggtagacttaagaaggccttctgcctctggcgggagtcagcccagggcctgcgcactgaacgcacagggagggtgagggccgctgaattccacatggcccaactcctgcgctgggcttggtcacagtggcgagagtgtctcgcactgcgaggggccgaacgacagaaactgatgcgtgccgacctgcaccatcagcactccgtgctccatcgagccttacaggcttgggtcacttatcaaggaagggtgcggtcaattctgcgtgaggtggccgcccgtgagagtcagcacaacagacaacttctgagaggcgccctcaggcgctggaaggaaaacactatggctcgggttgatgaagctaagaaaacttttcaagcaagcacacattatagacgtactatctgctctaaagtactggtccaatggcgcgaggcagtgtctgtgcagatgtactacaggcaacaagaggactgtgccatatgggaggcgcagaaagtactagatcggggctgcctgcggacttggttccagagatggtgggattgctccaggaggagcgcgcaacagaggttgcagctggagagggctgtgcaacaccaccataggcaactgctgctcgaggggttggcaagatggaagactcaccatctgcagtgcgtgagaaaacgccttctgcaccggcagtccacacagctgttggctcagcgcctctcccgaacctgttttagacagtggcggcaacagctcgccgctcgcaggcaggagcagagggccacggtgagggcattatggttctgggcgttctcactgcaggccaaggtttgggctacctggctggcctttgtgctggaacgacggcgaaagaaggctcggctgcaatgggccctgcaagcataccaggggcaattgctccaagagggcgctacaagacttctgcgattcgcggcgagcatgaaagcctccaggcaacaactgcaagcccagcaacaggtgcaggcagcccactcgctccacagagccgtgcggcgttgcgctacattgtggaaacagaaggttcttgggcgaggaggtaagcctcagcccctggctgcaattgccccatcaaggaaagtgacatttgaggggccgttgcttaacagaatcgcagcaggagcaggagacgggactctggagaccaaacgcccacaggcttcacgaccgctgggggccttggggcgcctcgccgcagaggagcctcacgctctggaactcaacaccgcacattccgccagaaagcagcctaggcgcccacactttctcttggaaccagctcagtcccagcggccacagaagccacaggagcacggcttgggcatggcccagccagcagccccttctcttacccgccccttcctcgccgaggcccccaccgcattggtgccccattctccactccccggagccctcagtagtgcgcccgggcccaaacagccacctacagctagcacaggcccagagcttctgcttctcccgcttagctcatttatgccttgcggtgccgcagcacccgctagggtgtccgcccagcgggccaccccgagagataagcctccagtcccttcatccctagctagcgtacccgacccgcacttactcttacccggtgactttagcgcaactcgggccggaccggggctctccactgccggctccctggatcttgaagctgaactagaagaaatccagcagcagctgctgcattatcagaccaccaagcagaatctgtggtcatgcagaagacaggcaagcagtctgcgccgttggctcgagctcaacagggaagaacctgggcccgaggatcaggaagtggagcaacaggtccagaaggagcttgagcaggtggaaatgcagatacagctgttagccgaagagttgcaggcccaacggcagcccatcggagcatgcgtggctagaatccaagccctgaggcaggcactctgctag

SEQ ID NO: 92897 - DNA, 3483 bp, Artificial Sequence
  derived and/or modified sequence
atgaagaacctgctgacagagaaatgcatcagctcacacaattttcaccagaaggttattaagcagagaatggaaaagaaggtggactcacggttttattacgaacagaggctgctgcggaaggtgtttgaagagtggaaagaggagtggtgggtctttcagcatgagtggaagctgtgcgtgagagctgactgtcattatcgatactacctttataacctaatgttccagacatggaaaacttacgtgcgtcagcagcaggaaatgcgcaataaatacatcagggccgaggttcacgacgcaaagcagaagatgcgacaggcttggaagtcttggctaatctacgttgttgttaggagaactaaactgcagatgcagactacagctctcgaattccggcaacgaatcatcctccgggtgtggtggagcacgtggagacagcggctgggacaggtaagggtaagtcgcgctctgcacgctagcgccctcaaacatagggcactgtcactccaagtccaggcatggtctcagtggcgggaacagcttctttatgtccaaaaggagaagcagaaggttgtgtccgccgtaaaacaccaccagcactggcagaagcggaggtttctgaaagcctggctcgagtatctccaagttagaagggttaagagacagcagaacgagatggcagagcgtttccatcatgtgacagtgctacagatatatttctgcgattggcagcaggcctgggaacgacgtgagtccctttatgctcaccacgcacaggttgagaagttggctcgcaaaatggccctgcgcagggcgttcactcattggaagcactatatgctcctgtgcgccgaggaggccgctcaatttgagatggccgaagagcatcacaggcacagccagctttacttttgcttccgggcactgaaagataacgtcacacatgcccatctacaacaaatccgacgaaatctcgctcaccaacagcacggagttaccttactgcacagattctggaatctctggagaagccagatcgagcaaaaaaaggagcgggagctactgccactgctgcatgccgcttgggatcactaccgcatcgccttgctttgcaagtgtattgaattatggctacagtatacacaaaaacggagatacaagcaacttttacaggcgcgagctgatggtcacttccaacagagggccttgcccgctgcctttcacacttggaaccggctgtggcgatggcggcaccaggagaatgtgctctccgccagagctacaagattccaccgtgagaccctcgagaaacaagtgttcagcctatggaggcagaagatgtttcagcacagggagaatagattggccgagaggatggcaatattgcacgctgaaagacagctgctgtacaggtcttggtttatgtggcatcagcaagccgctgccagacatcaagagcaggaatggcagacagtagcctgcgcccatcataggcacgggagactaaagaaagcattttgcttgtggcgagaaagcgcgcaggggttgcgcacggagagaactgggcgagtgcgcgctgcagagtttcacatggcccagctgctgaggtgggcttggtcacaatggagagaatgcctagccctgaggggagctgagcgccagaagctcatgcgagcagatttgcaccatcaacatagcgtattgcacagagcactccaagcgtgggtcacgtaccagggcagagttaggagtatcttacgagaagttgctgctagggaatcacaacacaatcggcagttgctgagaggtgccctccgtcgatggaaggaaaacacaatggccagagtcgacgaggcgaagaagacatttcaggcaagcacacactatcgaagaacaatatgttcgaaggtgctagtgcaatggcgggaggcagtctctgtacagatgtattacagacagcaggaagattgtgcaatttgggaggcccagaaagttcttgacagagggtgcctgcggacctggtttcaacgttggtgggactgcagccgcagatcagcccagcagcgccttcagctggagcgggctgttcagcaccatcaccgccaactcctgttggagggcttggcacggtggaaaacacaccacctgcagtgcgtccggaagcgcctactgcaccgtcaatcaacgcagcttctggctcagcgtctgagccggacgtgttttcggcaatggagacagcaacttgctgcaagaaggcaggagcagcgcgctactgtccgggctctctggttttgggcattttcactgcaggcgaaggtatgggctacatggttagcattcgtcctggaaagaaggcgcaaaaaggctcggctgcaatgggcattgcaagcttatcaaggccagttacttcaggagggtgcgacccggctattgcgtttcgctgcctcaatgaaggcctctaggcaacagctgcaagcacaacaacaggtgcaggctgctcatagtcttcacagggcagtccgacgttgcgccacattgtggaaacagaaggtcctgggccgagggggaaagccacagccgcttgcagcaattgcccctagtaggaaggtgacgttcgaaggccctttgcttaatcgtatcgccgcaggggcaggcgatggcactctggaaacaaaacgtccccaggcaagtaggcccttgggagcactcggtcgtctggccgctgaggagccacatgctctagagttgaatactgctcactccgccaggaagcagcctaggagaccacactttctgttagaaccagcccagtctcaaaggccccagaaacctcaggagcacggcttgggcatggcccagcccgctgcaccctccctcactcgcccttttttggccgaggcaccaaccgctctcgtgcctcattcccctctgccgggagctctttcttctgccccaggccctaagcagcctcccaccgcgtcaaccggaccagaattgctgttgctgcccctgagttctttcatgccatgtggcgcagctgccccagccagggtctccgctcagcgagccacaccaagggataagcctcccgtgccttccagtttggcgtctgtgccggatccgcatttactgctgcctggggatttcagcgcaactagagcaggcccaggcctgtccaccgccggttccctcgatctcgaggctgaattggaggaaatacagcagcaactgttacactaccagactactaagcagaacttgtggagctgcaggcgacaggcctcctctttgaggaggtggctggagctgaatagggaggaacctgggccagaggatcaggaggttgagcaacaggtgcaaaaggaactagagcaggtggagatgcagatacagcttctagccgaggaacttcaagcccagcgccagcccattggcgcttgtgtggccagaatacaggcactgcgtcaggccctctgttag

SEQ ID NO: 92898 - DNA, 3483 bp, Artificial Sequence
  derived and/or modified sequence
atgaaaaacttgctaactgaaaaatgtatcagtagccataatttccaccagaaagtcattaagcaaaggatggagaagaaagtggactcccgattttactatgaacagagactgttgcgaaaagtattcgaggagtggaaggaggagtggtgggtcttccagcacgagtggaagctttgcgtccgagcggactgccactatcgttactatctctataatctgatgtttcagacctggaaaacctatgtgcggcaacagcaagagatgcggaacaagtacattcgcgcagaagtgcatgacgctaagcagaagatgcgacaagcttggaagtcatggctgatttacgtcgtggtcaggaggaccaaattgcagatgcagaccacagcgctggagtttaggcagcgtatcatacttcgcgtctggtggtctacatggagacagcgtctgggacaggtgcgggtgagtagggccctacacgcctccgcactgaaacatagagccctgtctctccaggtccaggcatggagtcaatggagagaacagctgctgtacgttcagaaggagaaacagaaggtggtgtccgcggtcaagcaccatcagcactggcagaagagaagatttttgaaagcttggcttgagtacctgcaggtgaggagggtgaagaggcagcagaatgaaatggcagaacgtttccatcacgtcaccgtgctccagatctacttttgcgactggcagcaggcctgggaacgacgggaatctctctacgctcaccatgcacaggtggagaagctggccagaaagatggccctccgacgagctttcacgcactggaaacactatatgctgctgtgcgcggaggaagcggcacagttcgagatggccgaggaacaccacaggcactcccaactctatttttgttttcgggcattgaaagacaatgtcacgcacgcacatctgcagcagattaggcggaatctggctcaccaacaacacggggtgacactgctccatcgcttctggaacctttggcgcagtcaaatcgagcaaaagaaggagcgggagctcctgcctctccttcacgctgcctgggatcattaccgcatcgctctgctgtgtaaatgtatcgagctctggcttcaatatactcaaaagcgaaggtacaaacaactcctgcaggcacgcgcagacgggcactttcagcagagggcactgccagccgctttccacacctggaaccgcctgtggagatggagacatcaggaaaacgtcctgagcgccagggctacgagattccatcgcgagacgctggagaaacaagtgttttccttgtggaggcagaaaatgtttcagcatcgcgaaaacagactcgcggagcggatggccatcctccatgcagaaaggcaactgctgtatcgcagttggttcatgtggcaccaacaggctgctgccaggcaccaggaacaggaatggcagactgtggcttgtgctcaccacagacacggacggctcaaaaaggccttctgtctttggagagagtccgcacagggcttgaggacagagagaaccggcagggtgagagctgccgagttccacatggctcaactacttcggtgggcgtggagccagtggcgtgagtgtctggctctgcgcggagccgaaaggcaaaagcttatgcgtgctgaccttcatcaccagcactcggtattacacagggccctccaagcttgggttacctatcaggggagggttcggtctatcttgagggaggtcgcggctagggaaagccaacacaaccgtcagctcctgcgaggggctcttcgaagatggaaggaaaataccatggcccgagtagatgaggctaaaaaaaccttccaggccagcactcactataggcgaacaatatgcagcaaggtgctagtgcagtggagggaggcggtgagtgttcagatgtactacaggcagcaggaagactgtgccatctgggaggcccagaaagttctggaccggggatgcttgcgcacctggttccagaggtggtgggattgtagtcgtcgtagcgcccaacagaggctgcagctggaaagggccgttcagcaccatcatagacagcttctactggagggcttggctcgctggaagacacaccacttacagtgcgtgcgcaagagactgttgcacaggcagtcgacccagctgttggctcagagactgtccaggacttgctttcgccagtggcgccagcagctagccgcacggaggcaggagcagagggctacagtgcgggcactttggttctgggccttctcactgcaggcgaaggtgtgggccacgtggctcgcctttgtgctggaacgcaggcgaaagaaggcacgccttcaatgggcattgcaggcctaccagggacagctactgcaggaaggagctacaagactgctacgcttcgccgcatccatgaaggctagtcgtcagcagctgcaggcccaacaacaggttcaggcggctcacagcttgcacagggccgtccgccgatgtgctaccctctggaaacagaaggtgctcggccgaggtgggaagccacagcccctggccgcaattgctccaagccgcaaggtgacattcgagggacctttattaaatagaatcgctgctggggctggcgacggcactttggagacaaagagaccacaagcctcccgacccctgggcgctctaggaagacttgctgctgaagagcctcacgccctcgaactgaacactgcccacagtgcacgcaaacagccgagacgccctcatttcctcctcgagccagcccagagccagcgtcctcagaagcctcaggagcatggactcgggatggcacaaccagcggctccatctcttaccaggcccttcctcgccgaagcccctacagcgttggtgccccactctccgttgccaggcgctctgtccagcgcacctggcccaaaacagcctcccacagcttcaaccggcccagaactgcttctgcttccgctttccagttttatgccttgtggagctgctgccccagcacgtgtgtcggcccagcgggctaccccacgggataagcctcccgtgccatcctcactggcgtctgtgcccgatccgcacctcctgcttcccggagacttctccgccaccagggctgggcctggactctccacagctggtagcctggacctagaggcagaattggaagagatacagcagcaactgctgcattaccagacaactaaacagaacctgtggtcctgcagacggcaggcctcgagcctccggagatggctggaactcaacagagaggagccgggacccgaggaccaggaagtcgaacaacaggttcagaaggagcttgagcaggtcgagatgcaaatccagctcctcgccgaagagcttcaagcacagaggcaaccaatcggtgcctgtgtggcgagaatacaggccctcaggcaggcgctgtgttag

SEQ ID NO: 92899 - DNA, 3739 bp, Artificial Sequence
  derived and/or modified sequence
ggcgggcgtggaccgcgcgggagttaagaagcaggtcccggatcgccgtataccgccgggttttctcccaacgtcaggcccgatggctcggcttccccagaaggggaagataaaagactttgattcatgaagaatctgctcactgagaagtgtatatcaagccacaatttccatcaaaaagtgattaagcagagaatggagaagaaggttgattccagattttactatgagcagcgattactacggaaggtcttcgaagaatggaaagaggagtggtgggttttccagcacgagtggaaactctgtgttcgagctgactgtcactacaggtattacctgtacaacctgatgttccagacgtggaagacctatgtgcgtcagcagcaggagatgaggaacaagtacattagagccgaggttcatgatgcaaagcaaaagatgcgacaggcctggaagtcctggttgatctacgtggttgttcgtaggaccaaacttcagatgcagactacagctctggagtttaggcaacggattatcttacgggtgtggtggagcacgtggaggcagcgactaggacaggtccgtgtgagccgtgccctccatgcctctgctttgaagcacagggccctgagcctccaggtgcaggcttggtcacagtggcgggaacagctcctgtatgtccagaaggagaaacaaaaggttgtctctgcagtgaaacatcatcagcactggcaaaaacggagatttctaaaggcctggcttgaatacctgcaagtccgcagagtgaagagacagcagaatgagatggctgagcgattccatcatgtcactgtgctccagatatacttctgtgactggcagcaggcctgggagcggagggagagcttgtacgctcaccatgcccaggtggagaaactggccaggaagatggccctgcggcgcgcctttactcactggaaacactacatgctgctgtgtgcagaagaagctgcccagtttgagatggcagaagagcaccacaggcacagccagctgtatttttgctttagagccctaaaagacaatgtgacccacgctcatctccagcaaataagaaggaatcttgctcaccagcagcatggtgtcacgctgctgcacaggttctggaacctctggcggtctcagattgagcagaaaaaggaaagagagctgctccccttactgcatgctgcctgggaccactacagaatagcactgctgtgcaaatgtatcgaattgtggctacagtatactcagaagaggcggtacaagcagctgctacaggccagagcggatggtcatttccagcagagagccctgcctgctgccttccacacatggaacagactctggcgatggcgccaccaggaaaatgtcctcagtgcaagagcaacacgtttccacagggagacattagagaagcaagtattttctctctggaggcagaagatgtttcagcatcgagaaaaccgcctggcagagagaatggccatccttcacgcagagcgacagcttctgtataggtcttggttcatgtggcaccagcaggcagcagcacgtcaccaggagcaggagtggcaaacagtggcctgtgcccaccaccgccacgggcggctcaagaaagctttctgcctctggagggaaagtgcccaagggctcagaacagagaggacgggcagggtgcgggcagcagaattccacatggcccagctcctgcgttgggcctggagccagtggagggagtgcctggccctgcggggagcggagcggcagaagctgatgcgagcagacctgcaccaccagcacagcgtgctgcacagggcgctgcaggcatgggtgacttaccagggcagggtgcgaagcatcctccgggaggtggcagccagggagagccagcacaacaggcagctgctgcgcggggcattacgtcgctggaaagagaacaccatggcccgagtggatgaagccaaaaaaacctttcaagcaagtactcattacagaaggaccatatgttccaaggtcctggtccagtggcgggaagctgtgtcagtgcagatgtattaccgacagcaggaggactgtgccatctgggaggcccagaaggtgctggacaggggctgtctgcggacctggtttcagcgctggtgggactgcagccggaggtcagcccagcagagactgcagctggagagggcagtgcaacaccaccaccggcagctgctgctggaggggctggcccggtggaagacgcaccatctgcagtgtgtcaggaagaggctcctgcacaggcagagcacccaactgctggcacagagactcagccggacctgcttccgccagtggagacaacagctggcagccaggaggcaggagcagcgggcgacagtgcgggccctgtggttctgggccttctcgctgcaggcaaaggtgtgggccacgtggctggcctttgtactggaaaggaggagaaagaaggcgcggctgcagtgggcgctccaggcctaccaggggcagctcctccaggagggtgccacgcggctcctgcgctttgcagccagcatgaaggcctcccggcagcagctgcaggcccagcagcaggtccaggcggctcacagtctccatcgtgccgtccgccgctgtgccacgctctggaaacagaaagtgctgggccggggcgggaagcctcagcccctggcagccatcgcacccagcaggaaagtgacgtttgagggtccccttctcaaccgcattgctgctggggctggggatggcacccttgagaccaagaggccacaggcttctcggcctctgggagctctgggccgcctggctgctgaggagccccacgccctggagctcaacactgcccactcagcgaggaagcagccgcgacgcccacacttcctgttggagcctgcgcagagccagaggcctcagaagccacaggaacatggcctaggcatggctcagccagcagccccctccctgacgcggcccttcctggcagaggccccgacagcactggtcccacacagccccctgcctggggccctgtcaagcgcccctggcccgaagcagcccccgacggcaagcacaggcccggagctgctgctgctgcctctttcctccttcatgccctgcggggcggctgcaccagccagggtgtcagcacagcgggctactcctagggataagcccccggtcccctcatccctggccagtgtccctgacccccatctactccttcctggggacttctcagccaccagggctgggcctggactttcaactgcaggcagcctggaccttgaggctgaacttgaggagatccagcagcaactactgcactaccagaccaccaagcagaacctctggtcctgtcggcggcaagcgagcagcctgcgcaggtggctggagctgaacagagaggagccggggcctgaggaccaggaagtagagcagcaggtgcagaaagagctggaacaggtggaaatgcagatccagctgctggcagaggagctccaggctcagcgccagcccattggcgcctgcgttgcccgcatccaggccctgcggcaggccctgtgctagcgtgttcgcaccaggaacgcaggtgctgggctgtcggggaggcctcaggccacctccaggaacagaacacagttttaagtttgattttttttatttcaaaatgctttgcaattaaatgaattactgttca

SEQ ID NO: 92900 - DNA, 4005 bp, Artificial Sequence
  derived and/or modified sequence
agcaagctgagctcagagcgaagctggcgagccaaggagataaagaaccctcggtggggatgcccagagggtgcatgctccacgcccctcgaaaccgattctcattgctgctgctgcaaagcaacccgaagtgcgccacctacccgactgaggctgcgcaagccccggggtctgggcggggtggtcctcgtgcgcgccgcgtcgccgtggagacgagggcgggcccgcgcgagactggcgtctagaggcgcgcgaagcgctgaggcgggcgtggaccgcgcgggagttaagaagcaggtcccggatcgccgtataccgccgggttttctcccaacgtcaggcccgatggctcggcttccccagttagaaggggaagataaaagactttgattcatgaagaatctgctcactgagaagtgtatatcaagccacaatttccatcaaaaagtgattaagcagagaatggagaagaaggttgattccagattttactatgagcagcgattactacggaaggtcttcgaagaatggaaagaggagtggtgggttttccagcacgagtggaaactctgtgttcgagctgactgtcactacaggtattacctgtacaacctgatgttccagacgtggaagacctatgtgcgtcagcagcaggagatgaggaacaagtacattagagccgaggttcatgatgcaaagcaaaagatgcgacaggcctggaagtcctggttgatctacgtggttgttcgtaggaccaaacttcagatgcagactacagctctggagtttaggcaacggattatcttacgggtgtggtggagcacgtggaggcagcgactaggacaggtccgtgtgagccgtgccctccatgcctctgctttgaagcacagggccctgagcctccaggtgcaggcttggtcacagtggcgggaacagctcctgtatgtccagaaggagaaacaaaaggttgtctctgcagtgaaacatcatcagcactggcaaaaacggagatttctaaaggcctggcttgaatacctgcaagtccgcagagtgaagagacagcagaatgagatggctgagcgattccatcatgtcactgtgctccagatatacttctgtgactggcagcaggcctgggagcggagggagagcttgtacgctcaccatgcccaggtggagaaactggccaggaagatggccctgcggcgcgcctttactcactggaaacactacatgctgctgtgtgcagaagaagctgcccagtttgagatggcagaagagcaccacaggcacagccagctgtatttttgctttagagccctaaaagacaatgtgacccacgctcatctccagcaaataagaaggaatcttgctcaccagcagcatggtgtcacgctgctgcacaggttctggaacctctggcggtctcagattgagcagaaaaaggaaagagagctgctccccttactgcatgctgcctgggaccactacagaatagcactgctgtgcaaatgtatcgaattgtggctacagtatactcagaagaggcggtacaagcagctgctacaggccagagcggatggtcatttccagcagagagccctgcctgctgccttccacacatggaacagactctggcgatggcgccaccaggaaaatgtcctcagtgcaagagcaacacgtttccacagggagacattagagaagcaagtattttctctctggaggcagaagatgtttcagcatcgagaaaaccgcctggcagagagaatggccatccttcacgcagagcgacagcttctgtataggtcttggttcatgtggcaccagcaggcagcagcacgtcaccaggagcaggagtggcaaacagtggcctgtgcccaccaccgccacgggcggctcaagaaagctttctgcctctggagggaaagtgcccaagggctcagaacagagaggacgggcagggtgcgggcagcagaattccacatggcccagctcctgcgttgggcctggagccagtggagggagtgcctggccctgcggggagcggagcggcagaagctgatgcgagcagacctgcaccaccagcacagcgtgctgcacagggcgctgcaggcatgggtgacttaccagggcagggtgcgaagcatcctccgggaggtggcagccagggagagccagcacaacaggcagctgctgcgcggggcattacgtcgctggaaagagaacaccatggcccgagtggatgaagccaaaaaaacctttcaagcaagtactcattacagaaggaccatatgttccaaggtcctggtccagtggcgggaagctgtgtcagtgcagatgtattaccgacagcaggaggactgtgccatctgggaggcccagaaggtgctggacaggggctgtctgcggacctggtttcagcgctggtgggactgcagccggaggtcagcccagcagagactgcagctggagagggcagtgcaacaccaccaccggcagctgctgctggaggggctggcccggtggaagacgcaccatctgcagtgtgtcaggaagaggctcctgcacaggcagagcacccaactgctggcacagagactcagccggacctgcttccgccagtggagacaacagctggcagccaggaggcaggagcagcgggcgacagtgcgggccctgtggttctgggccttctcgctgcaggcaaaggtgtgggccacgtggctggcctttgtactggaaaggaggagaaagaaggcgcggctgcagtgggcgctccaggcctaccaggggcagctcctccaggagggtgccacgcggctcctgcgctttgcagccagcatgaaggcctcccggcagcagctgcaggcccagcagcaggtccaggcggctcacagtctccatcgtgccgtccgccgctgtgccacgctctggaaacagaaagtgctgggccggggcgggaagcctcagcccctggcagccatcgcacccagcaggaaagtgacgtttgagggtccccttctcaaccgcattgctgctggggctggggatggcacccttgagaccaagaggccacaggcttctcggcctctgggagctctgggccgcctggctgctgaggagccccacgccctggagctcaacactgcccactcagcgaggaagcagccgcgacgcccacacttcctgttggagcctgcgcagagccagaggcctcagaagccacaggaacatggcctaggcatggctcagccagcagccccctccctgacgcggcccttcctggcagaggccccgacagcactggtcccacacagccccctgcctggggccctgtcaagcgcccctggcccgaagcagcccccgacggcaagcacaggcccggagctgctgctgctgcctctttcctccttcatgccctgcggggcggctgcaccagccagggtgtcagcacagcgggctactcctagggataagcccccggtcccctcatccctggccagtgtccctgacccccatctactccttcctggggacttctcagccaccagggctgggcctggactttcaactgcaggcagcctggaccttgaggctgaacttgaggagatccagcagcaactactgcactaccagaccaccaagcagaacctctggtcctgtcggcggcaagcgagcagcctgcgcaggtggctggagctgaacagagaggagccggggcctgaggaccaggaagtagagcagcaggtgcagaaagagctggaacaggtggaaatgcagatccagctgctggcagaggagctccaggctcagcgccagcccattggcgcctgcgttgcccgcatccaggccctgcggcaggccctgtgctagcgtgttcgcaccaggaacgcaggtgctgggctgtcggggaggcctcaggccacctccaggaacagaacacagttttaagtttgattttttttatttcaaaatgctttgcaattaaatgaattactgttc

SEQ ID NO: 92901 - DNA, 3483 bp, Artificial Sequence
  derived and/or modified sequence
atgaagaacctgctgaccgagaagtgcatcagcagccacaacttccaccagaaggtgatcaagcagagaatggagaagaaggtggacagcagattctactacgagcagagactgctgagaaaggtgttcgaggagtggaaggaggagtggtgggtgttccagcacgagtggaagctgtgcgtgagagccgactgccactacagatactacctgtacaacctgatgttccagacctggaagacctacgtgagacagcagcaggagatgagaaacaagtacatcagagccgaggtgcacgacgccaagcagaagatgagacaggcctggaagagctggctgatctacgtggtggtgagaagaaccaagctgcagatgcagaccaccgccctggagttcagacagagaatcatcctgagagtgtggtggagcacctggagacagagactgggccaggtgagagtgagcagagccctgcacgccagcgccctgaagcacagagccctgagcctgcaggtgcaggcctggagccagtggagagagcagctgctgtacgtgcagaaggagaagcagaaggtggtgagcgccgtgaagcaccaccagcactggcagaagagaagattcctgaaggcctggctggagtacctgcaggtgagaagagtgaagagacagcagaacgagatggccgagagattccaccacgtgaccgtgctgcagatctacttctgcgactggcagcaggcctgggagagaagagagagcctgtacgcccaccacgcccaggtggagaagctggccagaaagatggccctgagaagagccttcacccactggaagcactacatgctgctgtgcgccgaggaggccgcccagttcgagatggccgaggagcaccacagacacagccagctgtacttctgcttcagagccctgaaggacaacgtgacccacgcccacctgcagcagatcagaagaaacctggcccaccagcagcacggcgtgaccctgctgcacagattctggaacctgtggagaagccagatcgagcagaagaaggagagagagctgctgcccctgctgcacgccgcctgggaccactacagaatcgccctgctgtgcaagtgcatcgagctgtggctgcagtacacccagaagagaagatacaagcagctgctgcaggccagagccgacggccacttccagcagagagccctgcccgccgccttccacacctggaacagactgtggagatggagacaccaggagaacgtgctgagcgccagagccaccagattccacagagagaccctggagaagcaggtgttcagcctgtggagacagaagatgttccagcacagagagaacagactggccgagagaatggccatcctgcacgccgagagacagctgctgtacagaagctggttcatgtggcaccagcaggccgccgccagacaccaggagcaggagtggcagaccgtggcctgcgcccaccacagacacggcagactgaagaaggccttctgcctgtggagagagagcgcccagggcctgagaaccgagagaaccggcagagtgagagccgccgagttccacatggcccagctgctgagatgggcctggagccagtggagagagtgcctggccctgagaggcgccgagagacagaagctgatgagagccgacctgcaccaccagcacagcgtgctgcacagagccctgcaggcctgggtgacctaccagggcagagtgagaagcatcctgagagaggtggccgccagagagagccagcacaacagacagctgctgagaggcgccctgagaagatggaaggagaacaccatggccagagtggacgaggccaagaagaccttccaggccagcacccactacagaagaaccatctgcagcaaggtgctggtgcagtggagagaggccgtgagcgtgcagatgtactacagacagcaggaggactgcgccatctgggaggcccagaaggtgctggacagaggctgcctgagaacctggttccagagatggtgggactgcagcagaagaagcgcccagcagagactgcagctggagagagccgtgcagcaccaccacagacagctgctgctggagggcctggccagatggaagacccaccacctgcagtgcgtgagaaagagactgctgcacagacagagcacccagctgctggcccagagactgagcagaacctgcttcagacagtggagacagcagctggccgccagaagacaggagcagagagccaccgtgagagccctgtggttctgggccttcagcctgcaggccaaggtgtgggccacctggctggccttcgtgctggagagaagaagaaagaaggccagactgcagtgggccctgcaggcctaccagggccagctgctgcaggagggcgccaccagactgctgagattcgccgccagcatgaaggccagcagacagcagctgcaggcccagcagcaggtgcaggccgcccacagcctgcacagagccgtgagaagatgcgccaccctgtggaagcagaaggtgctgggcagaggcggcaagccccagcccctggccgccatcgcccccagcagaaaggtgaccttcgagggccccctgctgaacagaatcgccgccggcgccggcgacggcaccctggagaccaagagaccccaggccagcagacccctgggcgccctgggcagactggccgccgaggagccccacgccctggagctgaacaccgcccacagcgccagaaagcagcccagaagaccccacttcctgctggagcccgcccagagccagagaccccagaagccccaggagcacggcctgggcatggcccagcccgccgcccccagcctgaccagacccttcctggccgaggcccccaccgccctggtgccccacagccccctgcccggcgccctgagcagcgcccccggccccaagcagccccccaccgccagcaccggccccgagctgctgctgctgcccctgagcagcttcatgccctgcggcgccgccgcccccgccagagtgagcgcccagagagccacccccagagacaagccccccgtgcccagcagcctggccagcgtgcccgacccccacctgctgctgcccggcgacttcagcgccaccagagccggccccggcctgagcaccgccggcagcctggacctggaggccgagctggaggagatccagcagcagctgctgcactaccagaccaccaagcagaacctgtggagctgcagaagacaggccagcagcctgagaagatggctggagctgaacagagaggagcccggccccgaggaccaggaggtggagcagcaggtgcagaaggagctggagcaggtggagatgcagatccagctgctggccgaggagctgcaggcccagagacagcccatcggcgcctgcgtggccagaatccaggccctgagacaggccctgtgctag

SEQ ID NO: 92902 - protein, 1152 aa, Artificial Sequence
  derived and/or modified sequence
MSRGQRVLKGLLGWVCTWTWAWRARLGARGCGLHVLCPRDLPLPPEELPRKDGADAVFPGPSLEPPAGSSGVKATGTLKRPTSLSRHASAAGFPLSGAASWTLGRSHRSPLTAASPGELPTEGAGPDVVEDISHLLADVARFAEGLEKLKECVLRDDLLEARRPRAHECLGEALRVMHQIISKYPLLNTVETLTAAGTLIAKVKAFHYESNNDLEKQEFEKALETIAVAFSSTVSEFLMGEVDSSTLLAVPPGDSSQSMESLYGPGSEGTPPSLEDCDAGCLPAEEVDVLLQRCEGGVDAALLYAKNMAKYMKDLISYLEKRTTLEMEFAKGLQKIAHNCRQSVMQEPHMPLLSIYSLALEQDLEFGHSMVQAVGTLQTQTFMQPLTLRRLEHEKRRKEIKEAWHRAQRKLQEAESNLRKAKQGYVQRCEDHDKARFLVAKAEEEQAGSAPGAGSTATKTLDKRRRLEEEAKNKAEEAMATYRTCVADAKTQKQELEDTKVTALRQIQEVIRQSDQTIKSATISYYQMMHMQTAPLPVHFQMLCESSKLYDPGQQYASHVRQLQRDQEPDVHYDFEPHVSANAWSPVMRARKSSFNVSDVARPEAAGSPPEEGGCTEGTPAKDHRAGRGHQVHKSWPLSISDSDSGLDPGPGAGDFKKFERTSSSGTMSSTEELVDPDGGAGASAFEQADLNGMTPELPVAVPSGPFRHEGLSKAARTHRLRKLRTPAKCRECNSYVYFQGAECEECCLACHKKCLETLAIQCGHKKLQGRLQLFGQDFSHAARSAPDGVPFIVKKCVCEIERRALRTKGIYRVNGVKTRVEKLCQAFENGKELVELSQASPHDISNVLKLYLRQLPEPLISFRLYHELVGLAKDSLKAEAEAKAASRGRQDGSESEAVAVALAGRLRELLRDLPPENRASLQYLLRHLRRIVEVEQDNKMTPGNLGIVFGPTLLRPRPTEATVSLSSLVDYPHQARVIETLIVHYGLVFEEEPEETPGGQDESSNQRAEVVVQVPYLEAGEAVVYPLQEAAADGCRESRVVSNDSDSDLEEASELLSSSEASALGHLSFLEQQQSEASLEVASGSHSGSEEQLEATAREDGDGDEDGPAQQLSGFNTNQSNNVLQAPLPPMRLRGGRMTLGSCRERQPEFV

SEQ ID NO: 92903 - DNA, 3459 bp, Artificial Sequence
  derived and/or modified sequence
atgagccgaggtcagcgcgtcctgaagggcctgcttggctgggtgtgcacctggacctgggcctggcgcgcacgcctcggggcgcgcggctgtggactccacgtgctatgccctcgcgacctacccctcccgccagaggaactcccgcggaaagacggtgctgatgcggtgtttcccggtccaagcctggagcccccagcgggaagcagcggtgttaaagccactgggacactgaaaagacctaccagcctcagcagacacgctagtgccgccggctttccactttcaggggccgccagttggacgttaggacggagtcatcggtccccgctcaccgccgctagcccgggtgaattgcccacagagggcgcagggcccgatgtggtggaggatatcagtcatcttttagctgatgttgcaaggtttgccgaaggtctcgaaaagctgaaggaatgtgtcctcagagatgatctcctagaggccagaaggccaagagcccatgaatgcttgggcgaggctctgagagtgatgcaccagatcatttcaaagtacccgctgctcaacacagtcgagacacttacagccgccggaaccctgatcgctaaggttaaggcctttcattatgagtctaataacgatttggagaaacaggaattcgagaaggccctggagaccatcgcagtagcattctccagcactgtcagtgaattcctcatgggtgaggtggacagttcaactctgttggccgtacccccgggggactctagccagagtatggagtctctctatggacccggaagtgaaggaacaccgccaagtctcgaagactgtgacgctggctgcttgccagccgaagaagtggacgtgttacttcagagatgtgagggcggggtggacgctgcactgttgtatgcaaagaacatggccaaatatatgaaagacctgataagctacctggaaaagagaacgacgctcgagatggagttcgccaagggactgcagaaaattgcacataattgccgacagagtgtgatgcaggaaccccacatgcccctcctatctatctacagcctggcactggaacaggatctggaattcgggcatagtatggttcaggccgttggcacgctgcagacacagacattcatgcagccgctgacattgcgacgtctggagcatgagaagcgccgtaaagagatcaaggaagcctggcatagagcccaaagaaaactacaggaagctgaatcgaacctacggaaagccaagcagggttacgtgcaacggtgtgaggatcacgacaaggcgcgcttcttggtggcaaaggctgaagaggaacaggccggctccgctccaggagcaggcagcactgcaactaagactctggacaagaggcgccgcctcgaggaagaagcaaagaacaaagccgaggaggcaatggcgacctacaggacttgtgtcgctgacgcaaaaacacagaaacaggaattggaagatacgaaggttaccgcccttcggcagattcaggaggtgatccgtcaaagcgatcagactataaagtcagccaccatttcctactatcagatgatgcacatgcagacggcccccctgcctgttcactttcaaatgctctgcgagtctagtaagctgtatgacccaggacagcaatacgcatcccatgtcagacagctgcaacgggaccaagagcccgatgtccattatgatttcgaaccccacgtgtccgcgaacgcgtggagtccagtgatgagagctcggaagtcgtcatttaatgtgagcgacgttgctcggcctgaagctgcaggcagcccccccgaagagggaggatgtacagagggaacaccagccaaagatcatcgcgctggtcgggggcaccaggttcacaagagctggcccctctctatatcggatagcgattcaggactggatcctggccccggcgccggtgatttcaagaagttcgagcgaaccagcagttcaggtacaatgagcagcacagaggagctggtggatcctgacgggggggctggggccagcgccttcgaacaagctgatctcaatggcatgaccccagaactgccagttgcagtgccctcaggaccctttcggcacgagggtctttcaaaagctgctcgaacacatcgactgagaaagctacgcactccggctaaatgtagggagtgcaatagttacgtgtatttccagggcgcagaatgtgaggagtgttgcctggcctgtcacaagaaatgtcttgagactctggcaattcagtgcggccacaaaaagctgcaaggccgcttgcagttgttcggacaggatttctctcatgccgcccgctcagcccccgatggtgttccatttatcgtaaagaagtgtgtctgcgaaattgagcggagggcactaagaactaagggaatctatagggtgaatggcgtgaaaactcgcgttgaaaaactctgtcaagcctttgaaaatggcaaagaactcgttgaactttcccaggcctcaccacacgatatttctaacgtgctaaagctgtatctgagacagctgcccgagcccctcatctcatttcgtttgtaccatgaactagtaggcctcgccaaagatagtcttaaggccgaggccgaggccaaagccgctagccgcggccgacaagatggaagcgaaagtgaggctgtcgctgtcgcgttggccgggaggctccgcgagctcctgcgagacttgccacccgagaatcgggcgtcacttcagtatctgctccggcacttgcggcgcattgtggaagtggagcaagataacaaaatgacaccaggtaacctgggcatcgtgtttgggcccacgctgctccggccacgtcctaccgaggccaccgtgtcgctgagttctctggtggattatccgcaccaagcacgcgtgatcgagacccttatcgtccattacggcctagtgtttgaggaggagcctgaggaaacccccggtggccaggacgaatcgtcaaatcagcgggccgaggttgtggtgcaagtaccttatcttgaggctggcgaagccgtcgtgtatcctcttcaggaagccgccgcagatggctgtcgggaatcaagggtggtgagtaatgactccgacagcgatctggaggaagccagcgaactcttgtccagttccgaagcaagtgcactggggcatctatcatttttagagcagcagcagtctgaagcaagcctcgaagtggcttccggtagtcacagtggaagtgaagagcagctagaggccaccgcacgggaggatggcgatggggatgaggacggacctgcccagcagctgtcaggctttaacaccaaccagagtaacaacgtactgcaggctcctctgcctcccatgcggctcaggggcggccgcatgactttgggcagctgtcgggagcgacaacccgaattcgtatag

SEQ ID NO: 92904 - DNA, 3814 bp, Artificial Sequence
  derived and/or modified sequence
aggagcccggtgtcccggagcacaggccagggccgggccagaagcccatccgacatccagctgaccctcaccctctgaccccagccctcagcgccatgagtcgggggcaaagagttctcaagggtctgctgggctgggtttgcacttggacctgggcctggagagccagacttggagcaaggggctgtggccttcatgtcctgtgccccagagatctgcccctcccacccgaggagctgcccaggaaggatggggctgacgcggtgttccccggaccaagcctggagccgcccgctgggtcctccggcgtcaaggccacagggaccctcaagcggcccaccagcctgagccgccacgccagcgcggctggcttccccctgtcgggtgctgcctcctggacactgggccggagccaccggagcccactgacagccgccagcccgggcgagctgcccaccgagggtgccggcccggacgtcgtcgaggacatctcccatctgctggcggacgtggcccgcttcgctgagggccttgagaaacttaaggagtgtgtgttgcgtgacgacctccttgaggcccgccgcccgcgggcccacgagtgcctgggtgaggctctgcgtgtcatgcatcagatcatctccaagtacccgctgctgaacaccgtggagacgctcaccgcagccggcaccctcattgccaaggtcaaagccttccattatgagagcaacaatgatctggagaaacaggagttcgagaaggccctggagacgattgctgtggccttcagtagcacagtgtccgagttcctcatgggtgaagtggacagcagcaccctcctagcagtgcctcctggggactcgagccagtccatggaaagcctgtatggaccgggcagtgagggcacgcctcccagcctggaagactgtgacgccggctgcctgcccgccgaggaggtggacgtgctgctacagcgctgtgaggggggcgtggatgccgcactgctgtatgccaagaacatggccaagtacatgaaggacctcatcagctacctggagaagcggacgacgctggagatggagtttgccaagggcctgcagaagatcgctcacaactgcagacagagcgtcatgcaggagccccacatgccgctcctgtccatctactcgctggccctggagcaggacctggagttcggccacagcatggtgcaggcggtgggcaccttgcagacccagaccttcatgcagcccctgaccctgcggcggcttgaacacgagaagcgcaggaaggagatcaaggaggcctggcaccgtgcccagaggaagctgcaagaggcggagtccaacctgcgcaaggccaagcagggttacgtgcagcgctgcgaggaccacgacaaggctcgcttcctcgtggccaaggcggaggaggagcaggctggcagcgcgccgggagcaggcagcacggccaccaagaccctggacaagcggcggcggctggaggaggaggccaagaacaaggcggaggaagctatggccacctaccgcacctgcgtggccgacgcgaagacgcagaagcaggagctggaggataccaaggtgacggcgctgcggcagatccaggaggtcatccggcagagcgaccaaaccatcaagtcggccacgatctcctactaccagatgatgcatatgcagacggcgccgctgcccgtgcacttccagatgctgtgtgagagcagcaagctgtatgacccaggccagcagtacgcctcccacgtgcgccagctgcagcgggaccaggagcccgatgtgcactacgactttgagccccacgtctccgccaacgcctggtcccccgtcatgcgtgcccggaagagcagcttcaacgtgagtgatgtggcgcggccggaggctgccgggagccccccagaagaaggcgggtgcactgagggcacacctgccaaggaccacagggccgggcgaggacaccaggttcacaagtcatggccgctctcgatctcagactcggacagtgggctggaccccggccctggcgcaggggactttaagaagttcgagcggacgtcatccagtggtaccatgtcgtccacggaggagctggtggacccagacggtggagccggggcttcagcctttgagcaggctgacctcaacggcatgacccccgagctgccggtggccgtgcccagtggaccgttccgccacgaggggctgtccaaggcggcccgtactcaccggctccggaagctccgcacgcccgccaagtgccgcgagtgcaacagctacgtctacttccagggtgctgagtgtgaagagtgctgcctggcctgccacaagaaatgtctggagacgctggccatacagtgcgggcacaagaagctgcaaggccgcctgcagctgttcggccaggacttcagccacgcggcccgcagcgcccccgacggcgtgcccttcatcgtcaagaagtgcgtctgcgagatcgagcggcgggcgctgcgcaccaagggcatctaccgggtcaatggggtaaagacacgcgtggagaagctgtgccaggccttcgagaacggcaaggagctggtcgagctgtcgcaggcctcgccccacgacatcagcaacgtcctcaagctctacctgcgtcagcttcccgagccgctcatctccttccgcctctaccacgagctcgtagggctggccaaggacagcctgaaggcagaggccgaggccaaggcggcgtcccggggccggcaggacggctcggagagcgaggcagtggcggtggccctggcaggtcggctgcgggagctcctgcgggacctgccgcctgagaaccgggcctcgctgcagtacctgctgcgtcacctacgcaggatcgtggaggtggagcaggacaacaagatgacccccgggaacctgggcatcgtgttcgggcccacgctgcttcggccacggcccaccgaggccaccgtgtccctctcctccctggtggattatccccatcaggcccgcgtcatcgagactctcatcgtccactacggcctggtcttcgaggaggagccggaggagacccccgggggccaggacgagtcatccaaccagcgagctgaggtagtcgtccaggtgccgtacctggaggcgggcgaggcggtggtctacccgctgcaggaggcggcggcggacgggtgcagagaatcccgagttgtgtccaacgattcggactcggacctagaggaggcctccgagctgctgtcctcatcggaggccagtgccctgggccacctcagcttcctggagcagcagcagagcgaggccagcctagaggtggcttctggcagccacagcggcagtgaggagcagctggaggccacagcccgggaggacggggacggggacgaggacggcccggcccagcagctctcaggattcaacaccaaccagtccaacaacgtgctgcaggccccactgccccccatgaggctccgtggcgggcggatgacactgggctcctgcagggaaaggcagccggaattcgtgtgagctggggtggggctgggaccacaggtggcttctctcttgcctgctcctgtccctccagcacgtcccctgcaccacggcatagcttaggtgcgccgtcctggggtcgctgccgagagcgcctggacttcgacgtcccaccagcgggcgcctcctcccagaggcttccaggagcacgagggccttgcggcacaggactgtgccctgtgctgtcccctgcaccccggctcagctgagctggggaacactgctgtcgtgtgaag

SEQ ID NO: 92905 - DNA, 3459 bp, Artificial Sequence
  derived and/or modified sequence
atgagccggggccagagggtgctgaagggcctgctgggctgggtgtgcacctggacctgggcctggagggcccggctgggcgcccggggctgcggcctgcacgtgctgtgcccccgggacctgcccctgcccccagaggagctgcccaggaaggatggagcagatgctgtgtttcctggccccagcctggagcccccagctggcagcagcggcgtgaaggccaccggcaccctgaagaggcccaccagcctgagcagacatgccagcgctgctggcttccccctgagcggggccgcctcctggaccctgggccgcagccacaggagccccctgacagctgccagccctggagagctgcccacagaaggagctggcccagatgtggtggaggacatcagccacctgctggctgatgtggccaggtttgctgagggcctggagaagctgaaggaatgtgtgctgagagatgacctgctggaggcccggcggccccgggcccacgagtgcctgggggaggccctgcgggtgatgcaccagatcatcagcaagtaccccctgctgaacacagtggagaccctgacagctgctggcaccctcatcgccaaggtgaaggccttccactatgagagcaacaatgacctggagaagcaggagtttgagaaggccctggagaccatcgctgtggccttcagcagcacagtgtctgagttcctgatgggagaggtggacagcagcaccctgctggccgtgcccccaggggacagcagccagagcatggagagcctgtatggccctggcagcgagggcaccccacccagcctggaggactgtgatgctggctgcctgcctgctgaggaggtggatgtgctgctgcagagatgtgagggcggcgtggatgctgccctgctgtatgccaagaacatggccaagtacatgaaggacctgatctcctacctggagaagaggaccaccctggagatggagtttgccaagggcctgcagaagatcgcccacaactgccggcagagcgtgatgcaggagccccacatgcccctgctgagcatctacagcctggccctggagcaggacctggagtttggccacagcatggtgcaggccgtgggcaccctgcagacccagaccttcatgcagcccctgaccctgcggcggctggagcacgagaagaggaggaaggagatcaaggaggcctggcaccgggcccagaggaagctgcaggaggccgagagcaacctgaggaaggccaagcagggctacgtgcagagatgtgaggaccatgacaaggcccgcttcctggtggccaaggccgaggaggagcaggccggcagcgcccctggagctggcagcacagccaccaagaccctggacaagagaagaaggctggaggaggaggccaagaacaaggccgaggaggccatggccacctaccgcacctgtgtggctgatgccaagacccagaagcaggagctggaggacaccaaggtgacagccctgcggcagatccaggaggtgatccggcagagcgaccagaccatcaagagcgccaccatctcctactaccagatgatgcacatgcagacagcccccctgcctgtgcacttccagatgctgtgtgagagcagcaagctgtatgaccccggccagcagtatgccagccacgtgcggcagctgcagagggaccaggagccagatgtgcactatgactttgagccccacgtgtctgccaatgcctggagccctgtgatgagggccaggaagagcagcttcaacgtgtctgatgtggcccggcctgaggccgccggcagccccccagaggagggcggctgcacagagggcaccccagccaaggaccaccgggccggccggggccaccaggtgcacaagtcctggcccctgagcatcagtgacagcgacagcggcctggaccccggccctggagctggggacttcaagaagtttgagaggaccagcagcagcggcaccatgagcagcacagaggagctggtggaccctgatggaggagctggggccagcgcctttgagcaggccgacctgaatggcatgaccccagagctgcctgtggccgtgcccagcggccccttcagacatgagggcctgagcaaggccgcccggacccaccggctgaggaagctgcggaccccagccaagtgccgggagtgcaacagctatgtgtacttccagggcgcagaatgtgaggagtgctgcctggcctgccacaagaagtgcctggagaccctggccatccagtgtggccacaagaagctgcagggccgcctgcagctgtttggccaggacttcagccacgccgcccggagcgccccagatggagtgcccttcatcgtgaagaagtgtgtgtgtgaaattgaaagaagagccctgcggaccaagggcatctacagagtgaatggagtgaagaccagggtggagaagctgtgccaggcctttgaaaatggcaaggagctggtggagctgagccaggccagcccccatgacatcagcaatgtgctgaagctgtacctgcggcagctgcctgagcccctcatctccttccggctgtaccacgagctggtgggcctggccaaggacagcctgaaggccgaggccgaggccaaggccgccagccggggccggcaggacggcagcgagagcgaggccgtggccgtggccctggccggccgcctgcgggagctgctgcgggacctgcccccagaaaatagagccagcctgcagtacctgctgcggcacctgcggcgcatcgtggaggtggagcaggacaacaagatgaccccaggcaacctgggcatcgtgtttggccccaccctgctgcggccccggcccacagaggccaccgtgtccctgagcagcctggtggactacccccaccaggcccgggtgattgagaccctgattgtgcactacggcctggtgtttgaggaggagcctgaggagacccctgggggccaggatgagagcagcaaccagagagctgaggtggtggtgcaggtgccctacctggaggccggggaggccgtggtgtaccccctgcaggaggccgctgctgatggctgccgggagagccgggtggtgtccaatgacagcgacagcgacctggaggaggccagcgagctgctgagcagcagcgaggccagcgccctgggccacctgtccttcctggagcagcagcagagcgaggccagcctggaggtggccagcggcagccacagcggcagcgaggagcagctggaggccacagcccgggaggatggagatggagatgaagatggccctgcccagcagctgagcggcttcaacaccaaccagagcaacaacgtgctgcaggcccccctgccccccatgaggctgcggggcggccgcatgaccctgggcagctgccgggagcggcagcctgagtttgtgtag

SEQ ID NO: 92906 - DNA, 3459 bp, Artificial Sequence
  derived and/or modified sequence
atgagccggggccagcgggtgctgaagggcctgctgggctgggtgtgcacatggacctgggcctggagggcacggctgggagcaagaggttgcgggctgcatgttctctgcccaagagatttgccgctgccgccggaagaactgcctagaaaggatggagcagacgctgtgtttcccggcccttctctagagccacccgccggctccagcggagtgaaagcgacagggaccctaaaacggcccacctcattgagcaggcatgcgagcgctgccgggtttccgctcagtggcgcagctagttggacactggggcggtcccatcgatccccattaacagctgccagcccaggcgagttgcccaccgaaggcgctggtccggatgtcgtggaagacatttcgcatctactagccgacgtagcaagattcgccgaaggattggagaagcttaaggagtgtgtacttagggacgatctgctcgaagcacgaaggccgcgagctcatgaatgtttgggtgaggccttacgggtgatgcaccagatcatatctaaataccctctactcaacacagttgaaaccctcactgccgcaggaacattgatcgccaaagtgaaggccttccactacgaatcaaataacgacctggaaaagcaggaatttgagaaggctcttgagacaatagcggtggcctttagctccacagtttcagagtttctgatgggcgaagtcgattctagtacacttctggccgtgccacctggcgacagctcacaaagcatggagtccctctacgggccaggtagtgaggggacacctccgagcttggaagattgtgatgccgggtgcctcccagccgaagaagtggacgttctgctccagcgttgtgaggggggcgttgacgccgccctgctgtacgccaaaaatatggccaagtatatgaaagatcttatttcatatcttgagaagagaaccacgctcgaaatggagttcgcgaaaggacttcaaaaaattgcccacaattgccggcaatccgttatgcaggaacctcacatgcccctccttagcatctactccttagctctggaacaggatctggagttcgggcactccatggtgcaggccgtaggcaccctccagacacagacctttatgcagccactgaccttgaggcggcttgagcacgagaagcgccgaaaagagatcaaggaggcctggcatagggcccagcgcaagcttcaggaggccgaatccaaccttaggaaggccaaacagggctatgtccaaaggtgtgaagaccacgataaggccagattcctcgtggcaaaggctgaggaagagcaggccgggtctgcccccggagcaggatcaacagccactaagacgttagacaagcgccgacggctcgaggaagaagccaagaataaagccgaggaagcaatggccacctacagaacatgcgtggcggacgcaaaaacccaaaagcaggagctggaagatacaaaggtcaccgccttaaggcaaatccaggaagtcatcaggcagtccgaccagaccatcaaatccgctacaataagttattaccagatgatgcacatgcagacggcaccccttccggttcactttcagatgctctgtgagagtagcaagttgtatgacccaggtcagcagtatgccagccatgtgagacaactccagagggatcaagagcccgacgtccactatgacttcgagcctcatgtttccgctaatgcctggagtcccgtgatgcgggcccggaagtccagcttcaatgtctccgacgtggctcgacctgaggccgcaggaagtccacctgaggagggtggctgcaccgagggtacaccagctaaagatcatagagccggtcgcgggcaccaggtgcataaatcttggcccttgtcaatcagtgactccgatagcggcctggatcccgggccaggggccggcgattttaaaaagtttgagcgtacatcttcaagcggcactatgtcttcaactgaggagttagtggatccagatgggggggctggtgcttccgccttcgaacaggccgacttaaacggtatgacaccggaactgccagtggccgtcccaagcgggccatttaggcacgaaggcttgtcgaaagcagctcggacacatcggcttcgtaagctgaggactccagccaaatgcagagagtgcaactcatatgtttacttccagggagcagagtgcgaagagtgctgtttagcatgccacaagaagtgcctggagacgcttgcaattcagtgcggtcacaagaaactccaaggacgcctgcagcttttcggccaggattttagtcatgctgccagaagcgctccagatggggttccctttatcgtaaaaaaatgcgtgtgcgagatcgagaggcgcgcgctgcgaacaaagggcatctacagggttaatggcgtcaaaactcgcgttgagaagctttgccaggccttcgagaacgggaaggagctggtcgaactcagccaggcatctccacatgacatatcaaatgtgctgaaactctacctacgacagctccctgaaccactcatcagcttccgcctttaccacgagttagtgggtctggcgaaagactcattaaaggccgaggccgaagctaaagcagcctcaagaggaagacaagatgggtctgaatctgaagccgtggccgtggccctcgctggcagactgcgcgagctgcttagagatcttcctcccgagaatagggcttcattgcagtacctgttacgtcacctgcgaaggattgtggaggtcgagcaggataataaaatgaccccaggcaacctgggaatcgtgttcggccctacgctgctaaggcctcgaccaactgaggccaccgtgagcctgagtagcctcgtcgattatccacatcaagcaagagtgatagaaaccctgatagttcattacggtctggtgttcgaggaagagccagaggagacacctgggggacaggacgagtcctccaatcaacgcgcagaggtggtcgtgcaggtgccataccttgaagcaggcgaggccgtcgtttatccccttcaggaggcggccgctgacggatgtcgggaaagcagagtcgtgtcaaacgactcggatagcgaccttgaggaagcatcagagctgctgtccagcagcgaagcatctgcccttggccacctgagtttccttgaacagcagcaatccgaggcttctctggaggttgcatccgggtcgcacagcgggtcggaggaacagttagaagctacagctcgtgaggacggggacggagatgaggatggacccgctcagcagttatcaggtttcaataccaaccagtccaataatgtccttcaggcacctttaccccccatgcgtctgcgggggggcaggatgactctcggctcttgcagagaaagacaacccgaatttgtgtag

SEQ ID NO: 92907 - DNA, 3459 bp, Artificial Sequence
  derived and/or modified sequence
atgtcaagaggtcagcgtgtgctgaaaggcctgctggggtgggtttgtacgtggacctgggcctggcgggcacgattgggcgctcgtggctgcggactgcatgtgttatgtccaagagacctgcctttgcctcccgaagaactcccgaggaaggacggcgcagacgcggtgtttcctggaccttcactagagcctccagctggaagcagcggggttaaggccacaggaactctgaagcgccctacctcactgtctagacacgctagcgcagcaggattccctctcagcggggcagcatcctggaccctgggtcggtcccatcgatcgcccctcaccgccgcttccccaggcgagttacctaccgaaggggcaggtccagatgtggtcgaggatatcagtcatctcctcgccgacgtcgccagattcgcagaagggctcgaaaagttgaaggaatgtgtgcttcgggacgatcttttggaagcaaggcggccacgggcacacgagtgtctaggggaggccctgagggttatgcaccagattatctctaagtatcccctgctcaacaccgttgagacattgactgccgcaggaacactgatcgccaaagtgaaggcttttcattatgaaagtaataacgatctggagaagcaagagttcgagaaagcgctggaaaccatcgccgtcgccttctcatcaactgtatcagaattcctgatgggtgaggtcgatagttccaccctgttggccgtgccccctggcgattcttcgcagtcaatggagtctctgtacggcccaggatcggaggggacgcccccttctttagaggactgtgatgccggttgtttgcccgctgaggaagtcgacgtcctcttacagcggtgcgagggaggtgtggacgcggctcttttgtacgccaagaatatggcgaaatatatgaaggatttgatatcgtatttggagaagaggaccacgctggagatggagttcgcaaaaggcctgcaaaaaattgcccataactgtagacagtctgtgatgcaggaaccccacatgcccctgctctccatctattccctggccttggagcaagacctggagttcggtcacagcatggtgcaagcagtcggcacacttcagacccagacatttatgcagcctctcacgctgagacgtctcgagcatgagaagaggcgcaaagagattaaagaggcctggcatagggcccaacggaagctgcaggaggctgaatccaacctgcgcaaagcgaaacagggttatgttcaacggtgcgaagaccacgacaaagccagatttcttgtggccaaggccgaagaggagcaggccggtagcgcacccggtgctggcagcactgcaaccaagacactggacaagaggcgtcggttggaggaggaagctaagaataaagctgaggaggccatggctacatatagaacatgcgtcgctgatgcaaaaacacagaagcaggaactcgaggataccaaggtgacagcccttaggcagatacaagaggtcattcggcaaagcgaccaaactatcaagtcagccactatctcttactatcagatgatgcacatgcagacggctccattgccagttcatttccagatgctgtgtgagagctccaagttgtatgaccctggacagcagtacgcaagccatgtcaggcaactccagcgagaccaggaacccgacgttcactacgactttgaacctcacgtctcagccaacgcctggagtccagtgatgcgggctcggaaatcctccttcaatgtctcagacgtcgcaagacccgaggccgctggcagtcctccagaagaaggcggatgcaccgagggcactcccgcaaaggatcaccgtgccggaagagggcatcaagtgcataaatcgtggccgctgtcaatctccgatagcgatagtggcctcgatcctgggccaggagccggtgacttcaaaaaattcgagcgaacttctagttctgggaccatgtcatccacagaagagttagtggacccagacggcggtgccggagcaagtgcattcgaacaggcagatctgaacggcatgactcctgagctcccggttgccgtcccgtccggcccttttcgccacgaggggttgtccaaggcagcgcgtactcacagactgagaaaactgagaacccccgctaagtgccgcgagtgtaactcatacgtgtattttcagggggcagaatgcgaagagtgttgtctcgcatgccataagaaatgcttggaaacactggcaattcagtgcgggcacaagaaattgcaggggcgactgcaattattcggtcaggatttctctcatgctgcccgtagtgcacctgatggcgtgccttttatcgtcaagaagtgcgtttgtgaaattgagcgcagggcactgcgaacaaagggcatttacagagtgaatggagtgaaaacccgggtagagaaactgtgccaggcatttgagaacgggaaggagctggtcgaactctcccaagccagccctcatgacatctctaacgtgcttaaactttatctgcgacagctgcccgaacctctgatctcttttcgtctctatcatgaactggtggggttggcaaaggactctctgaaagctgaggctgaggcaaaagctgccagtagggggaggcaggacggatccgagtctgaggcagtggctgtagcacttgccggtcgcctccgagagctgttacgggacctcccacctgagaaccgggcttcccttcagtacctgttacggcatctgcggagaatcgttgaagttgagcaggataacaaaatgactcccggtaacctcggaattgtgtttggccctaccctactccggcctaggcccactgaagcgacagtcagtctctcaagtttggttgattatcctcaccaggctcgggtgatcgagacccttatcgtccattacgggttggtgttcgaagaggagcccgaggaaactccaggcggacaggatgaaagctccaatcagagggcagaagttgtcgttcaggtgccttatctggaagccggagaagccgtagtgtatcccctccaggaagcagcggctgatggttgtcgggagtcaagagtggtgtccaacgactccgactccgacctggaagaagcaagcgagctgctctcatcctcagaagctagcgcactagggcacctgtcctttctggagcagcagcagtccgaggctagtttggaggtcgcatccggaagccactcgggaagtgaggagcagctcgaggcgaccgcgagggaggacggtgatggcgacgaagatggacccgctcagcaactgtctggctttaacactaaccagtccaataatgtccttcaggcacccctgcccccaatgcgacttcggggtggccgaatgaccctcggcagctgccgagaacgccagcctgagtttgtctag

SEQ ID NO: 92908 - DNA, 3459 bp, Artificial Sequence
  derived and/or modified sequence
atgagcagaggccagagagtgctgaagggcctgctgggctgggtgtgcacctggacctgggcctggagagccagactgggcgccagaggctgcggcctgcacgtgctgtgccccagagacctgcccctgccccccgaggagctgcccagaaaggacggcgccgacgccgtgttccccggccccagcctggagccccccgccggcagcagcggcgtgaaggccaccggcaccctgaagagacccaccagcctgagcagacacgccagcgccgccggcttccccctgagcggcgccgccagctggaccctgggcagaagccacagaagccccctgaccgccgccagccccggcgagctgcccaccgagggcgccggccccgacgtggtggaggacatcagccacctgctggccgacgtggccagattcgccgagggcctggagaagctgaaggagtgcgtgctgagagacgacctgctggaggccagaagacccagagcccacgagtgcctgggcgaggccctgagagtgatgcaccagatcatcagcaagtaccccctgctgaacaccgtggagaccctgaccgccgccggcaccctgatcgccaaggtgaaggccttccactacgagagcaacaacgacctggagaagcaggagttcgagaaggccctggagaccatcgccgtggccttcagcagcaccgtgagcgagttcctgatgggcgaggtggacagcagcaccctgctggccgtgccccccggcgacagcagccagagcatggagagcctgtacggccccggcagcgagggcaccccccccagcctggaggactgcgacgccggctgcctgcccgccgaggaggtggacgtgctgctgcagagatgcgagggcggcgtggacgccgccctgctgtacgccaagaacatggccaagtacatgaaggacctgatcagctacctggagaagagaaccaccctggagatggagttcgccaagggcctgcagaagatcgcccacaactgcagacagagcgtgatgcaggagccccacatgcccctgctgagcatctacagcctggccctggagcaggacctggagttcggccacagcatggtgcaggccgtgggcaccctgcagacccagaccttcatgcagcccctgaccctgagaagactggagcacgagaagagaagaaaggagatcaaggaggcctggcacagagcccagagaaagctgcaggaggccgagagcaacctgagaaaggccaagcagggctacgtgcagagatgcgaggaccacgacaaggccagattcctggtggccaaggccgaggaggagcaggccggcagcgcccccggcgccggcagcaccgccaccaagaccctggacaagagaagaagactggaggaggaggccaagaacaaggccgaggaggccatggccacctacagaacctgcgtggccgacgccaagacccagaagcaggagctggaggacaccaaggtgaccgccctgagacagatccaggaggtgatcagacagagcgaccagaccatcaagagcgccaccatcagctactaccagatgatgcacatgcagaccgcccccctgcccgtgcacttccagatgctgtgcgagagcagcaagctgtacgaccccggccagcagtacgccagccacgtgagacagctgcagagagaccaggagcccgacgtgcactacgacttcgagccccacgtgagcgccaacgcctggagccccgtgatgagagccagaaagagcagcttcaacgtgagcgacgtggccagacccgaggccgccggcagcccccccgaggagggcggctgcaccgagggcacccccgccaaggaccacagagccggcagaggccaccaggtgcacaagagctggcccctgagcatcagcgacagcgacagcggcctggaccccggccccggcgccggcgacttcaagaagttcgagagaaccagcagcagcggcaccatgagcagcaccgaggagctggtggaccccgacggcggcgccggcgccagcgccttcgagcaggccgacctgaacggcatgacccccgagctgcccgtggccgtgcccagcggccccttcagacacgagggcctgagcaaggccgccagaacccacagactgagaaagctgagaacccccgccaagtgcagagagtgcaacagctacgtgtacttccagggcgccgagtgcgaggagtgctgcctggcctgccacaagaagtgcctggagaccctggccatccagtgcggccacaagaagctgcagggcagactgcagctgttcggccaggacttcagccacgccgccagaagcgcccccgacggcgtgcccttcatcgtgaagaagtgcgtgtgcgagatcgagagaagagccctgagaaccaagggcatctacagagtgaacggcgtgaagaccagagtggagaagctgtgccaggccttcgagaacggcaaggagctggtggagctgagccaggccagcccccacgacatcagcaacgtgctgaagctgtacctgagacagctgcccgagcccctgatcagcttcagactgtaccacgagctggtgggcctggccaaggacagcctgaaggccgaggccgaggccaaggccgccagcagaggcagacaggacggcagcgagagcgaggccgtggccgtggccctggccggcagactgagagagctgctgagagacctgccccccgagaacagagccagcctgcagtacctgctgagacacctgagaagaatcgtggaggtggagcaggacaacaagatgacccccggcaacctgggcatcgtgttcggccccaccctgctgagacccagacccaccgaggccaccgtgagcctgagcagcctggtggactacccccaccaggccagagtgatcgagaccctgatcgtgcactacggcctggtgttcgaggaggagcccgaggagacccccggcggccaggacgagagcagcaaccagagagccgaggtggtggtgcaggtgccctacctggaggccggcgaggccgtggtgtaccccctgcaggaggccgccgccgacggctgcagagagagcagagtggtgagcaacgacagcgacagcgacctggaggaggccagcgagctgctgagcagcagcgaggccagcgccctgggccacctgagcttcctggagcagcagcagagcgaggccagcctggaggtggccagcggcagccacagcggcagcgaggagcagctggaggccaccgccagagaggacggcgacggcgacgaggacggccccgcccagcagctgagcggcttcaacaccaaccagagcaacaacgtgctgcaggcccccctgccccccatgagactgagaggcggcagaatgaccctgggcagctgcagagagagacagcccgagttcgtgtag

SEQ ID NO: 92909 - protein, 880 aa, Artificial Sequence
  derived and/or modified sequence
MTTETGPDSEVKKAQEEAPQQPEAAAAVTTPVTPAGHGHPEANSNEKHPSQQDTRPAEQSLDMEEKDYSEADGLSERTTPSKAQKSPQKIAKKYKSAICRVTLLDASEYECEVEKHGRGQVLFDLVCEHLNLLEKDYFGLTFCDADSQKNWLDPSKEIKKQIRSSPWNFAFTVKFYPPDPAQLTEDITRYYLCLQLRADIITGRLPCSFVTHALLGSYAVQAELGDYDAEEHVGNYVSELRFAPNQTRELEERIMELHKTYRGMTPGEAEIHFLENAKKLSMYGVDLHHAKDSEGIDIMLGVCANGLLIYRDRLRINRFAWPKILKISYKRSNFYIKIRPGEYEQFESTIGFKLPNHRSAKRLWKVCIEHHTFFRLVSPEPPPKGFLVMGSKFRYSGRTQAQTRQASALIDRPAPFFERSSSKRYTMSRSLDGAEFSRPASVSENHDAGPDGDKRDEDGESGGQRSEAEEGEVRTPTKIKELKPEQETTPRHKQEFLDKPEDVLLKHQASINELKRTLKEPNSKLIHRDRDWERERRLPSSPASPSPKGTPEKANERAGLREGSEEKVKPPRPRAPESDTGDEDQDQERDTVFLKDNHLAIERKCSSITVSSTSSLEAEVDFTVIGDYHGSAFEDFSRSLPELDRDKSDSDTEGLLFSRDLNKGAPSQDDESGGIEDSPDRGACSTPDMPQFEPVKTETMTVSSLAIRKKIEPEAVLQTRVSAMDNTQVDGSASVGREFIATTPSITTETISTTMENSLKSGKGAAAMIPGPQTVATEIRSLSPIIGKDVLTSTYGATAETLSTSTTTHVTKTVKGGFSETRIEKRIIITGDEDVDQDQALALAIKEAKLQHPDMLVTKAVVYRETDPSPEERDKKPQES

SEQ ID NO: 92910 - DNA, 2643 bp, Artificial Sequence
  derived and/or modified sequence
atgaccactgagacaggtcccgatagcgaggtgaagaaagcacaagaggaagcgcctcagcagccagaggctgcggccgccgtaactactcctgtcaccccagccggccacgggcatcctgaggctaatagcaatgagaagcacccatcgcagcaggatacgaggccggccgaacaatctctggatatggaggaaaaggactattctgaagcagacggcctctctgaaaggaccactccttctaaggctcagaagtctcctcagaagatagctaagaaatacaaaagcgcgatctgcagggtcactctcttagatgctagcgagtatgaatgtgaggtcgagaaacatggtagaggacaagtcttgttcgacctcgtgtgcgagcatttgaacctgctggagaaagactactttgggctgactttctgcgacgctgattcccagaaaaactggctggacccctccaaggagattaagaaacaaattagatcttccccatggaactttgccttcaccgttaagttctacccacccgatcccgcacagctgaccgaggatatcacacgatactatctgtgtctgcagctgcgggcagacattataaccggccgattgccttgcagctttgtcacccatgctttactcggatcctacgctgtgcaggccgaacttggcgactatgacgccgaggagcatgtcggaaactacgtctccgaactgaggttcgctcctaaccaaactagagagctagaagagcgcataatggagcttcacaagacgtatcgtggcatgacacccggcgaggcagagatccacttcctggaaaacgcgaagaaactaagcatgtacggggttgacttacaccatgcaaaggactcagagggcatagatataatgcttggagtgtgcgccaatggactattgatttaccgcgatcggcttcgaattaatcggttcgcgtggcctaagatcctgaagatttcttataagcggtccaacttttacattaaaatcagacccggcgagtatgagcagtttgagtccacaataggattcaagctgcccaatcatcgatctgccaagcgcttatggaaagtctgcatcgaacaccacaccttctttcgcctggtttcacctgagccccccccgaaaggcttcctcgtgatggggagtaaattcagatactctggacgcacccaggctcagacacgccaagccagcgctctcattgacagacccgcaccattctttgagagatctagtagcaaacggtatactatgtctaggtcccttgacggcgccgaattcagtcgccccgccagcgtctcagaaaaccacgatgctgggcccgacggggataaacgcgatgaagacggggagtctggtggtcagcgctctgaagccgaagaaggcgaggttcgcaccccaaccaaaatcaaagagcttaagcctgagcaggaaacaacacctaggcataaacaggaattccttgacaaaccggaggacgtgttgcttaagcaccaggccagcattaacgagctgaagcgcaccttgaaggaaccaaattcaaaactgatccacagagaccgggactgggagcgcgaacgtagactgccatctagtccggctagtccctcaccgaaggggacacccgaaaaggcaaatgaaagagccggcctgagggagggctcagaagagaaagtgaagccaccacgacccagagcaccggagtctgacacaggcgatgaagaccaggatcaggagcgggacaccgtattcttgaaagataatcacctggcaattgagcgcaaatgctcaagtatcactgtcagctccacctcttcactagaagctgaagtcgatttcacagtcatcggcgactatcacggcagcgcctttgaggacttctcgcggtcccttcctgagttggacagggacaaatccgacagcgacaccgaaggactactgtttagccgggatttgaataagggagctcctagtcaggatgatgagtctggaggtattgaagattctcccgatcgtggtgcctgctctactcccgacatgcctcaatttgaacctgtgaaaactgagactatgaccgtgtccagtttggctatcagaaaaaaaatcgagccagaggccgtgctccagacacgcgtctctgccatggataacacccaagtggatggaagtgcttctgtcgggcgggagtttatcgcaaccaccccctccattacaaccgagactatttcaacaactatggagaattcccttaagagcgggaagggcgctgccgccatgatccctggcccgcagaccgttgctacagaaatccggtcgctgtctccaatcatcggaaaagacgttctgacttcgacctatggggccacagctgaaactctgtccacttctaccaccacacacgtgaccaaaacagtcaaaggagggttttccgagacacggatcgagaagcgaattatcattacaggagacgaagatgtggaccaagaccaggccctggccctggctataaaagaggctaagctccaacatcctgacatgctcgttacaaaagctgtcgtttatcgcgagacagatccaagccctgaagagcgcgataagaaaccacaggaatcatag

SEQ ID NO: 92911 - DNA, 2643 bp, Artificial Sequence
  derived and/or modified sequence
atgaccacagaaacaggcccagattctgaggtgaagaaggcccaggaggaggccccccagcagcctgaggccgctgctgctgtgaccacccctgtgaccccagctggccacggccaccctgaggccaacagcaatgagaagcaccccagccagcaggacaccaggcctgctgagcagagcctggacatggaggagaaggactacagcgaggctgatggcctgtctgagaggaccacccccagcaaggcccagaagagcccccagaagatcgccaagaagtacaagagcgccatctgccgggtgaccctgctggatgcctctgaatatgaatgtgaggtggagaagcacggccggggccaggtgctgtttgacctggtgtgtgagcacctgaacctgctggagaaggactacttcggcctgaccttctgtgatgctgacagccagaagaactggctggaccccagcaaggagatcaagaagcagatccgcagcagcccctggaactttgccttcaccgtgaagttctaccccccagaccctgcccagctgacagaggacatcacccgctactacctgtgcctgcagctgcgggctgacatcatcaccggccgcctgccctgcagctttgtgacccacgccctgctgggcagctatgctgtgcaggccgagctgggggactatgatgctgaggagcacgtgggcaactacgtgtctgagctgcgctttgcccccaaccagacccgggagctggaggagcgcatcatggagctgcacaagacctaccggggcatgaccccaggagaggccgagatccacttcctggagaatgccaagaagctgtccatgtatggagtggacctgcaccacgccaaggacagcgagggcatcgacatcatgctgggcgtgtgtgccaacggcctgctgatctacagagaccggctgcgcatcaacagatttgcctggcccaagatcctgaagatctcctacaagaggagcaacttctacatcaagatccggcctggagaatatgagcagtttgagagcaccatcggcttcaagctgcccaaccacaggtctgccaagaggctgtggaaggtgtgcatcgagcaccacaccttcttccggctggtgtccccagagcccccacccaagggcttcctggtgatgggcagcaagttccgctacagcggccgcacccaggcccagacccggcaggccagcgccctgattgacaggcctgcccccttctttgagaggagcagcagcaagcgctacaccatgagccgcagcctggatggagctgagttcagcaggcctgcctctgtgtctgagaaccatgatgctggcccagatggagacaagagagatgaagatggagagagcggcggccagaggtctgaggccgaggagggggaggtgaggacccccaccaagatcaaggagctgaagccagagcaggagaccacccccaggcacaagcaggagttcctggacaagccagaagatgtgctgctgaagcaccaggccagcatcaatgagctgaagaggaccctgaaggagcccaacagcaagctgatccaccgggaccgggactgggagcgggagcggcggctgcccagcagccctgccagccccagccccaagggcaccccagagaaggccaatgaaagagctggcctgcgggagggcagcgaggagaaggtgaagccaccccggccccgggcccctgagagtgacacaggagatgaggaccaggaccaggagcgggacacagtgttcctgaaggacaaccacctggccattgaaaggaagtgcagcagcatcaccgtgagcagcaccagcagcctggaggccgaggtggacttcaccgtgattggagactaccacggcagcgcctttgaggacttcagccgcagcctgcctgagctggaccgggacaagagtgacagcgacacagagggcctgctcttcagccgggacctgaacaagggggcccccagccaggatgatgagagcggcggcatcgaggacagcccagacagaggagcctgcagcaccccagacatgccccagtttgagcctgtgaagacagagaccatgacagtgagcagcctggccatcaggaagaagattgagcctgaggccgtgctgcagaccagggtgtctgccatggacaacacccaggtggatggcagcgcctctgtgggccgggagttcatcgccaccacccccagcatcaccacagagaccatcagcaccaccatggagaacagcctgaagtctggaaaaggagctgctgccatgatccctggcccccagacagtggccacagagatccgcagcctgagccccatcatcggcaaggatgtgctgaccagcacctatggagccacagctgagaccctgagcaccagcaccaccacccacgtgaccaagacagtgaagggcggcttcagcgagaccagaattgagaagaggatcatcatcactggagatgaagatgtggaccaggaccaggccctggccctggccatcaaggaggccaagctgcagcacccagacatgctggtgaccaaggctgtggtgtaccgggagacagaccccagccctgaggagcgggacaagaagccccaggagagctag

SEQ ID NO: 92912 - DNA, 2643 bp, Artificial Sequence
  derived and/or modified sequence
atgaccaccgagaccggccccgacagcgaggtgaagaaggcccaggaggaggcccctcagcagccagaggctgcggccgctgtcacaacacctgttactccggccggccatgggcatccggaagccaattcaaacgagaaacatcccagtcagcaagacacccggcccgccgagcagtcactggacatggaagaaaaggattactcagaagcagatggcctgtctgaaaggacaaccccaagcaaggcccagaagtccccccaaaagatcgccaagaagtacaaatccgcgatttgccgggtcacattgctcgatgcgtccgaatacgagtgcgaggtcgagaagcacgggagaggccaggttctgttcgacctggtttgcgagcatctgaacctccttgagaaggattacttcggactcacgttctgcgacgccgatagccagaaaaattggttagaccctagcaaagaaatcaaaaagcagataaggtcatcaccatggaacttcgcctttactgtcaagttttaccctccggatcctgctcaacttacggaggatattacccgatattacttgtgccttcagctcagagcagacattattaccggtcgcctaccttgctcattcgtgactcacgcgcttcttggcagctatgccgtgcaggctgagctaggagattatgatgcagaagagcacgtcggtaattatgtgtccgagctgagatttgcccctaaccagactcgggagcttgaagagcgcatcatggagttgcacaagacctatagaggaatgacccctggtgaggccgaaatccattttctggaaaatgcaaagaagttaagtatgtatggggttgatttgcatcacgctaaagatagcgagggtatagacataatgctgggtgtgtgcgctaatgggcttctgatctaccgggaccgattgagaatcaacaggtttgcttggccaaagattcttaagatatcctataagagatccaatttttacatcaagattcggcccggagagtacgaacagtttgagagtacaattggttttaagctgcccaaccatagatccgctaagagactctggaaggtgtgcattgagcaccacacctttttcagactggtttctccagaacctccgcccaaaggtttcttggtgatgggaagcaaattccgctattccggcagaacacaggcacagactcgtcaagcttctgccctgatagatcgacctgcgcctttttttgaacggtccagctcaaagcggtataccatgtcaaggagcttggatggagcggaattcagtcggcccgcttcagtttctgagaatcacgacgctggacccgatggcgataagcgagatgaagacggagagagcggtggccaacggtccgaggccgaggaaggtgaggtgcgcactcccacgaaaatcaaggagttgaagcctgagcaggaaacaacccctcgacacaagcaagaattcctggacaagcccgaagacgtgttgctgaagcatcaagccagcattaatgagctgaagcgcaccctgaaagagccaaactccaagttaattcatagagatagagactgggaacgtgagcggcgtcttccctcctctcccgcctccccttcgcccaagggtactcctgaaaaagctaatgagcgcgctggcctgagggaaggttccgaggagaaggtgaagcctcctcgcccaagagcccccgagtctgacacaggtgacgaagaccaagatcaagaacgggacaccgtattcctgaaggacaatcatctcgccatcgagcgtaagtgctcatccatcaccgtttccagtacaagcagcctggaggccgaagtggacttcaccgtgatcggggactatcacgggtccgcatttgaagatttttctaggtcgctgcccgaactggaccgcgacaaatctgacagcgacacggaagggttgctcttttccagagacttaaacaaaggcgccccctctcaggacgatgagtccggcggaatcgaggactccccggaccggggagcctgctcgacccccgacatgccacagtttgaacccgtcaaaactgaaacaatgacggtctcatcactggctatcagaaagaaaattgaacctgaggccgtgttacagacccgggtttcagccatggacaatactcaggtagacggctcagcaagtgtgggaagagaattcatcgcaaccaccccctcaattacgacagagacaatatccacaacgatggagaactcactgaagtccggcaagggggccgctgccatgattcccgggccgcagactgttgccaccgaaatcaggagtctgagtcccatcataggaaaggacgtgctgacttcgacatatggggcaacggctgagaccctgtctacttctaccacgacccatgtcacgaagacagtcaaaggcggcttttctgaaactaggatcgagaagaggatcatcataactggcgatgaggacgtcgaccaggatcaggctctggcactagcaatcaaagaggccaaactgcagcatcctgacatgctagtcacaaaggcagtggtgtaccgggagacagacccctctcctgaagagcgtgacaagaagccacaggagtcctag

SEQ ID NO: 92913 - DNA, 2643 bp, Artificial Sequence
  derived and/or modified sequence
atgaccacagagacaggccctgactccgaggtcaagaaagcccaagaggaagccccacagcaaccagaagcagccgctgccgtgacgacaccagtgacgcccgctggccacgggcacccggaggcaaatagcaacgagaagcacccatctcagcaagatacacgacctgccgagcagtccctggacatggaggaaaaagattattccgaagccgatggactgagtgaaagaacaaccccaagcaaggcccagaagagcccacagaagattgccaaaaaatacaagtcagcaatctgccgcgttactctactcgatgcatcggagtacgagtgcgaggtggaaaaacacggacggggtcaggtgttgttcgacttggtgtgcgaacatctgaacctgttggagaaggactatttcggcctgacattttgtgacgcagattcccaaaagaattggttggatcccagcaaagagatcaaaaagcagatcagatcaagtccctggaatttcgcattcactgttaagttttacccaccagacccagcccagctgaccgaagacatcacacgctactacttgtgtctgcagctgagggcagacatcatcaccggacgcctaccttgcagctttgtgacccatgctttgctcggctcctatgccgtccaggctgaacttggcgattatgatgcagaagagcacgttggcaattacgtttctgaactccggttcgctcctaatcagacacgggaactggaagagcgcattatggaacttcataagacctaccggggaatgacacctggcgaggccgagattcattttctggaaaacgcaaaaaaacttagcatgtatggtgtggacctgcaccacgcaaaagacagcgaaggcatagatattatgctgggagtgtgcgccaatgggctgttaatttaccgagatagacttaggatcaacaggtttgcatggcccaaaatcctgaagatctcttataagaggagcaacttctatatcaaaataaggccgggagagtatgaacagtttgagtccactatagggttcaaactccctaatcaccggagtgctaagcggctgtggaaagtatgcatcgaacaccacaccttttttcggttagtatctccagagccccctccgaagggattcttggtgatgggatccaaatttagatattccgggcgtacacaagcacagacccggcaggcgtccgctctcattgaccgaccagctccgttctttgaaaggtccagctctaagaggtataccatgtcccgttccctagacggagccgaattttccagacccgcaagtgtctctgagaaccacgatgccggacctgacggagacaagagggacgaagacggtgaaagcggaggccaaaggtcggaggccgaggaaggggaggtgaggaccccaacaaaaattaaggagctgaagcctgagcaggaaactacaccgcgtcataagcaggagttcctcgataagcctgaggatgtcctgctcaaacaccaggcctctataaatgaattgaagaggaccctgaaggagcccaacagtaagctgatacatcgggaccgcgactgggagagggaacggcgactgccctccagtcccgcatccccctcccccaaaggcacccctgagaaggccaatgagagagccggacttcgcgagggcagtgaggaaaaggtgaaacccccacgtccaagagctcccgaaagcgacaccggcgacgaggatcaggatcaggagcgtgacactgtgttcctcaaagacaaccacctggccatcgaacgaaagtgttccagcatcactgtctcgagcacctcatcacttgaagcagaagtggattttaccgtgattggcgactatcacggctctgctttcgaggactttagcagatccctgcctgaattggatcgcgataaatcggactcggacacagaaggtctcctgttcagtcgcgacctcaacaaaggggcaccgagtcaggacgacgaaagtggaggcatcgaggattctccggataggggggcatgttctacacctgacatgccacaattcgaaccggtaaagactgaaacgatgaccgtctcgtctctcgccatccggaagaagatagagcctgaggccgtgctgcagactcgggttagcgcaatggacaatactcaggtggacggcagtgcctccgtgggacgggagttcatcgccaccaccccgtccatcaccaccgagactatttcaacaacgatggagaacagccttaagtccggcaaaggggctgccgcaatgattccgggtccacaaacggtggccaccgagattaggagtctttctcccatcatcggaaaagacgttctgaccagcacttacggcgcaaccgccgagacgctgagcacaagcaccacgactcacgtaaccaagactgttaagggcggattcagcgagacacgcatcgagaagcgaatcatcatcacaggcgacgaagatgttgatcaggaccaggccctggctcttgctattaaggaggctaaacttcaacatccagacatgttggtcaccaaagcagtagtctatcgcgagaccgacccaagcccggaggagcgggataaaaaaccccaggagagctag

SEQ ID NO: 92914 - DNA, 2643 bp, Artificial Sequence
  derived and/or modified sequence
atgaccaccgagaccggccccgacagcgaggtgaagaaggcccaggaggaggccccccagcagcccgaggccgccgccgccgtgaccacccccgtgacccccgccggccacggccaccccgaggccaacagcaacgagaagcaccccagccagcaggacaccagacccgccgagcagagcctggacatggaggagaaggactacagcgaggccgacggcctgagcgagagaaccacccccagcaaggcccagaagagcccccagaagatcgccaagaagtacaagagcgccatctgcagagtgaccctgctggacgccagcgagtacgagtgcgaggtggagaagcacggcagaggccaggtgctgttcgacctggtgtgcgagcacctgaacctgctggagaaggactacttcggcctgaccttctgcgacgccgacagccagaagaactggctggaccccagcaaggagatcaagaagcagatcagaagcagcccctggaacttcgccttcaccgtgaagttctacccccccgaccccgcccagctgaccgaggacatcaccagatactacctgtgcctgcagctgagagccgacatcatcaccggcagactgccctgcagcttcgtgacccacgccctgctgggcagctacgccgtgcaggccgagctgggcgactacgacgccgaggagcacgtgggcaactacgtgagcgagctgagattcgcccccaaccagaccagagagctggaggagagaatcatggagctgcacaagacctacagaggcatgacccccggcgaggccgagatccacttcctggagaacgccaagaagctgagcatgtacggcgtggacctgcaccacgccaaggacagcgagggcatcgacatcatgctgggcgtgtgcgccaacggcctgctgatctacagagacagactgagaatcaacagattcgcctggcccaagatcctgaagatcagctacaagagaagcaacttctacatcaagatcagacccggcgagtacgagcagttcgagagcaccatcggcttcaagctgcccaaccacagaagcgccaagagactgtggaaggtgtgcatcgagcaccacaccttcttcagactggtgagccccgagcccccccccaagggcttcctggtgatgggcagcaagttcagatacagcggcagaacccaggcccagaccagacaggccagcgccctgatcgacagacccgcccccttcttcgagagaagcagcagcaagagatacaccatgagcagaagcctggacggcgccgagttcagcagacccgccagcgtgagcgagaaccacgacgccggccccgacggcgacaagagagacgaggacggcgagagcggcggccagagaagcgaggccgaggagggcgaggtgagaacccccaccaagatcaaggagctgaagcccgagcaggagaccacccccagacacaagcaggagttcctggacaagcccgaggacgtgctgctgaagcaccaggccagcatcaacgagctgaagagaaccctgaaggagcccaacagcaagctgatccacagagacagagactgggagagagagagaagactgcccagcagccccgccagccccagccccaagggcacccccgagaaggccaacgagagagccggcctgagagagggcagcgaggagaaggtgaagccccccagacccagagcccccgagagcgacaccggcgacgaggaccaggaccaggagagagacaccgtgttcctgaaggacaaccacctggccatcgagagaaagtgcagcagcatcaccgtgagcagcaccagcagcctggaggccgaggtggacttcaccgtgatcggcgactaccacggcagcgccttcgaggacttcagcagaagcctgcccgagctggacagagacaagagcgacagcgacaccgagggcctgctgttcagcagagacctgaacaagggcgcccccagccaggacgacgagagcggcggcatcgaggacagccccgacagaggcgcctgcagcacccccgacatgccccagttcgagcccgtgaagaccgagaccatgaccgtgagcagcctggccatcagaaagaagatcgagcccgaggccgtgctgcagaccagagtgagcgccatggacaacacccaggtggacggcagcgccagcgtgggcagagagttcatcgccaccacccccagcatcaccaccgagaccatcagcaccaccatggagaacagcctgaagagcggcaagggcgccgccgccatgatccccggcccccagaccgtggccaccgagatcagaagcctgagccccatcatcggcaaggacgtgctgaccagcacctacggcgccaccgccgagaccctgagcaccagcaccaccacccacgtgaccaagaccgtgaagggcggcttcagcgagaccagaatcgagaagagaatcatcatcaccggcgacgaggacgtggaccaggaccaggccctggccctggccatcaaggaggccaagctgcagcaccccgacatgctggtgaccaaggccgtggtgtacagagagaccgaccccagccccgaggagagagacaagaagccccaggagagctag

SEQ ID NO: 92915 - DNA, 2652 bp, Artificial Sequence
  derived and/or modified sequence
ctggtcaccatgacaacagagacaggccccgactctgaggtgaagaaagctcaggaggaggccccgcagcagcccgaggctgctgccgctgtgaccacccctgtgacccctgcaggccacggccacccagaggccaactccaatgagaagcatccatcccagcaggacacgcggcctgctgaacagagcctagacatggaggagaaggactacagtgaggccgatggcctttcggagaggaccacgcccagcaaggcccagaaatcgccccagaagattgccaagaaatacaagagtgccatctgccgggtcactctgcttgatgcctcggagtatgagtgtgaggtggagaaacatggccggggccaggtgctgtttgacctggtctgtgaacacctcaacctcctagagaaggactacttcggcctgaccttctgtgatgctgacagccagaagaactggctggacccctccaaggagatcaagaagcagatccggagtagcccctggaattttgccttcacagtcaagttctacccgcctgatcctgcccagctgacagaagacatcacaagatactacctgtgcctgcagctgcgggcagacatcatcacgggccggctgccatgctcctttgtcacgcatgccctactgggctcctacgctgtgcaggctgagctgggtgactatgatgctgaggagcatgtgggcaactatgtcagcgagctccgcttcgcccctaaccagacccgggagctggaggagaggatcatggagctgcataagacatatagggggatgaccccgggagaagcagaaatccacttcttagagaatgccaagaagctttccatgtacggagtagacctgcaccatgccaaggactctgagggcatcgacatcatgttaggcgtttgtgccaatggcctgctcatctaccgggaccggctgagaatcaaccgctttgcctggcccaagatcctcaagatctcctacaagaggagtaacttctatatcaagatccggcctggggagtatgagcaatttgagagcacaattggctttaagctcccaaaccaccggtcagccaagagactgtggaaggtctgcatcgagcatcatacattcttccggctggtgtcccctgagcccccacccaagggcttcctggtgatgggctccaagttccggtacagtgggaggacccaggcacagactcgccaggccagcgccctcattgaccggcctgcacccttctttgagcgttcttccagcaaacggtacaccatgtcccgcagccttgatggagcagagttctcccgcccagcctcggtcagcgagaaccatgatgcagggcctgacggtgacaagcgggatgaggatggcgagtctggggggcaacggtcagaggctgaggagggagaggtcaggactccaaccaagatcaaggagctaaagccggagcaggaaaccacgccgagacacaagcaggagttcttagacaagccagaagatgtcttgctgaagcaccaggccagcatcaatgagctcaaaaggaccctgaaggagcccaacagcaaactcatccaccgggatcgagactgggaacgggagcgcaggctgccctcctcccccgcctccccctcccccaagggcacccctgagaaagccaatgagagagcagggctgagggagggctccgaggagaaagtcaaaccaccacgtccccgggccccagagagtgacacaggcgatgaggaccaggaccaggagagggacacggtgttcctgaaggacaaccacctggccattgagcgcaagtgctccagcatcacggtcagctctacgtctagcctggaggctgaggtggacttcacggtcattggtgactaccatggcagcgccttcgaagacttctcccgcagcctgcctgagctcgaccgggacaaaagcgactcggacactgagggcctgctgttctcccgggatctcaacaagggggcccccagccaggatgatgagtctgggggcattgaggacagcccggatcgaggggcctgctccaccccggatatgccccagtttgagcccgtgaaaacagaaaccatgactgtcagcagtctggccattagaaagaagattgagccggaggccgtactgcagaccagagtctccgctatggataacacccaggttgatgggagtgcctcagtggggagggagttcatagcaaccactccctccatcaccacggagaccatatcgaccaccatggagaacagtctcaagtccgggaagggggcagctgccatgatcccaggcccacagacggtggccacggaaatccgttctctttctccgatcatcgggaaagatgtcctcaccagcacctacggcgccactgcggaaaccctctcaacctccaccaccacccatgtcaccaaaactgtgaaaggagggttttctgagacaaggatcgagaagcgaatcatcattactggggatgaagatgtcgatcaagaccaggccctggctttggccatcaaggaggccaaactgcagcatcctgatatgctggtaaccaaagctgtcgtatacagagaaacagacccatccccagaggagagggacaagaagccacaggaatcctga

SEQ ID NO: 92916 - DNA, 3840 bp, Artificial Sequence
  derived and/or modified sequence
cgcctcggagcccgccggggcagccgccggacaccaggaccgcgagccagacagctcccggaagccgcgccgccgccgccagccacagcacagccggacagaggaggtggattaggagttcccgggagggagcctgctcagcctttccctgacatttgggcaaatgtgtggggagatgcggagctcaaggcgtgctggtcaccatgacaacagagacaggccccgactctgaggtgaagaaagctcaggaggaggccccgcagcagcccgaggctgctgccgctgtgaccacccctgtgacccctgcaggccacggccacccagaggccaactccaatgagaagcatccatcccagcaggacacgcggcctgctgaacagagcctagacatggaggagaaggactacagtgaggccgatggcctttcggagaggaccacgcccagcaaggcccagaaatcgccccagaagattgccaagaaatacaagagtgccatctgccgggtcactctgcttgatgcctcggagtatgagtgtgaggtggagaaacatggccggggccaggtgctgtttgacctggtctgtgaacacctcaacctcctagagaaggactacttcggcctgaccttctgtgatgctgacagccagaagaactggctggacccctccaaggagatcaagaagcagatccggagtagcccctggaattttgccttcacagtcaagttctacccgcctgatcctgcccagctgacagaagacatcacaagatactacctgtgcctgcagctgcgggcagacatcatcacgggccggctgccatgctcctttgtcacgcatgccctactgggctcctacgctgtgcaggctgagctgggtgactatgatgctgaggagcatgtgggcaactatgtcagcgagctccgcttcgcccctaaccagacccgggagctggaggagaggatcatggagctgcataagacatatagggggatgaccccgggagaagcagaaatccacttcttagagaatgccaagaagctttccatgtacggagtagacctgcaccatgccaaggactctgagggcatcgacatcatgttaggcgtttgtgccaatggcctgctcatctaccgggaccggctgagaatcaaccgctttgcctggcccaagatcctcaagatctcctacaagaggagtaacttctatatcaagatccggcctggggagtatgagcaatttgagagcacaattggctttaagctcccaaaccaccggtcagccaagagactgtggaaggtctgcatcgagcatcatacattcttccggctggtgtcccctgagcccccacccaagggcttcctggtgatgggctccaagttccggtacagtgggaggacccaggcacagactcgccaggccagcgccctcattgaccggcctgcacccttctttgagcgttcttccagcaaacggtacaccatgtcccgcagccttgatggagcagagttctcccgcccagcctcggtcagcgagaaccatgatgcagggcctgacggtgacaagcgggatgaggatggcgagtctggggggcaacggtcagaggctgaggagggagaggtcaggactccaaccaagatcaaggagctaaagccggagcaggaaaccacgccgagacacaagcaggagttcttagacaagccagaagatgtcttgctgaagcaccaggccagcatcaatgagctcaaaaggaccctgaaggagcccaacagcaaactcatccaccgggatcgagactgggaacgggagcgcaggctgccctcctcccccgcctccccctcccccaagggcacccctgagaaagccaatgagagagcagggctgagggagggctccgaggagaaagtcaaaccaccacgtccccgggccccagagagtgacacaggcgatgaggaccaggaccaggagagggacacggtgttcctgaaggacaaccacctggccattgagcgcaagtgctccagcatcacggtcagctctacgtctagcctggaggctgaggtggacttcacggtcattggtgactaccatggcagcgccttcgaagacttctcccgcagcctgcctgagctcgaccgggacaaaagcgactcggacactgagggcctgctgttctcccgggatctcaacaagggggcccccagccaggatgatgagtctgggggcattgaggacagcccggatcgaggggcctgctccaccccggatatgccccagtttgagcccgtgaaaacagaaaccatgactgtcagcagtctggccattagaaagaagattgagccggaggccgtactgcagaccagagtctccgctatggataacacccaggttgatgggagtgcctcagtggggagggagttcatagcaaccactccctccatcaccacggagaccatatcgaccaccatggagaacagtctcaagtccgggaagggggcagctgccatgatcccaggcccacagacggtggccacggaaatccgttctctttctccgatcatcgggaaagatgtcctcaccagcacctacggcgccactgcggaaaccctctcaacctccaccaccacccatgtcaccaaaactgtgaaaggagggttttctgagacaaggatcgagaagcgaatcatcattactggggatgaagatgtcgatcaagaccaggccctggctttggccatcaaggaggccaaactgcagcatcctgatatgctggtaaccaaagctgtcgtatacagagaaacagacccatccccagaggagagggacaagaagccacaggaatcctgacctctgtgaagagatcctggcatttctggtccaacccaagccagagaaccattaagaaggggccttcattctggattctccgacgcaacactgacgtcccagctgcgacgtactgtcactgatgagagactgggaagggaaaagcatatatatatagatatatagagatatagatatatatacaggaaacaccgcatccttgcactgctgctggggctggcagagcagttggctgacagcaacaaccgacatctgaacacctacatttcctttgcagacaaattgaagaactggtgggatttttttcaagaaaaaaaattatataataactataatcccttgctcacccctttcccccgccaaataagaaacgcaagccagaccacgatgattgtagaagtccctcccgccctggttctgcacgttacagttagcagacgagcaattccatttgttcttctccagcatctctaaggcccacttgaatgcaaaggaaaacacttgcacagcaaagcaagagaagtcacagcagcaagacacgcacagtcaaccattttccgagaaaaaaagaaaattccccacttggaaagaaagaggaggaacactggattcttactttctggatcttgacactgggctgcaaaacctaccttcctctctcccgcctcccctcaccctcaactctcaatgtcttgctgtcattttctgtctcggctccctcctcccccttcccccttcccccaccccacacccttcaccctctgtgtcctggtccttctgagggccactgcagatgactctcctttgaaatgagaaaaagaaaagaaagcaagaacagaaaacgaagccacaggaagggaagtagacattgtatgcttatggtttctcattatgaaggtgcagcttgtaggaggtttgtacggatgtgctttgaagttatgtatattacatataacaggaaaaaatattaaaataaacagtgctggtaagtatg

SEQ ID NO: 92917 - protein, 701 aa, Artificial Sequence
  derived and/or modified sequence
MVFLGRINEVEPAKGLAESLAPTERSVKSLDMEEKDYSEADGLSERTTPSKAQKSPQKIAKKYKSAICRVTLLDASEYECEVEKHGRGQVLFDLVCEHLNLLEKDYFGLTFCDADSQKNWLDPSKEIKKQIRSSPWNFAFTVKFYPPDPAQLTEDITRYYLCLQLRADIITGRLPCSFVTHALLGSYAVQAELGDYDAEEHVGNYVSELRFAPNQTRELEERIMELHKTYRGMTPGEAEIHFLENAKKLSMYGVDLHHAKDSEGIDIMLGVCANGLLIYRDRLRINRFAWPKILKISYKRSNFYIKIRPGEYEQFESTIGFKLPNHRSAKRLWKVCIEHHTFFRLVSPEPPPKGFLVMGSKFRYSGRTQAQTRQASALIDRPAPFFERSSSKRYTMSRSLDGAEFSRPASVSENHDAGPDGDKRDEDGESGGQRSEAEEGEVRTPTKIKELKFLDKPEDVLLKHQASINELKRTLKEPNSKLIHRDRDWERERRLPSSPASPSPKGTPEKANEPVKTETMTVSSLAIRKKIEPEAVLQTRVSAMDNTQQVDGSASVGREFIATTPSITTETISTTMENSLKSGKGAAAMIPGPQTVATEIRSLSPIIGKDVLTSTYGATAETLSTSTTTHVTKTVKGGFSETRIEKRIIITGDEDVDQDQALALAIKEAKLQHPDMLVTKAVVYRETDPSPEERDKKPQES

SEQ ID NO: 92918 - protein, 119 aa, Artificial Sequence
  derived and/or modified sequence
  misc_feature (1)..(1): Xaa can be any naturally occurring amino acid
XSVGREFIATTPSITTETISTTMIIGKDVLTSTYGATAETLSTSTTTHVTKTVKGGFSETRIEKRIIITGDEDVDQDQALALAIKEAKLQHPDMLVTKAVVYRETDPSPEERDKKPQES

SEQ ID NO: 92919 - DNA, 600 bp, Artificial Sequence
  derived and/or modified sequence
atggaggaaaaagattatagtgaagctgatgggctatcagaacggacaacaccgagcaaggctcagaaatcaccacagaagatagctaagaagtataaatcagccatatgtcgtgtgacactgctggatgctagcgaatacgaatgcgaagttgaaaaacacgggcgcggacaggtactgtttgacctggtgtgtgagcacctgaacttactggagaaagactatttcggcttgacgttttgtgacgccgattcacagaagaactggttggacccatctaaagagataaagaagcagataaggtcctcaccctggaattttgctttcacagtgaagttctaccctccagaccccgctcagctaacagaggacatcactcgctattacctgtgtcttcagctgagagccgatatcataacagggagactgccctgtagtttcgtgacccatgcgctgctgggatcttacgccgtgcaggcagaactgggcgattatgacgccgaagaacacgtgggtaactatgtgagtgagctgcggttcgccccgaaccagaccagagaattagaggagagaattatggaactgcataaaacctactag

SEQ ID NO: 92920 - DNA, 2106 bp, Artificial Sequence
  derived and/or modified sequence
atggttttcctaggacgaattaatgaggtagagcccgccaaaggactagcggaatctcttgcccctactgaacgctctgttaaatccctcgacatggaagagaaagattactccgaggcagatggactgagtgagagaacaacaccttccaaggctcagaaatccccccagaaaatcgccaagaagtataaatccgcaatctgtcgggtgacactgctagacgcttccgagtacgagtgcgaagtggaaaagcacggtagaggtcaagtgctgttcgacctggtgtgtgaacacctgaatctgctagagaaggactacttcggcctgacgttttgcgatgccgactcacagaaaaattggctggatccatcaaaggagatcaagaaacagatcagaagcagtccctggaatttcgcttttactgtcaagttttatcctcccgaccccgcccagctcaccgaggatataacacgatattacctgtgtctacaattgcgggccgatattattacgggcagactgccttgcagctttgtcactcacgcactcttgggctcatacgccgtgcaggctgagctgggagactacgacgcagaggaacacgtcggcaattacgtttccgaactcagatttgcgccaaatcagaccagggaattggaggagaggatcatggaattacataagacctacagggggatgacacccggagaggctgagatccacttcctcgaaaacgccaagaaactttcaatgtacggggtcgacctgcatcatgctaaggacagcgaaggaatcgacattatgcttggtgtctgcgccaacggactcctgatctatagagatagactccgaatcaatcggttcgcatggcccaagatccttaagattagttacaagaggagtaacttttatattaaaattcggcccggcgagtatgaacagtttgagagcaccatcggctttaagctgcctaaccaccgttctgctaagcggctgtggaaggtgtgtatagaacatcacacgttctttagactggtgtcacctgaaccacctccgaagggctttctggtgatgggctcaaagttccgatacagcgggagaacccaggcacagacacgacaggcctctgcactcatagaccggcccgcccccttctttgagaggagttcttccaaacggtatacaatgagtcggtccctcgacggcgcagaattcagcagacctgcgtctgtatccgaaaaccacgacgccggaccagatggggataaaagagacgaagacggcgagtccggcggccagcgcagtgaggcggaagaaggggaggtgagaacacctacaaagattaaggagctgaagtttcttgacaagcccgaagatgtcctgttgaaacaccaggcctcaattaatgagctgaagcggactctcaaggagcccaattctaagctgattcacagagaccgagactgggaacgtgagagacggctccccagttctcccgccagccctagccccaaggggacccccgagaaggctaatgaacccgtgaagacggagacaatgaccgtgtcctcattggctatccgcaaaaaaatcgaacctgaggccgtgctgcagactcgggtaagcgccatggataatacccaacaggtggatgggtctgcttctgtcggacgggaatttatagccacgaccccatccatcactaccgaaaccattagcacgactatggagaactccctgaaaagcggaaagggcgcagctgccatgattcccggcccccagactgtcgcgactgagattcgctctctgtcccctatcattggcaaagacgtcctgacttctacttacggtgcaaccgccgaaacactctccaccagtacaaccacacatgtcacgaaaaccgtgaaaggcggcttttcagagactagaattgaaaagaggattatcatcacgggcgacgaggacgtggatcaggatcaggcacttgccctggccatcaaggaggcaaagttgcagcatccagatatgctcgttactaaagctgtggtttaccgtgagactgatccatctcccgaggagagggacaagaagccacaggagtcatag

SEQ ID NO: 92921 - DNA, 600 bp, Artificial Sequence
  derived and/or modified sequence
atggaggaaaaggattactctgaagcagacggactgtccgagcgtactactccctctaaagcccagaagtctcctcagaaaatcgctaagaagtataaatccgctatatgtagagtgactctgctggatgcctcagagtacgagtgtgaagtggaaaagcatggtcgcggccaggtcctgttcgacctcgtgtgcgaacacctcaacttgctcgagaaggattattttgggctgaccttttgtgacgctgattcacagaagaactggctggaccccagtaaggagatcaagaagcagatacgatcgagtccctggaattttgcttttaccgttaaattctaccctcccgacccggcccagctcacagaggacatcacacgatactacctttgcctccaactgcgtgccgatatcattaccgggcgtttgccttgttcattcgtcacacatgctcttctgggatcctacgcagtccaggccgaactgggcgactatgatgccgaggagcacgtcggaaactatgtctcagagctacgcttcgctcctaaccagacaagagagctagaagaacggataatggagcttcataagacctattag

SEQ ID NO: 92922 - DNA, 774 bp, Artificial Sequence
  derived and/or modified sequence
atggaagaaaaagactacagcgaggcagacggcttgtccgagaggactacccccagtaaggcacaaaaatcgcctcaaaaaatagcaaagaagtataaatctgcaatctgccgggtgacccttctcgatgctagcgagtacgagtgtgaggttgagaagcacggaagggggcaggttctgtttgacctagtctgcgagcacttaaacctcctggagaaagattacttcgggttgactttctgtgatgccgatagtcagaaaaactggttggatccttccaaagagatcaagaagcagatccgaagctctccctggaatttcgcatttacagtgaagttttacccacctgaccccgcccagcttacagaggatattacccggtattacctttgcctccagttgagggctgatatcatcactggccggctgccatgcagtttcgtgacccacgccctactaggatcttacgcagtccaggctgaattgggtgattacgacgccgaagagcacgtgggcaactatgtgagcgaactaaggttcgcacccaaccagacgcgggaattggaagagcgcatcatggaactgcataaaacctaccgaggaatgacccccggggaggctgaaatccacttccttgaaaatgctaaaaagttgtctatgtacggggtagacctccaccacgccaaggacagcgaaggcatcgatatcatgctaggtgtctgtgcgaacggactgctaatctacagggatcggctgcgaataaacagattctag

SEQ ID NO: 92923 - DNA, 360 bp, Artificial Sequence
  derived and/or modified sequence
taaagcgtggggagagaatttattgccacgactcctagtataaccacagagacaatttccaccaccatgattattggcaaggacgtcctgacctctacctacggtgcgacagcagagaccctgagtacatcaaccacaactcatgtcaccaagactgtcaagggcggtttttctgaaacgcgcatagagaagcgcataatcatcacgggagacgaggatgtcgaccaggaccaggccctggcactggctattaaggaagctaaactgcagcatcctgacatgctggtgactaaggcagtggtctaccgcgagacggacccgtcccccgaggagcgcgacaaaaaaccccaggagtcttag

SEQ ID NO: 92924 - DNA, 600 bp, Artificial Sequence
  derived and/or modified sequence
atggaggagaaggactacagcgaggctgatggcctgtctgagaggaccacccccagcaaggcccagaagagcccccagaagatcgccaagaagtacaagagcgccatctgccgggtgaccctgctggatgcctctgaatatgaatgtgaggtggagaagcacggccggggccaggtgctgtttgacctggtgtgtgagcacctgaacctgctggagaaggactacttcggcctgaccttctgtgatgctgacagccagaagaactggctggaccccagcaaggagatcaagaagcagatccgcagcagcccctggaactttgccttcaccgtgaagttctaccccccagaccctgcccagctgacagaggacatcacccgctactacctgtgcctgcagctgcgggctgacatcatcaccggccgcctgccctgcagctttgtgacccacgccctgctgggcagctatgctgtgcaggccgagctgggggactatgatgctgaggagcacgtgggcaactacgtgtctgagctgcgctttgcccccaaccagacccgggagctggaggagcgcatcatggagctgcacaagacctactag

SEQ ID NO: 92925 - DNA, 2106 bp, Artificial Sequence
  derived and/or modified sequence
atggtgttcctgggccgcatcaatgaggtggagcccgccaagggcctggccgagagcctggcccccacagagaggtctgtgaagagcctggacatggaggagaaggactacagcgaggctgatggcctgtctgagaggaccacccccagcaaggcccagaagagcccccagaagatcgccaagaagtacaagagcgccatctgccgggtgaccctgctggatgcctctgaatatgaatgtgaggtggagaagcacggccggggccaggtgctgtttgacctggtgtgtgagcacctgaacctgctggagaaggactacttcggcctgaccttctgtgatgctgacagccagaagaactggctggaccccagcaaggagatcaagaagcagatccgcagcagcccctggaactttgccttcaccgtgaagttctaccccccagaccctgcccagctgacagaggacatcacccgctactacctgtgcctgcagctgcgggctgacatcatcaccggccgcctgccctgcagctttgtgacccacgccctgctgggcagctatgctgtgcaggccgagctgggggactatgatgctgaggagcacgtgggcaactacgtgtctgagctgcgctttgcccccaaccagacccgggagctggaggagcgcatcatggagctgcacaagacctaccggggcatgaccccaggagaggccgagatccacttcctggagaatgccaagaagctgtccatgtatggagtggacctgcaccacgccaaggacagcgagggcatcgacatcatgctgggcgtgtgtgccaacggcctgctgatctacagagaccggctgcgcatcaacagatttgcctggcccaagatcctgaagatctcctacaagaggagcaacttctacatcaagatccggcctggagaatatgagcagtttgagagcaccatcggcttcaagctgcccaaccacaggtctgccaagaggctgtggaaggtgtgcatcgagcaccacaccttcttccggctggtgtccccagagcccccacccaagggcttcctggtgatgggcagcaagttccgctacagcggccgcacccaggcccagacccggcaggccagcgccctgattgacaggcctgcccccttctttgagaggagcagcagcaagcgctacaccatgagccgcagcctggatggagctgagttcagcaggcctgcctctgtgtctgaaaatcatgatgctggcccagatggagacaagagagatgaagatggagagagcggcggccagaggtctgaggccgaggagggggaggtgaggacccccaccaagatcaaggagctgaagttcctggacaagccagaagatgtgctgctgaagcaccaggccagcatcaatgagctgaagaggaccctgaaggagcccaacagcaagctgatccaccgggaccgggactgggagcgggagcggcggctgcccagcagccctgccagccccagccccaagggcaccccagagaaggccaatgaacctgtgaagacagagaccatgacagtgagcagcctggccatcaggaagaagattgagcctgaggccgtgctgcagaccagggtgtctgccatggacaacacccagcaggtggatggcagcgcctctgtgggccgggagttcatcgccaccacccccagcatcaccacagagaccatcagcaccaccatggagaacagcctgaagagcgggaaaggagctgctgccatgatccctggcccccagacagtggccacagagatccgcagcctgagccccatcatcggcaaggatgtgctgaccagcacctacggggccacagctgagaccctgagcaccagcaccaccacccacgtgaccaagacagtgaagggcggcttcagcgagacccgcatcgagaagaggatcatcatcactggagatgaagatgtggaccaggaccaggccctggccctggccatcaaggaggccaagctgcagcacccagacatgctggtgaccaaggctgtggtgtaccgggagacagaccccagccctgaggagcgggacaagaagccccaggagagctag

SEQ ID NO: 92926 - DNA, 774 bp, Artificial Sequence
  derived and/or modified sequence
atggaggagaaggactacagcgaggctgatggcctgtctgagaggaccacccccagcaaggcccagaagagcccccagaagatcgccaagaagtacaagagcgccatctgccgggtgaccctgctggatgcctctgaatatgaatgtgaggtggagaagcacggccggggccaggtgctgtttgacctggtgtgtgagcacctgaacctgctggagaaggactacttcggcctgaccttctgtgatgctgacagccagaagaactggctggaccccagcaaggagatcaagaagcagatccgcagcagcccctggaactttgccttcaccgtgaagttctaccccccagaccctgcccagctgacagaggacatcacccgctactacctgtgcctgcagctgcgggctgacatcatcaccggccgcctgccctgcagctttgtgacccacgccctgctgggcagctatgctgtgcaggccgagctgggggactatgatgctgaggagcacgtgggcaactacgtgtctgagctgcgctttgcccccaaccagacccgggagctggaggagcgcatcatggagctgcacaagacctaccggggcatgaccccaggagaggccgagatccacttcctggagaatgccaagaagctgtccatgtatggagtggacctgcaccacgccaaggacagcgagggcatcgacatcatgctgggcgtgtgtgccaacggcctgctgatctacagagaccggctgcgcatcaaccgcttctag

SEQ ID NO: 92927 - DNA, 360 bp, Artificial Sequence
  derived and/or modified sequence
tgaagcgtgggccgggagttcatcgccaccacccccagcatcaccacagagaccatcagcaccaccatgatcatcggcaaggatgtgctgaccagcacctacggggccacagctgagaccctgagcaccagcaccaccacccacgtgaccaagacagtgaagggcggcttcagcgagacccgcatcgagaagaggatcatcatcactggagatgaagatgtggaccaggaccaggccctggccctggccatcaaggaggccaagctgcagcacccagacatgctggtgaccaaggctgtggtgtaccgggagacagaccccagccctgaggagcgggacaagaagccccaggagagctag

SEQ ID NO: 92928 - DNA, 600 bp, Artificial Sequence
  derived and/or modified sequence
atggaggagaaggactacagcgaggccgacggcctgagcgagcggacaaccccttcaaaagcacagaaatctcctcagaaaatagctaagaaatataagagcgccatctgtagggtgacactcctggacgcgtcagagtacgagtgtgaggtagaaaagcatgggagagggcaggtgctgtttgaccttgtgtgcgagcatttgaatctcctggagaaagattattttggccttactttctgcgacgcagattctcagaaaaattggctggatccgtccaaggaaatcaagaagcaaatccggagctccccctggaacttcgcattcaccgtcaagttttatcctcctgaccctgctcagttaaccgaggatatcaccagatactatctgtgcctgcagttacgagctgatatcatcacagggcggctgccatgttcttttgtgactcatgccttactggggagctacgccgtgcaggccgagctgggggactatgatgcggaagagcacgttggtaactatgtgagcgagctccggtttgcgcctaatcagacacgcgagcttgaggaaagaatcatggaactacacaagacctattag

SEQ ID NO: 92929 - DNA, 2106 bp, Artificial Sequence
  derived and/or modified sequence
atggtgttcctgggccggatcaacgaggtggagcccgccaagggcttagcagaatcactggctcctactgagcggagcgtgaagagtcttgatatggaagaaaaggattatagtgaagctgatggcctgagtgaacggaccactccaagcaaggcgcaaaaaagtccccagaagatcgccaagaagtataagtccgctatttgtagagtgacactgttagatgcatctgagtatgaatgtgaggtggagaagcatggccgtggtcaagtccttttcgatctcgtgtgcgaacacctcaatctgctggagaaggactattttggactgacattctgcgatgccgattcacagaagaactggttggatccttcaaaggagatcaagaagcagataagaagctctccttggaatttcgcatttactgtgaaattctatccaccagacccggcacaactcacggaggacatcaccaggtactacctgtgcctccagcttcgcgcagacattatcaccggtcgactcccttgttctttcgttacccatgccctcctagggtcctacgctgtgcaggcggagcttggagactatgacgccgaagaacacgtgggtaactacgtgtcagagttgcgttttgcacctaaccagacacgtgagctcgaagagcgaataatggagctacacaagacttacaggggaatgacaccaggagaagcagaaattcatttcttagaaaatgctaaaaagttgtctatgtatggggttgatctgcatcatgctaaagattcggaaggcatcgatattatgctaggcgtgtgcgccaacggtctactcatttatcgggacagactgcgtattaatcgcttcgcatggcctaagatccttaagattagttataagagaagtaacttctatataaagattaggcctggcgagtacgagcaattcgagtcaaccatcggcttcaaactgccgaatcaccggagcgccaagaggctgtggaaagtgtgcattgagcatcacacgttcttcaggctggtgtctccagaacccccacctaagggttttcttgtgatggggtctaaattccgatattcaggtaggactcaggctcagacacgacaggccagcgccctgattgatcgacctgctcctttcttcgagagaagtagctccaagcggtataccatgagtaggagtctggacggagccgagttttcccgccctgcgtccgtatccgagaaccatgacgctggcccagacggggataaacgtgacgaggacggcgagtctggagggcaaagatctgaagctgaggaaggagaggtgaggactccaactaaaatcaaagaactcaaattcctagacaaacctgaggacgttctgttgaaacatcaagcctccatcaatgaattaaaacgcacacttaaggagccaaactccaaactgatacaccgagaccgggattgggagagagagcgtcggttaccctcttcccctgcgagcccaagcccgaaggggacccccgaaaaagccaacgagcccgtgaaaaccgagaccatgactgttagttccctggctattcgaaagaagatagagcctgaggccgtgcttcagactcgggtttccgcgatggacaatacccagcaagtggacggatctgcatcagtcggcagagaattcatagccaccaccccgtccatcacaacggagactataagcacaacaatggagaattccctgaaaagcgggaagggcgccgcagccatgatccctggaccacaaaccgtggccacagagatccggagtcttagtcccataattggaaaggatgtgcttacatccacctacggtgcaaccgcggagacactgagtacaagcacgacgacccatgtgactaagactgtcaaggggggtttctccgaaactcggatcgagaaaagaatcatcattactggagacgaggacgtcgatcaagaccaagcattggccctagcaataaaggaagctaaactgcaacaccccgacatgttagtgaccaaagccgttgtgtatagggaaacagatcctagccccgaagaacgggataagaaaccacaagaatcatag

SEQ ID NO: 92930 - DNA, 600 bp, Artificial Sequence
  derived and/or modified sequence
atggaggagaaggactacagcgaggccgacggcctgagcgagcggactaccccctcaaaggcccagaaatccccacagaaaatcgcaaagaaatataagagtgccatatgccgtgttacccttctcgacgcgagcgagtacgaatgtgaggtagagaaacatgggcggggacaagttctgtttgatctcgtgtgtgagcacctaaatcttcttgaaaaggattatttcggcctaactttttgcgatgcagattcccagaagaattggttagatccctccaaggagatcaagaagcagattcgctcatctccctggaactttgctttcacggttaagttttatcctccggatcccgctcaactgacagaagatattaccagatactacctgtgtctgcagctccgggccgatattattactggtcgtctgccttgcagctttgtgacacatgcgctcctgggaagctacgctgttcaagctgagcttggggactatgacgcagaagagcacgtggggaattacgtatccgagctcagattcgcccctaaccagactcgggagttggaggaaagaattatggaactgcataagacgtattag

SEQ ID NO: 92931 - DNA, 774 bp, Artificial Sequence
  derived and/or modified sequence
atggaggagaaggactacagcgaggccgacggcctgagcgagcggaccaccccctctaaagcacagaaatccccgcagaaaattgctaaaaagtataaatccgctatttgccgcgtcacacttcttgatgcctccgagtacgaatgcgaggtggaaaaacatgggagaggacaggtcttgtttgacttagtgtgcgaacacctgaatctgttggagaaggattacttcggcctgactttctgcgacgccgatagtcaaaagaattggcttgacccatccaaggaaattaaaaagcagattaggtcctcgccatggaactttgctttcacggtaaagttttatccccccgatcccgcacagctgaccgaagatatcacaagatattacctttgcctgcaactccgagctgatatcattacgggtcgactgccatgttcatttgttacccacgcgttactgggctcatatgcagtccaggcagagttgggcgactacgacgctgaagagcatgtgggaaattacgtatccgagttgcgctttgcgcccaatcagacccgcgaacttgaggagcggattatggaactccataagacctacagaggaatgacaccaggtgaggcagagatccacttcctcgaaaacgccaagaagttgtctatgtacggagtcgatctgcaccacgcgaaggattcggaagggattgatattatgcttggggtgtgcgccaatgggttgctcatctatcgcgaccgactcaggataaataggttctag

SEQ ID NO: 92932 - DNA, 360 bp, Artificial Sequence
  derived and/or modified sequence
tgaagcgtgggccgggagttcatcgccaccacccccagcatcaccactgaaacgatctcaacaactatgatcatcggtaaggacgtactgacgagcacatatggcgcaacagcggagacgctctctacctctaccactacacatgtgactaagaccgtcaaggggggctttagcgagacacgaatcgaaaaacgaataatcataaccggggacgaggatgtagatcaagaccaggcattagcacttgcaattaaggaggccaaattacaacatcctgacatgctggtgactaaggccgttgtttatcgcgaaactgatcccagtccagaagaacgcgataaaaagccacaggagtcttag

SEQ ID NO: 92933 - DNA, 600 bp, Artificial Sequence
  derived and/or modified sequence
atggaggagaaggactactccgaagccgatgggctgagcgagaggaccacgccaagcaaggcccaaaagagccctcaaaaaattgcgaaaaagtacaagtcggcaatctgccgagtgacgctactggatgcatctgagtacgaatgtgaagtagagaaacatggacgtggacaggtcctatttgacctagtctgtgaacatttgaacctgctcgaaaaggactattttggtctcactttttgcgacgccgactcccagaaaaactggctggatccttctaaggaaattaagaagcagattcggtcttctccatggaatttcgcattcacagtaaagttttacccccctgatccagctcagttgaccgaggatattacccgttactacctgtgccttcaattgcgagccgatataatcacaggcagactgccctgtagtttcgtcacccatgccctgttgggctcctatgccgtgcaggcagagctgggggactacgatgccgaggagcacgtggggaactacgtcagcgaattaaggtttgcacccaatcagacacgggagcttgaggagcgaataatggagctccataagacatattag

SEQ ID NO: 92934 - DNA, 2106 bp, Artificial Sequence
  derived and/or modified sequence
atggtttttttaggaagaattaacgaggtggagcctgccaagggactcgcggaatccctggcaccaactgagaggtccgttaagtcgctcgacatggaggaaaaggattactccgaggccgacggactttccgaacggacaactcctagcaaagcccaaaaatctcctcaaaagattgccaagaaatacaaatcagctatctgtagagtaactctcctggatgcaagtgagtatgaatgtgaagtggagaagcacggtcggggacaggtgctgtttgatctggtttgcgaacacttaaacctgttagaaaaggactacttcggattaacattctgtgatgcggactcccagaagaattggctggatccctccaaagaaattaaaaagcagatccgctctagtccatggaacttcgctttcacagtaaagttttaccctccagatccagcccagttgactgaggatatcacacgctactacttgtgcctgcagctgcgcgctgacattattaccggcagactcccttgtagcttcgtgacccacgccctgctcggcagctatgccgtccaagcagaactaggcgactatgatgcggaggagcacgtgggaaattatgtgtctgaactcagattcgcccctaaccagacccgcgagctggaagaacgcattatggagctgcataaaacctaccggggtatgacccctggagaagcagagattcatttccttgagaatgctaagaagctgtccatgtatggtgtcgacctccaccacgccaaagatagtgagggaatcgacatcatgttgggggtgtgcgctaacgggctcctcatttatcgggaccgactgcggataaatcgattcgcttggcctaaaatcttgaaaatctcctataagcggagtaacttctacatcaagattaggccgggtgagtatgagcagttcgagtctactatcggcttcaagctgcccaaccacagatccgcgaagaggttatggaaagtgtgcatcgaacatcacacgttttttaggctggtatcccccgaacccccaccaaagggttttcttgtgatgggcagcaagtttaggtatagcggtcgaacccaagcccagacgcgccaggcctccgctctgattgaccgacccgcaccttttttcgaacgctcctcctcaaagaggtatacaatgagccgtagcctagacggggctgaattttcacgccctgccagtgtgagtgagaaccacgacgcaggccctgatggggacaagcgggacgaggacggcgaatccggcggacagcgttccgaggctgaggagggcgaggtccggaccccaaccaagatcaaggaactgaaatttttggacaagccggaggacgtgctgcttaaacaccaagctagtattaatgaactcaagcgcaccctgaaggagcccaacagtaaacttattcatcgggaccgtgactgggaacgtgagaggcggctaccatccagcccagcctccccatctccaaaaggcacccccgaaaaggctaacgagcctgtcaaaactgaaactatgaccgtatcctctctggcaattcggaagaaaatagaaccagaggcggtactacagactagggttagcgcaatggacaacactcaacaggtggacggcagcgcaagcgttgggcgagaatttatcgcaactaccccgagtatcacgacagagaccatctctactaccatggaaaattcactgaaatccgggaagggagccgctgcaatgatccccggaccacagaccgtcgctactgaaatacgctcgctgtcccctatcatcggtaaagacgtgttgacaagcacttatggtgccacggctgaaacattgtctaccagcaccaccacccacgtaaccaagacagttaaggggggattcagcgaaacccgtattgaaaagaggatcatcatcacaggggacgaggatgtagaccaggaccaggctctggctctggctatcaaagaagccaagctgcagcatccggatatgctcgttaccaaggctgtggtctaccgggagaccgacccatctcctgaagagcgggataaaaaacctcaggagtcgtag

SEQ ID NO: 92935 - DNA, 600 bp, Artificial Sequence
  derived and/or modified sequence
atggaggagaaggactacagtgaggccgatggactctccgagcggaccacaccctccaaagcccagaaatctccccagaagatagctaagaaatataaatctgcaatttgtcgcgtcactctgctcgatgcatctgaatacgaatgtgaagtcgagaagcatggacgcggacaggttctgtttgaccttgtttgtgagcacctgaacctgctggagaaagactatttcggactgaccttttgcgacgcagatagccagaaaaactggttagatccgtccaaagagattaagaaacagataagatcctctccatggaatttcgcatttaccgtcaagttctacccccctgatcccgctcagctgacagaggacatcactcggtattacctttgtcttcaattgcgggctgatatcatcacggggcgactgccttgttcgttcgttactcacgcactgctgggcagttacgccgtgcaggccgagttgggcgactacgacgccgaagaacacgtcggaaattacgtgtccgagttgagattcgctccgaatcagaccagggagctagaggagcgcatcatggagttgcataagacatactag

SEQ ID NO: 92936 - DNA, 774 bp, Artificial Sequence
  derived and/or modified sequence
atggaagagaaagattatagcgaagccgatgggctatccgagaggacaacgccgtcaaaagcccaaaaatctcctcaaaagattgctaagaaatacaagtccgcaatctgccgggttacgctcctcgatgcgtccgaatatgaatgcgaagttgaaaagcatgggaggggtcaagtgctcttcgatcttgtgtgcgagcatcttaacctgctcgagaaagactacttcggccttacattctgcgatgccgattcccagaagaattggttggacccgtccaaggagataaaaaaacagatccgcagcagcccttggaactttgctttcacggtgaaattttacccccctgatccagcccagctcactgaggatattaccagatactacctgtgtctccagctcagggctgatatcattacgggacgcctgccctgttcatttgtgactcacgccctgcttggctcctatgctgtgcaagctgagttgggcgattacgacgcagaggagcatgtaggcaactacgtgagtgagctccggtttgcccctaaccagacaagagagctagaggagaggatcatggaattacacaagacatatcggggaatgactcctggagaggccgagattcattttctggaaaacgctaaaaagctgagtatgtatggtgtggacctgcaccacgccaaagacagcgagggaatagacattatgcttggtgtgtgcgccaatggcttactgatctatcgcgaccgactgcgaatcaatcggttttag

SEQ ID NO: 92937 - DNA, 360 bp, Artificial Sequence
  derived and/or modified sequence
taatcggtgggacgcgaattcatcgccactaccccttctattactacagaaactattagcaccaccatgatcataggaaaggatgtgcttactagtacttacggggctactgcagagaccctatctacatctaccacaacccacgtcacgaagacagttaagggcggattttcagagactcgaatcgaaaagcgcatcatcatcactggagacgaggacgtcgatcaggatcaagccctcgcattggccatcaaagaagcaaaactgcagcacccagacatgctggtgacaaaagccgtggtttacagagaaaccgatcctagccctgaggagagagacaagaaacctcaagaatcctag

SEQ ID NO: 92938 - DNA, 600 bp, Artificial Sequence
  derived and/or modified sequence
atggaggagaaggactacagcgaggccgacggcctgagcgagagaaccacccccagcaaggcccagaagagcccccagaagatcgccaagaagtacaagagcgccatctgcagagtgaccctgctggacgccagcgagtacgagtgcgaggtggagaagcacggcagaggccaggtgctgttcgacctggtgtgcgagcacctgaacctgctggagaaggactacttcggcctgaccttctgcgacgccgacagccagaagaactggctggaccccagcaaggagatcaagaagcagatcagaagcagcccctggaacttcgccttcaccgtgaagttctacccccccgaccccgcccagctgaccgaggacatcaccagatactacctgtgcctgcagctgagagccgacatcatcaccggcagactgccctgcagcttcgtgacccacgccctgctgggcagctacgccgtgcaggccgagctgggcgactacgacgccgaggagcacgtgggcaactacgtgagcgagctgagattcgcccccaaccagaccagagagctggaggagagaatcatggagctgcacaagacctactag

SEQ ID NO: 92939 - DNA, 2106 bp, Artificial Sequence
  derived and/or modified sequence
atggtgttcctgggcagaatcaacgaggtggagcccgccaagggcctggccgagagcctggcccccaccgagagaagcgtgaagagcctggacatggaggagaaggactacagcgaggccgacggcctgagcgagagaaccacccccagcaaggcccagaagagcccccagaagatcgccaagaagtacaagagcgccatctgcagagtgaccctgctggacgccagcgagtacgagtgcgaggtggagaagcacggcagaggccaggtgctgttcgacctggtgtgcgagcacctgaacctgctggagaaggactacttcggcctgaccttctgcgacgccgacagccagaagaactggctggaccccagcaaggagatcaagaagcagatcagaagcagcccctggaacttcgccttcaccgtgaagttctacccccccgaccccgcccagctgaccgaggacatcaccagatactacctgtgcctgcagctgagagccgacatcatcaccggcagactgccctgcagcttcgtgacccacgccctgctgggcagctacgccgtgcaggccgagctgggcgactacgacgccgaggagcacgtgggcaactacgtgagcgagctgagattcgcccccaaccagaccagagagctggaggagagaatcatggagctgcacaagacctacagaggcatgacccccggcgaggccgagatccacttcctggagaacgccaagaagctgagcatgtacggcgtggacctgcaccacgccaaggacagcgagggcatcgacatcatgctgggcgtgtgcgccaacggcctgctgatctacagagacagactgagaatcaacagattcgcctggcccaagatcctgaagatcagctacaagagaagcaacttctacatcaagatcagacccggcgagtacgagcagttcgagagcaccatcggcttcaagctgcccaaccacagaagcgccaagagactgtggaaggtgtgcatcgagcaccacaccttcttcagactggtgagccccgagcccccccccaagggcttcctggtgatgggcagcaagttcagatacagcggcagaacccaggcccagaccagacaggccagcgccctgatcgacagacccgcccccttcttcgagagaagcagcagcaagagatacaccatgagcagaagcctggacggcgccgagttcagcagacccgccagcgtgagcgagaaccacgacgccggccccgacggcgacaagagagacgaggacggcgagagcggcggccagagaagcgaggccgaggagggcgaggtgagaacccccaccaagatcaaggagctgaagttcctggacaagcccgaggacgtgctgctgaagcaccaggccagcatcaacgagctgaagagaaccctgaaggagcccaacagcaagctgatccacagagacagagactgggagagagagagaagactgcccagcagccccgccagccccagccccaagggcacccccgagaaggccaacgagcccgtgaagaccgagaccatgaccgtgagcagcctggccatcagaaagaagatcgagcccgaggccgtgctgcagaccagagtgagcgccatggacaacacccagcaggtggacggcagcgccagcgtgggcagagagttcatcgccaccacccccagcatcaccaccgagaccatcagcaccaccatggagaacagcctgaagagcggcaagggcgccgccgccatgatccccggcccccagaccgtggccaccgagatcagaagcctgagccccatcatcggcaaggacgtgctgaccagcacctacggcgccaccgccgagaccctgagcaccagcaccaccacccacgtgaccaagaccgtgaagggcggcttcagcgagaccagaatcgagaagagaatcatcatcaccggcgacgaggacgtggaccaggaccaggccctggccctggccatcaaggaggccaagctgcagcaccccgacatgctggtgaccaaggccgtggtgtacagagagaccgaccccagccccgaggagagagacaagaagccccaggagagctag

SEQ ID NO: 92940 - DNA, 774 bp, Artificial Sequence
  derived and/or modified sequence
atggaggagaaggactacagcgaggccgacggcctgagcgagagaaccacccccagcaaggcccagaagagcccccagaagatcgccaagaagtacaagagcgccatctgcagagtgaccctgctggacgccagcgagtacgagtgcgaggtggagaagcacggcagaggccaggtgctgttcgacctggtgtgcgagcacctgaacctgctggagaaggactacttcggcctgaccttctgcgacgccgacagccagaagaactggctggaccccagcaaggagatcaagaagcagatcagaagcagcccctggaacttcgccttcaccgtgaagttctacccccccgaccccgcccagctgaccgaggacatcaccagatactacctgtgcctgcagctgagagccgacatcatcaccggcagactgccctgcagcttcgtgacccacgccctgctgggcagctacgccgtgcaggccgagctgggcgactacgacgccgaggagcacgtgggcaactacgtgagcgagctgagattcgcccccaaccagaccagagagctggaggagagaatcatggagctgcacaagacctacagaggcatgacccccggcgaggccgagatccacttcctggagaacgccaagaagctgagcatgtacggcgtggacctgcaccacgccaaggacagcgagggcatcgacatcatgctgggcgtgtgcgccaacggcctgctgatctacagagacagactgagaatcaacagattctag

SEQ ID NO: 92941 - DNA, 360 bp, Artificial Sequence
  derived and/or modified sequence
tgaagcgtgggcagagagttcatcgccaccacccccagcatcaccaccgagaccatcagcaccaccatgatcatcggcaaggacgtgctgaccagcacctacggcgccaccgccgagaccctgagcaccagcaccaccacccacgtgaccaagaccgtgaagggcggcttcagcgagaccagaatcgagaagagaatcatcatcaccggcgacgaggacgtggaccaggaccaggccctggccctggccatcaaggaggccaagctgcagcaccccgacatgctggtgaccaaggccgtggtgtacagagagaccgaccccagccccgaggagagagacaagaagccccaggagagctag

SEQ ID NO: 92942 - DNA, 5565 bp, Artificial Sequence
  derived and/or modified sequence
atggttttcttggggaggatcaatgaggtagaacctgcaaagggcttagcagagagcctagcacctactgagcgctcagtaaagagcctagacatggaggagaaggactacagtgaggccgatggcctttcggagaggaccacgcccagcaaggcccagaaatcgccccagaagattgccaagaaatacaagagtgccatctgccgggtcactctgcttgatgcctcggagtatgagtgtgaggtggagaaacatggccggggccaggtgctgtttgacctggtctgtgaacacctcaacctcctagagaaggactacttcggcctgaccttctgtgatgctgacagccagaagaactggctggacccctccaaggagatcaagaagcagatccggagtagcccctggaattttgccttcacagtcaagttctacccgcctgatcctgcccagctgacagaagacatcacaagatactacctgtgcctgcagctgcgggcagacatcatcacgggccggctgccatgctcctttgtcacgcatgccctactgggctcctacgctgtgcaggctgagctgggtgactatgatgctgaggagcatgtgggcaactatgtcagcgagctccgcttcgcccctaaccagacccgggagctggaggagaggatcatggagctgcataagacatatagggggatgaccccgggagaagcagaaatccacttcttagagaatgccaagaagctttccatgtacggagtagacctgcaccatgccaaggactctgagggcatcgacatcatgttaggcgtttgtgccaatggcctgctcatctaccgggaccggctgagaatcaaccgctttgcctggcccaagatcctcaagatctcctacaagaggagtaacttctatatcaagatccggcctggggagtatgagcaatttgagagcacaattggctttaagctcccaaaccaccggtcagccaagagactgtggaaggtctgcatcgagcatcatacattcttccggctggtgtcccctgagcccccacccaagggcttcctggtgatgggctccaagttccggtacagtgggaggacccaggcacagactcgccaggccagcgccctcattgaccggcctgcacccttctttgagcgttcttccagcaaacggtacaccatgtcccgcagccttgatggagcagagttctcccgcccagcctcggtcagcgagaaccatgatgcagggcctgacggtgacaagcgggatgaggatggcgagtctggggggcaacggtcagaggctgaggagggagaggtcaggactccaaccaagatcaaggagctaaagttcttagacaagccagaagatgtcttgctgaagcaccaggccagcatcaatgagctcaaaaggaccctgaaggagcccaacagcaaactcatccaccgggatcgagactgggaacgggagcgcaggctgccctcctcccccgcctccccctcccccaagggcacccctgagaaagccaatgagcccgtgaaaacagaaaccatgactgtcagcagtctggccattagaaagaagattgagccggaggccgtactgcagaccagagtctccgctatggataacacccagcaggttgatgggagtgcctcagtggggagggagttcatagcaaccactccctccatcaccacggagaccatatcgaccaccatggagaacagtctcaagtccgggaagggggcagctgccatgatcccaggcccacagacggtggccacggaaatccgttctctttctccgatcatcgggaaagatgtcctcaccagcacctacggcgccactgcggaaaccctctcaacctccaccaccacccatgtcaccaaaactgtgaaaggagggttttctgagacaaggatcgagaagcgaatcatcattactggggatgaagatgtcgatcaagaccaggccctggctttggccatcaaggaggccaaactgcagcatcctgatatgctggtaaccaaagctgtcgtatacagagaaacagacccatccccagaggagagggacaagaagccacaggaatcctgacctctgtgaagagatcctggcatttctggtccaacccaagccagagaaccattaagaaggggccttcattctggattctccgacgcaacactgacgtcccagctgcgacgtactgtcactgatgagagactgggaagggaaaagcatatatatatagatatatagagatatagatatatatacaggaaacaccgcatccttgcactgctgctggggctggcagagcagttggctgacagcaacaaccgacatctgaacacctacatttcctttgcagacaaattgaagaactggtgggatttttttcaagaaaaaaaattatataataactataatcccttgctcacccctttcccccgccaaataagaaacgcaagccagaccacgatgattgtagaagtccctcccgccctggttctgcacgttacagttagcagacgagcaattccatttgttcttctccagcatctctaaggcccacttgaatgcaaaggaaaacacttgcacagcaaagcaagagaagtcacagcagcaagacacgcacagtcaaccattttccgagaaaaaaagaaaattccccacttggaaagaaagaggaggaacactggattcttactttctggatcttgacactgggctgcaaaacctaccttcctctctcccgcctcccctcaccctcaactctcaatgtcttgctgtcattttctgtctcggctccctcctcccccttcccccttcccccaccccacacccttcaccctctgtgtcctggtccttctgagggccactgcagatgactctcctttgaaatgagaaaaagaaaagaaagcaagaacagaaaacgaagccacaggaagggaagtagacattgtatgcttatggtttctcattatgaaggtgcagcttgtaggaggtttgtacggatgtgctttgaagttatgtatattacatataacaggaaaaaatattaaaataaacagtgctggtaagtatgaagctgacattctaaaattataattatctgactgtgattgatgtatcctgaggttcctagatctcactgaactggcccagctaaggagacctggactctgggtgtgggttggctcacagtaggggctgacgggttcagtgtagtaatactgtgtgtggtgtttgtaattggttgattggtggggaggggtggggggccctaatggagaggtgtgggtttggcaagaaagaagcaacacagatgtcgtccccaaaatgccagttcaagacaccttctccctgcccccctggtagtaacagtcagggcctggtctgtgctcaggtactgggtcccagtctgggactctgctgctgaagttgccacagtagaggtccctggcttagtccttatctccctacggggcttgccttggttttcagtcttctctctctttctctcttttttttttttttgccacattctgcccttccctgaccccattgtaataaccaactccatatccaaagggaggtggtgctctcagccattgtagaagatggtggctttaacctgactgtctaaaaattcccagctaagccttttcctctactctcttccttgttctgaatcatttcttcttctcaggccaaagtagccatggtaaggaggcttcatggggcagaccctgaaagatcaaaactgcatttgcaaagccctcccctgtcccaggacaaagctgagactgacgggtgatgttgctcataggctccagctctgcataagaccttggcttggagacctccctctcagtcaacagctgaactctgagcttgtgcccagaaattaccccaagaccacaggaacccttcaagaagctcccatcacaagcttggcattgctctctgccacacgtgggcttcctcaggcttgtctgccacaagctacttctctgagctcagaaagtgccccttgatgagggaaaatgtcccactgcactgcgaatttctcagttccattttacctcccagtcctccttctaaaccagttaataaattcattccacaagtatttactgattacctgcttgtgccagggactattctcaggctgaagaaggtgggaggggagggcggaacctgaggagccacctgagccagctttatatttcaaccatggctggcccatctgagagcatctccccactctcgccaacctatcggggcatagcccagggatgcccccaggcggcccaggttagatgcgtccctttggcttgtcagtgatgacatacaccttagctgcttagctggtgctggcctgaggcagggcaggaaatcagaatagcatttgcttctctgggcaaatgggaagttcagcggggcagcagaatcagtggcattccccctggtgcaggccggtgggtccactccaactccccctgagtgtagcagcacactttccatacaccaggttctttctacaatcctggtggaaaagccacagaaccttcttcctgcccttcttgagagttccccctctttctgggtcaagagctggagtggtggctccatcctctctgggccacttcggtctaggaactcatctttgcaggaaccaggagtcctgagcacactgaacacacctcagagggaggatccttgttgtggattttgcacctggctttggggcaggggtgaagtgaccaggcttagcttgtggagtttatgggccaccagggtttggggaaatcaccatcccgcggatgctgtgacctcccttctacggagatgcaggcagtgccacgagggaggaggggacctgcaaagctagaatctagggcactgtttcctccccatccttctctttgtagagaatagagacgtttgtcttgtctgtcttcaacctacttttccttttctcttttttgtttctcatcctctctgtgccacctctccacccaggaggccatgtagcatagtggaaaaagtccctgagggcggttaggagttctgggtgaccatcctggctcagctcctaactcaccatgtgacatcaggctatccccattccccctcttgggcctcagtttcccgacttgcaaaataagcagaaagaaccagatgctctccagggtctttttctactttgctatctcatgggtcttcattttctcttattttgttttctctggatcttttccatctgagggtacaggaagtaccaggacctgtttcagtttttgaatcctgcaagcacattccaagactggcctgaaactgcatgagcaacatcactcgaaataattttttttttcaaaagcaccttaacaaccaattgcgatgctgtcctgttcctttttactcacacccttctctcctttctcgtccccatgctcccccacctcagtgctccgtgctgtatgcgtgtgctctctgttcttgtatactcaatataagtgaaataaatgtgtttgatgctgaaccata

SEQ ID NO: 92943 - DNA, 864 bp, Artificial Sequence
  derived and/or modified sequence
cctcagtggggagggagttcatagcaaccactccctccatcaccacggagaccatatcgaccaccatgatcatcgggaaagatgtcctcaccagcacctacggcgccactgcggaaaccctctcaacctccaccaccacccatgtcaccaaaactgtgaaaggagggttttctgagacaaggatcgagaagcgaatcatcattactggggatgaagatgtcgatcaagaccaggccctggctttggccatcaaggaggccaaactgcagcatcctgatatgctggtaaccaaagctgtcgtatacagagaaacagacccatccccagaggagagggacaagaagccacaggaatcctgacctctgtgaagagatcctggcatttctggtccaacccaagccagagaaccattaagaaggggccttcattctggattctccgacgcaacactgacgtcccagctgcgacgtactgtcactgatgagagactgggaagggaaaagcatatatatatagatatatagagatatagatatatatacaggaaacaccgcatccttgcactgctgctggggctggcagagcagttggctgacagcaacaaccgacatctgaacacctacatttcctttgcagacaaattgaagaactggtgggatttttttcaagaaaaaaaattatataataactataatcccttgctcacccctttcccccgccaaataagaaacgcaagccagaccacgatgattgtagaagtccctcccgccctggttctgcacgttacagttagcagacgagcaattccatttgttcttctccagcatctctaaggcccacttgaatgcaaaggaaaacacttgc

SEQ ID NO: 92944 - protein, 270 aa, Artificial Sequence
  derived and/or modified sequence
MTLSTLCVLGPSEPTESKVMCFHPWSDVTLPLMSVPEIRAVVDAWASVTEELGAQYPWVQIFENKGAMMGCSNPHPHCQVWASSFLPDIAQREERSQQAYKSQHGEPLLMEYSRQELLRKERLVLTSEHWLVLVPFWATWPYQTLLLPRRHVRRLPELTPAERDDLASIMKKLLTKYDNLFETSFPYSMGWHGAPTGSEAGANWNHWQLHAHYYPPLLRSATVRKFMVGYEMLAQAQRDLTPEQAAERLRALPEVHYHLGQKDRETATIA

SEQ ID NO: 92945 - DNA, 813 bp, Artificial Sequence
  derived and/or modified sequence
atgaccctgagcaccctgtgcgtgctgggccccagcgagcccaccgagagcaaggtgatgtgcttccacccctggagcgacgtgaccctgcccctgatgagcgtgcccgagatcagagccgtggtggacgcctgggccagcgtgaccgaggagctgggcgcccagtacccctgggtgcagatcttcgagaacaagggcgccatgatgggctgcagcaacccccacccccactgccaggtgtgggccagcagcttcctgcccgacatcgcccagagagaggagagaagccagcaggcctacaagagccagcacggcgagcccctgctgatggagtacagcagacaggagctgctgagaaaggagagactggtgctgaccagcgagcactggctggtgctggtgcccttctgggccacctggccctaccagaccctgctgctgcccagaagacacgtgagaagactgcccgagctgacccccgccgagagagacgacctggccagcatcatgaagaagctgctgaccaagtacgacaacctgttcgagaccagcttcccctacagcatgggctggcacggcgcccccaccggcagcgaggccggcgccaactggaaccactggcagctgcacgcccactactacccccccctgctgagaagcgccaccgtgagaaagttcatggtgggctacgagatgctggcccaggcccagagagacctgacccccgagcaggccgccgagagactgagagccctgcccgaggtgcactaccacctgggccagaaggacagagagaccgccaccatcgcctag

SEQ ID NO: 92946 - DNA, 813 bp, Artificial Sequence
  derived and/or modified sequence
atgaccctgagtaccctgtgtgttctagggccatccgaacccactgagagcaaagtgatgtgctttcacccttggtcagacgtgactctgccccttatgagcgtgccggagatccgcgccgttgtggacgcctgggctagcgtcaccgaagaactgggcgcccagtatccatgggttcagatcttcgagaataagggggctatgatgggttgtagcaatccccatccccattgccaggtgtgggctagctctttcttaccagacatcgcccagagagaggagcgaagccagcaagcttataagtctcaacatggagagcccctgctgatggagtattctaggcaggagctgctaaggaaagagaggcttgtcctaacctccgaacactggctggttcttgtgccattctgggccacgtggccctaccaaactttactgctgccaagaaggcacgtaagaaggctgcctgagctgacacccgcggaacgagatgacctcgcttcaatcatgaaaaagttgctgaccaaatatgacaacctgtttgagacttcatttccctactcaatgggatggcacggcgccccgaccggctcggaggctggcgccaactggaaccactggcagctgcacgctcattactaccctcccctcctgcgctctgccactgtgcggaaatttatggtaggttacgaaatgttagcccaagcccaacgcgatttgacccctgagcaggctgccgaacggctccgcgccctgcctgaagtccactaccaccttggccagaaggaccgcgagacggccaccatcgcctag

SEQ ID NO: 92947 - DNA, 813 bp, Artificial Sequence
  derived and/or modified sequence
atgaccctgagcaccctgtgtgtgctgggccccagcgagcccacagagagcaaggtgatgtgcttccacccctggagcgatgtgaccctgcccctgatgtctgtgcctgagatccgggctgtggtggatgcctgggcctctgtgacagaggagctgggcgcccagtacccctgggtgcagatctttgaaaataaaggagccatgatgggctgcagcaacccccacccccactgccaggtgtgggccagcagcttcctgcctgacatcgcccagcgggaggagaggagccagcaggcctacaagagccagcacggggagcccctgctgatggagtacagccggcaggagctgctgaggaaggagcggctggtgctgaccagcgagcactggctggtgctggtgcccttctgggccacctggccctaccagaccctgctgctgcccaggagacatgtgcggcggctgcctgagctgaccccagctgagagagatgacctggccagcatcatgaagaagctgctgaccaagtatgacaacctgtttgagaccagcttcccctacagcatgggctggcacggggcccccaccggcagcgaggccggggccaactggaaccactggcagctgcacgcccactactacccacccctgctgcggagcgccaccgtgaggaagttcatggtgggctatgagatgctggcccaggcccagagggacctgaccccagagcaggccgctgagcggctgcgggccctgcctgaggtgcactaccacctgggccagaaggaccgggagacagccaccatcgcctag

SEQ ID NO: 92948 - DNA, 813 bp, Artificial Sequence
  derived and/or modified sequence
atgaccctgagcaccctgtgcgtgctgggccccagcgagcccaccgaaagcaaagttatgtgcttccacccttggagtgacgtcaccctgccgctaatgtccgtgcctgaaatcagggctgttgtagatgcatgggcctctgtcacggaagaattgggggcgcagtatccttgggttcagatatttgagaataaaggggccatgatgggctgctctaacccacaccctcactgccaggtgtgggctagctccttcttgcccgacatcgcccaacgtgaagaaaggagtcaacaggcttacaagtcacaacacggggaacccctcttaatggaatactccaggcaggagctgctgcggaaggagcgtctcgtcctgaccagcgaacactggctggtgctggtgccattttgggctacctggccctaccagactctgctactaccgcggagacacgtcaggagactcccagaacttacccccgccgaaagagacgatttggctagcataatgaagaagctgttgacgaagtacgataacctttttgagaccagttttccttatagtatgggctggcacggtgcaccaacagggtcggaggctggggccaactggaatcactggcagctgcacgctcattactatcctcccttactgcggagcgccacggtgcgtaagtttatggttggatacgagatgctggcccaggcccagcgcgacttgactcctgaacaggccgccgaaaggttgagggctttacccgaggtgcactaccacttgggccagaaagatcgcgaaaccgccaccatcgcgtag

SEQ ID NO: 92949 - DNA, 1164 bp, Artificial Sequence
  derived and/or modified sequence
gtgtggacggagaaagtgaaaggtgaggcacggccctgcagattttccagcggatcccccggtggcctcatgtcgcgcagtggaaccgatcctcagcaacgccagcaggcgtcagaggcggacgccgcagcagcaaccttccgggcaaacgaccatcagcatatccgctacaacccgctgcaggatgagtgggtgctggtgtcagctcaccgcatgaagcggccctggcagggtcaagtggagccccagcttctgaagacagtgccccgccatgaccctctcaaccctctgtgtcctggggccatccgagccaacggagagtaaggtcatgtgcttccacccctggtcggatgtaacgctgccactcatgtcggtccctgagatccgggctgttgttgatgcatgggcctcagtcacagaggagctgggtgcccagtacccttgggtgcagatctttgaaaacaaaggtgccatgatgggctgttctaacccccacccccactgccaggtatgggccagcagtttcctgccagatattgcccagcgtgaggagcgatctcagcaggcctataagagtcagcatggagagcccctgctaatggagtacagccgccaggagctactcaggaaggaacgtctggtcctaaccagtgagcactggttagtactggtccccttctgggcaacatggccctaccagacactgctgctgccccgtcggcatgtgcggcggctacctgagctgacccctgctgagcgtgatgatctagcctccatcatgaagaagctcttgaccaagtatgacaacctctttgagacgtcctttccctactccatgggctggcatggggctcccacaggatcagaggctggggccaactggaaccattggcagctgcacgctcattactaccctccgctcctgcgctctgccactgtccggaaattcatggttggctacgaaatgcttgctcaggctcagagggacctcacccctgagcaggctgcagagagactaagggcacttcctgaggttcattaccacctggggcagaaggacagggagacagcaaccatcgcctgaccacgccgaccacagggccttgaatccttttttgttttcaacagtcttgctgaattaagcagaaagggccttgaatcctg

SEQ ID NO: 92950 - DNA, 813 bp, Artificial Sequence
  derived and/or modified sequence
atgacactctcaactctttgcgtactggggccaagtgaacccaccgagtcaaaggtaatgtgctttcatccgtggtctgacgtgactctccctctgatgagcgttccagagatccgagctgttgttgacgcgtgggcttcagtcaccgaagagctcggcgcacagtatccctgggtccagatattcgagaacaaaggtgccatgatgggatgttctaacccccacccgcattgccaagtgtgggcctctagtttcttaccggacatcgcccagcgggaagaaagatctcagcaggcatacaagagtcagcatggagagcctctgttaatggagtactcaagacaagagttactcaggaaagaaagactcgtactgacttcagaacattggctagtgttggtgcccttctgggctacctggccctatcagactctactcctgcccagaagacacgtgcgacgacttcccgagttgacacctgctgaacgcgacgatctcgccagcatcatgaaaaaactgctgacaaagtacgataatctgttcgaaacaagctttccctactccatgggttggcacggggctcccactgggtccgaggctggagccaattggaaccattggcaattacatgctcactattaccccccactgctgcggagcgcaaccgtacgaaagttcatggtgggatacgagatgctggcacaagcgcaacgggatcttacccccgaacaagcagctgagcgtctcagagccttgccggaggtccactaccacctcgggcaaaaggaccgcgagacggcaaccattgcttag

SEQ ID NO: 92951 - protein, 449 aa, Artificial Sequence
  derived and/or modified sequence
MLLALRINVLAKGYSGISLETLKQVIEMFNASCLPYVPEKGTVGASGDLAPLSHLALGLVGEGKMWSPKSGWADAKYVLEAHGLKPVILKPKEGLALINGTQMITSLGCEAVERASAIARQADIVAALTLEVLKGTTKAFDTDIHALRPHRGQIEVAFRFRSLLDSDHHPSEIAESHRFCDRVQDAYTLRCCPQVHGVVNDTIAFVKNIITTELNSATDNPMVFANRGETVSGGNFHGEYPAKALDYLAIGIHELAAISERRIERLCNPSLSELPAFLVAEGGLNSGFMIAHCTAAALVSENKALCHPSSVDSLSTSAATEDHVSMGGWAARKALRVIEHVEQVLAIELLAACQGIEFLRPLKTTTPLEKVYDLVRSVVRPWIKDRFMAPDIEAAHRLLLEQKVWEVAAPYIEKYRMEHIPESRPLSPTAFSLQFLHKKSTKIPESEDL

SEQ ID NO: 92952 - DNA, 1350 bp, Artificial Sequence
  derived and/or modified sequence
atgctgctggccctgagaatcaacgtgctggccaagggctacagcggcatcagcctggagaccctgaagcaggtgatcgagatgttcaacgccagctgcctgccctacgtgcccgagaagggcaccgtgggcgccagcggcgacctggcccccctgagccacctggccctgggcctggtgggcgagggcaagatgtggagccccaagagcggctgggccgacgccaagtacgtgctggaggcccacggcctgaagcccgtgatcctgaagcccaaggagggcctggccctgatcaacggcacccagatgatcaccagcctgggctgcgaggccgtggagagagccagcgccatcgccagacaggccgacatcgtggccgccctgaccctggaggtgctgaagggcaccaccaaggccttcgacaccgacatccacgccctgagaccccacagaggccagatcgaggtggccttcagattcagaagcctgctggacagcgaccaccaccccagcgagatcgccgagagccacagattctgcgacagagtgcaggacgcctacaccctgagatgctgcccccaggtgcacggcgtggtgaacgacaccatcgccttcgtgaagaacatcatcaccaccgagctgaacagcgccaccgacaaccccatggtgttcgccaacagaggcgagaccgtgagcggcggcaacttccacggcgagtaccccgccaaggccctggactacctggccatcggcatccacgagctggccgccatcagcgagagaagaatcgagagactgtgcaaccccagcctgagcgagctgcccgccttcctggtggccgagggcggcctgaacagcggcttcatgatcgcccactgcaccgccgccgccctggtgagcgagaacaaggccctgtgccaccccagcagcgtggacagcctgagcaccagcgccgccaccgaggaccacgtgagcatgggcggctgggccgccagaaaggccctgagagtgatcgagcacgtggagcaggtgctggccatcgagctgctggccgcctgccagggcatcgagttcctgagacccctgaagaccaccacccccctggagaaggtgtacgacctggtgagaagcgtggtgagaccctggatcaaggacagattcatggcccccgacatcgaggccgcccacagactgctgctggagcagaaggtgtgggaggtggccgccccctacatcgagaagtacagaatggagcacatccccgagagcagacccctgagccccaccgccttcagcctgcagttcctgcacaagaagagcaccaagatccccgagagcgaggacctgtag

SEQ ID NO: 92953 - DNA, 1350 bp, Artificial Sequence
  derived and/or modified sequence
atgctcttagcactaaggataaatgtgttggctaagggctactcagggattagcctcgaaacactgaagcaggtcatagagatgttcaacgcgtcctgcctaccatatgtaccagaaaagggaactgtgggtgcctccggtgatctcgcccctctgagtcacctggcccttggcttagtgggggaaggcaagatgtggagcccaaagtccgggtgggcagatgcgaagtacgtgctggaggcccacggattgaagcccgtgatacttaagccgaaggaagggctagcactcattaacggtacacagatgatcacctccctcgggtgtgaggccgttgagcgggcctccgcaatcgcccggcaagctgacattgttgctgctctgacgctggaagtgctgaaagggacaaccaaggcattcgatacagacatccacgctctccgcccacacagaggtcagattgaggttgcttttaggtttcgcagcttactggatagtgaccaccatccaagtgaaattgccgaaagccaccgattctgtgacagagtacaggatgcgtacacccttaggtgttgcccacaggtccatggggtggttaatgacaccatcgcattcgtgaagaatattattacaaccgaactgaactccgccacagataatcctatggtcttcgccaacagaggcgaaaccgtatccggagggaactttcacggggaataccctgccaaggcactcgactacctcgcaattgggattcatgaactggcggccatatccgaaaggagaatcgaacggctgtgcaacccaagtctctctgagctgcctgcctttctggtcgccgagggagggcttaacagcgggttcatgatcgctcattgtactgctgccgcattggtctctgagaataaggctctgtgtcacccttcatctgtagattcactttcaacctcggctgctactgaagaccatgtgtcgatgggtgggtgggcagcccgtaaggcactgagggtcatcgaacacgtggaacaggtcctggcaatcgagctcctggccgcttgtcagggtatcgagttcctgcgacctctcaaaaccactacaccattggagaaagtgtatgacctggtgcgctctgtggtgagaccatggattaaggaccgcttcatggctcccgatatcgaggctgcacatcgactgcttctggaacagaaggtgtgggaagtggcggccccttatattgaaaaatatcgcatggagcacattcccgagagcaggccgctgagtcctacagccttcagcctgcaatttctccataagaagagtaccaagattcccgaaagcgaagacctttag

SEQ ID NO: 92954 - DNA, 1350 bp, Artificial Sequence
  derived and/or modified sequence
atgctgctggccctgcgcatcaacgtgctggccaagggctacagcggcatcagcctggagaccctgaagcaggtgattgagatgtttaatgccagctgcctgccctacgtgcctgagaagggcaccgtgggcgccagcggggacctggcccccctgagccacctggccctgggcctggtgggggagggcaagatgtggagccccaagagcggctgggcagatgccaagtatgtgctggaggcccacggcctgaagcctgtgatcctgaagcccaaggagggcctggccctgatcaatggcacccagatgatcaccagcctgggctgtgaggccgtggagcgggccagcgccatcgcccggcaggccgacatcgtggccgccctgaccctggaggtgctgaagggcaccaccaaggcctttgacacagacatccacgccctgcggccccaccggggccagatcgaggtggccttccgcttccgcagcctgctggacagcgaccaccaccccagcgagattgctgagagccaccgcttctgtgacagagtgcaggatgcctacaccctgcgctgctgcccccaggtgcacggcgtggtgaatgacaccatcgcctttgtgaagaacatcatcaccacagagctgaacagcgccacagacaaccccatggtgtttgccaacagaggagagaccgtgtctgggggcaacttccatggagagtacccagccaaggccctggactacctggccatcggcatccacgagctggccgccatcagcgagaggagaattgagcggctgtgcaaccccagcctgtctgagctgcctgccttcctggtggccgagggcggcctgaacagcggcttcatgattgcccactgcacagctgctgccctggtgtctgagaacaaggccctgtgccaccccagctctgtggacagcctgagcaccagcgctgccacagaagatcatgtgtccatgggcggctgggccgccaggaaggccctgcgggtcatcgagcacgtggagcaggtgctggccatcgagctgctggccgcctgccagggcatcgagttcctgcggcccctgaagaccaccacccccctggagaaggtgtatgacctggtgcgctctgtggtgcggccctggatcaaggaccgcttcatggccccagacatcgaggccgcccaccggctgctgctggagcagaaggtgtgggaggtggccgccccctacatcgagaagtacaggatggagcacatccctgagagccggcccctgagccccacagccttcagcctgcagttcctgcacaagaagagcaccaagatccctgagagcgaggacctgtag

SEQ ID NO: 92955 - DNA, 1350 bp, Artificial Sequence
  derived and/or modified sequence
atgctgctggccctgcggatcaacgtgctggccaagggctacagcggcatctctctcgagaccctgaaacaggtaatcgagatgtttaacgcttcttgcctcccctacgtacctgaaaagggcaccgtgggcgcctcaggagatctcgccccgcttagccatcttgcactggggctggtaggggaaggaaagatgtggtctcccaagtcaggctgggcagatgccaagtatgtcttggaggcccatggactcaaaccagttattcttaagcccaaggaaggtcttgccctgataaacggaacccaaatgatcacgagcctgggatgcgaagccgtggaaagagcatccgccatcgctcgccaggcggacattgtggccgcactcaccctcgaagtcctcaagggaacaaccaaagcctttgacactgacatccatgccctccgaccacatagaggccagatagaggtggccttcaggttcagaagcctcctcgactccgaccaccacccgagcgaaatcgccgaaagtcatcgcttctgtgatagagtgcaggacgcttacacactccgctgctgcccacaggttcatggggtcgtgaatgacacaatcgcattcgtgaagaatatcatcaccacagaactgaacagcgcaacggataatccaatggtctttgcaaacagaggggagaccgtgtctggggggaactttcacggcgaatatcccgccaaagcccttgattacctcgccattggaattcatgagcttgccgccatcagcgagagacgcatcgagcgattgtgcaatcccagtcttagtgagcttccagccttccttgtcgccgagggaggccttaattctggcttcatgatcgctcattgtactgccgccgcactggtatcagaaaataaggcgctgtgccaccctagtagcgtagactccctttctacaagtgccgctactgaggaccatgttagtatgggaggatgggctgcccgcaaggcacttagggtaatcgagcatgtggagcaggttttagcgatagaactacttgcagcctgtcaggggatagaatttctgaggcccctgaagacaactacacccttagaaaaggtttacgacttggtgagatcagttgttagaccatggattaaagaccgatttatggcgccggacattgaagccgcccaccggctcttattggaacaaaaagtgtgggaagttgccgccccttatattgagaagtatcgcatggagcacattccagagtcgagacctctgagtcccacagccttctcactccagtttcttcacaagaagtctacaaaaatccccgagagcgaggacctgtag

SEQ ID NO: 92956 - DNA, 1350 bp, Artificial Sequence
  derived and/or modified sequence
atgctcctggcgctgagaattaacgtcctggccaaaggctattcgggcataagcctggagaccttgaagcaggttattgagatgttcaatgcttcatgcctcccgtatgtgcctgagaagggtaccgtcggagcatccggggatctcgccccactaagccatttggcgctgggcttggtcggcgagggcaaaatgtggagccctaaatcagggtgggcagacgccaaatacgtcctggaggctcacgggctgaagcccgtgattctgaaaccgaaggagggtttggccctaatcaatggcactcagatgatcacttcactgggttgcgaagccgtcgagagggcctccgcaatcgccaggcaggcagacattgtcgccgcacttactctggaggttttgaagggtactacgaaggcttttgacacagatatccacgcactgaggccacacagaggccagattgaagtggcatttcgattccgatctttgctggactccgatcatcacccgagtgagatagcggagtcacaccgcttctgcgatcgggtacaggatgcctacactctgaggtgttgtccgcaggtacatggtgtggtcaatgatacaatcgctttcgtcaagaatatcattactaccgagctgaacagcgccacagacaaccccatggtctttgccaatcggggagaaacagtgtccggaggaaactttcatggggaataccccgctaaggctttagactacctcgcgattggcattcacgagctggctgccattagcgagaggcggattgaacggttgtgcaatccctctctgagcgaactgcccgctttcctcgttgccgaaggagggctgaatagcgggttcatgatcgcccattgcacggctgccgctctggtgtccgaaaacaaggccctgtgtcacccatcctccgtagacagcctgtcaaccagcgccgctactgaggaccacgtgagtatgggcggttgggctgctcgtaaagccctgagagttattgagcacgtcgaacaggtgctggccatcgagctgctcgctgcctgccaaggaatcgaattcctgcggcctctaaaaactaccacccctctggagaaggtctatgacctggtgagatcagtggtgcggccatggatcaaagacaggtttatggcccctgatattgaggcggcacataggctgcttttagagcaaaaggtctgggaagtagcagcaccatatattgagaagtaccgcatggagcacattccagagagccgccctctgagccctacggcgttctctctgcagttcctccacaagaaatccacaaagattcccgagtctgaggatctgtag

SEQ ID NO: 92957 - protein, 591 aa, Artificial Sequence
  derived and/or modified sequence
MPRYTVHVRGEWLAVPCQDAQLTVGWLGREAVRRYIKNKPDNGGFTSVDDAHFLVRRCKGLGLLDNEDRLEVALENNEFVEVVIEGDAMSPDFIPSQPEGVYLYSKYREPEKYIELDGDRLTTEDLVNLGKGRYKIKLTPTAEKRVQKSREVIDSIIKEKTVVYGITTGFGKFARTVIPINKLQELQVNLVRSHSSGVGKPLSPERCRMLLALRINVLAKGYSGISLETLKQVIEMFNASCLPYVPEKGTVGASGDLAPLSHLALGLVGEGKMWSPKSGWADAKYVLEAHGLKPVILKPKEGLALINGTQMITSLGCEAVERASAIARQADIVAALTLEVLKGTTKAFDTDIHALRPHRGQIEVAFRFRSLLDSDHHPSEIAESHRFCDRVQDAYTLRCCPQVHGVVNDTIAFVKNIITTELNSATDNPMVFANRGETVSGGNFHGEYPAKALDYLAIGIHELAAISERRIERLCNPSLSELPAFLVAEGGLNSGFMIAHCTAAALVSENKALCHPSSVDSLSTSAATEDHVSMGGWAARKALRVIEHVEQVLAIELLAACQGIEFLRPLKTTTPLEKVYDLVRSVVRFGK

SEQ ID NO: 92958 - DNA, 1776 bp, Artificial Sequence
  derived and/or modified sequence
atgcccagatacaccgtgcacgtgagaggcgagtggctggccgtgccctgccaggacgcccagctgaccgtgggctggctgggcagagaggccgtgagaagatacatcaagaacaagcccgacaacggcggcttcaccagcgtggacgacgcccacttcctggtgagaagatgcaagggcctgggcctgctggacaacgaggacagactggaggtggccctggagaacaacgagttcgtggaggtggtgatcgagggcgacgccatgagccccgacttcatccccagccagcccgagggcgtgtacctgtacagcaagtacagagagcccgagaagtacatcgagctggacggcgacagactgaccaccgaggacctggtgaacctgggcaagggcagatacaagatcaagctgacccccaccgccgagaagagagtgcagaagagcagagaggtgatcgacagcatcatcaaggagaagaccgtggtgtacggcatcaccaccggcttcggcaagttcgccagaaccgtgatccccatcaacaagctgcaggagctgcaggtgaacctggtgagaagccacagcagcggcgtgggcaagcccctgagccccgagagatgcagaatgctgctggccctgagaatcaacgtgctggccaagggctacagcggcatcagcctggagaccctgaagcaggtgatcgagatgttcaacgccagctgcctgccctacgtgcccgagaagggcaccgtgggcgccagcggcgacctggcccccctgagccacctggccctgggcctggtgggcgagggcaagatgtggagccccaagagcggctgggccgacgccaagtacgtgctggaggcccacggcctgaagcccgtgatcctgaagcccaaggagggcctggccctgatcaacggcacccagatgatcaccagcctgggctgcgaggccgtggagagagccagcgccatcgccagacaggccgacatcgtggccgccctgaccctggaggtgctgaagggcaccaccaaggccttcgacaccgacatccacgccctgagaccccacagaggccagatcgaggtggccttcagattcagaagcctgctggacagcgaccaccaccccagcgagatcgccgagagccacagattctgcgacagagtgcaggacgcctacaccctgagatgctgcccccaggtgcacggcgtggtgaacgacaccatcgccttcgtgaagaacatcatcaccaccgagctgaacagcgccaccgacaaccccatggtgttcgccaacagaggcgagaccgtgagcggcggcaacttccacggcgagtaccccgccaaggccctggactacctggccatcggcatccacgagctggccgccatcagcgagagaagaatcgagagactgtgcaaccccagcctgagcgagctgcccgccttcctggtggccgagggcggcctgaacagcggcttcatgatcgcccactgcaccgccgccgccctggtgagcgagaacaaggccctgtgccaccccagcagcgtggacagcctgagcaccagcgccgccaccgaggaccacgtgagcatgggcggctgggccgccagaaaggccctgagagtgatcgagcacgtggagcaggtgctggccatcgagctgctggccgcctgccagggcatcgagttcctgagacccctgaagaccaccacccccctggagaaggtgtacgacctggtgagaagcgtggtgagattcggcaagtag

SEQ ID NO: 92959 - DNA, 1776 bp, Artificial Sequence
  derived and/or modified sequence
atgccaaggtacacggtacacgtgcgcggggaatggttagctgtgccatgccaggacgcccagcttaccgtgggatggctggggagagaagccgtgcggagatatatcaaaaacaaacctgataacgggggattcactagcgtcgacgacgcccattttctagtcagaagatgtaaaggtctcggtttgcttgataacgaagatagactcgaggtggcactcgagaacaacgagtttgtagaggtagtaatagaaggcgatgccatgagtccagatttcataccctcccagccagagggcgtatacttatactctaagtacagagagccggaaaaatatatcgaactcgatggggatcgacttacaaccgaggacttagtgaatctggggaagggtcgttacaaaatcaagctgactcctaccgcggagaagcgagtccagaaatcacgggaagtcattgacagcataattaaagaaaagaccgtggtgtacggcatcacaactggctttggaaaatttgcaaggacggtgattcctattaataagctccaggaattgcaagtcaaccttgtgaggagtcacagttccggggttggcaaacccttatcccctgagagatgtcgcatgctgttagcgttgaggataaacgtgctcgccaagggctattccgggatctcattggagactctaaagcaggtgattgagatgttcaatgcgtcttgcctgccctatgtacccgagaaggggactgtgggtgcatccggcgaccttgccccactgagtcatttagctctcgggctggtcggggagggaaaaatgtggagtcccaagtccgggtgggccgatgcaaagtatgtcctcgaggctcacgggcttaagcctgtgatcctgaagcccaaggagggccttgccctgattaacggtacccagatgataacctcccttggctgtgaggctgtcgaacgcgcgtctgccatagctcggcaggcagacattgtggccgctttaactttggaggtgcttaaggggacgaccaaggcctttgatacagatattcacgcacttcgtccacatagagggcaaattgaggtggcctttcgttttaggtcactgctggattctgaccaccacccaagcgaaatcgctgagagtcatcgcttttgtgaccgtgtccaggatgcatacactctccgctgttgtcctcaggtgcacggcgttgttaatgatacaattgcctttgtgaaaaatataatcactacagaacttaattctgctacagataatcctatggtgttcgctaatcgtggcgagaccgtttccggagggaacttccacggggaataccctgcaaaggctttagattacctggccattggcatccacgaattggcagcaattagtgagcgacggatcgaaagactctgtaacccaagcctgtctgagttacctgcgttccttgtggcagagggcgggttgaactctggtttcatgatcgcacattgtacagccgctgctctggtgtctgagaacaaagcattgtgtcaccctagtagcgtggatagtctatcgactagcgccgcgaccgaggatcacgtctcgatgggtggctgggcagcacggaaagcactgagggtgatcgaacacgtggaacaagtgttggctattgagctcttggcagcctgtcagggcatcgagtttctgaggcccctgaaaaccacaactccgctcgagaaagtctacgacctggtgagaagcgtagtgagattcgggaaatag

SEQ ID NO: 92960 - DNA, 2637 bp, Artificial Sequence
  derived and/or modified sequence
agataaagacaggaacatggtgtttataagctgcccttaatggcagagaacacagacagaaacgagggaagagagagaaattggggaccctgaagaaagggggccagcagcaggtaggtgccatcagggacaagaacagcacctcccagggtgggagaccccaggcctttctggcagcaggtctggatggaaagtggacaggaggctcacccgtctgcatcccctgctcctgcccctgctcggctacaaaaaccaaagggacagcagctgaccacaccccggtagccactcctgcataaagctctcccctcctgtgaccagctgaggacctcaggctgcagcggagccatgcccagatacacggtgcacgtacgtggggaatggctggcagtgccctgccaggacgcgcagctcactgtgggctggctgggccgggaggccgtgaggcgctatatcaagaataagcccgacaatggtggcttcacctccgtggatgacgcgcacttccttgtgcgccggtgcaagggcctgggcctgctggacaacgaggaccggctcgaggtggccctagagaacaacgagttcgtggaagtggttatagagggtgatgccatgtctcctgacttcattccatctcaaccagaaggagtttatctatacagcaagtaccgggagcctgaaaagtacatcgagttagatggagaccgtctgaccacggaggatctggtcaacttgggaaagggacgctacaaaataaagctcaccccaacagctgagaagagggtgcagaaatccagggaggtcatagatagcatcataaaagagaaaacagttgtttacggtattactacaggttttgggaaatttgccagaactgtaattcctatcaataagctacaggagcttcaggtcaacttagtacgctcacattcttcaggtgttgggaaaccactaagtcctgagaggtgtcggatgctcttggctttaaggatcaatgtcttagccaaaggatacagtggcatttccctggagaccctcaaacaagtcatagaaatgtttaatgcctcctgcctgccctatgtcccagagaaaggaaccgttggtgccagtggagaccttgccccactctctcatcttgctcttgggctagttggagaagggaagatgtggtctccgaagagtggctgggctgatgctaaatacgtgctagaagcccatggattgaaaccagttattttaaaaccaaaagagggcctggcactcatcaatgggacgcagatgatcacatccctgggctgtgaagctgtagagcgagccagtgctattgcacggcaggctgacattgtggcagccctgacccttgaggtgctgaagggcaccaccaaagcctttgacactgacattcatgctcttcgacctcaccgtgggcaaattgaagttgcttttcggtttcggtcactcttggactcagatcaccacccatcagaaatagcagagagtcacaggttctgtgatcgcgtccaggatgcatacaccttgcgctgctgtccacaggtccatggtgtggtgaatgatacaatagcatttgtgaagaacatcattaccacagaactgaacagcgcaacagataatcctatggtctttgccaataggggagagacagtttctggaggaaacttccatggtgaatacccagccaaagccctagactacttggccattggcatccatgaacttgctgcaatcagtgagagaagaatcgagcggctctgcaatccctccctcagtgagctgcctgccttcctggtggctgaaggtggtctgaactctgggttcatgatagctcactgcacggcagcagcccttgtttctgagaacaaggctctgtgccatccctcgtctgttgactccctctccaccagcgcagccacggaggaccacgtctccatgggaggatgggcagcaaggaaagccctcagggtcatcgagcatgtggagcaagtgctggccatcgagctccttgcagcctgccagggcatagagtttctacgtcccctgaaaacaaccactccgctggagaaggtctatgacctggtgcgctctgttgtaaggtttgggaagtagctgctccatacattgaaaaatacagaatggagcatattccagaatcaagacctctttctccaacagccttttcactgcaatttctgcacaagaaatccaccaaaatcccggagtctgaggacctttaatgggctttgtcatgaagtagcagatgagagggcagtcagtttagcacaaagcaatactaggctgaaggagagacctgagaactttcctaggtagatcaatccattgtatcattcagttcttctaaagcctacgttggttaggctgatggcagtattatagttgctaaattcagcactgtgttcctgttgtcgtggttcaagacccaccaggtattttcagattataaaacttttctttctttcttaacagtttcaacaggccactcactcttaagggtgagaagaataaccacaattgtatgtgcctgttttttactcttagcattagatgaattcaaatttggaaacagattgatagcaattttttctaaaaacattagacttt

SEQ ID NO: 92961 - DNA, 1776 bp, Artificial Sequence
  derived and/or modified sequence
atgccccgctacacagtgcacgtgcggggggagtggctggccgtgccctgccaggatgcccagctgactgtgggctggctgggccgggaggccgtgcggcgctacatcaagaacaagccagacaatggaggcttcacctctgtggatgatgcccacttcctggtgcggcgctgcaagggcctgggcctgctggacaatgaagatcggctggaggtggccctggagaacaatgaatttgtggaggtggtgattgaaggagatgccatgagcccagacttcatccccagccagcctgagggcgtgtacctgtacagcaagtaccgggagcctgagaagtacatcgagctggatggagaccggctgaccacagaggacctggtgaacctgggcaagggccgctacaagatcaagctgacccccacagctgagaagagggtgcagaagagccgggaggtgattgacagcatcatcaaggagaagacagtggtgtatggcatcaccaccggctttgggaagtttgccaggacagtcatccccatcaacaagctgcaggagctgcaggtgaacctggtgcgcagccacagcagcggcgtgggcaagcccctgagccctgagcgctgcaggatgctgctggccctgcgcatcaacgtgctggccaagggctacagcggcatcagcctggagaccctgaagcaggtgattgagatgtttaatgccagctgcctgccctacgtgcctgagaagggcaccgtgggcgccagcggggacctggcccccctgagccacctggccctgggcctggtgggggagggcaagatgtggagccccaagagcggctgggcagatgccaagtatgtgctggaggcccacggcctgaagcctgtgatcctgaagcccaaggagggcctggccctgatcaatggcacccagatgatcaccagcctgggctgtgaggccgtggagcgggccagcgccatcgcccggcaggccgacatcgtggccgccctgaccctggaggtgctgaagggcaccaccaaggcctttgacacagacatccacgccctgcggccccaccggggccagatcgaggtggccttccgcttccgcagcctgctggacagcgaccaccaccccagcgagattgctgagagccaccgcttctgtgacagagtgcaggatgcctacaccctgcgctgctgcccccaggtgcacggcgtggtgaatgacaccatcgcctttgtgaagaacatcatcaccacagagctgaacagcgccacagacaaccccatggtgtttgccaacagaggagagaccgtgtctgggggcaacttccatggagagtacccagccaaggccctggactacctggccatcggcatccacgagctggccgccatcagcgagaggagaattgagcggctgtgcaaccccagcctgtctgagctgcctgccttcctggtggccgagggcggcctgaacagcggcttcatgattgcccactgcacagctgctgccctggtgtctgagaacaaggccctgtgccaccccagctctgtggacagcctgagcaccagcgctgccacagaagatcatgtgtccatgggcggctgggccgccaggaaggccctgcgggtcatcgagcacgtggagcaggtgctggccatcgagctgctggccgcctgccagggcatcgagttcctgcggcccctgaagaccaccacccccctggagaaggtgtatgacctggtgcgctctgtggtgcgctttgggaagtag

SEQ ID NO: 92962 - DNA, 1776 bp, Artificial Sequence
  derived and/or modified sequence
atgccccggtacaccgtgcacgtgcggggcgagtggctggccgtgccttgtcaggatgctcagctgaccgtgggatggctgggccgcgaggctgtgagaaggtatataaagaacaaaccagataacggggggttcacatcagtcgacgatgcacacttcctggtgcgccgctgtaagggcttgggactcctcgataacgaggatcgcctggaggtggccctcgagaacaacgaatttgttgaagtcgtgatcgagggagacgctatgagcccagatttcataccctcacagccagagggggtgtatctgtattcaaagtaccgggaacctgagaaatacatcgagcttgacggcgaccgtctcaccactgaggatttggtaaacctagggaaaggacggtacaaaattaaactgacccctacggccgagaaacgagttcagaaatcaagagaagttatcgactcaatcatcaaggaaaaaacagttgtctacggcatcactacaggcttcgggaagttcgctcgaactgtgattcctattaacaagctgcaggaactgcaggtgaaccttgttcggtcccactcatcaggcgtaggcaagcctctctccccagagaggtgcagaatgctccttgcactgcggattaatgtgctcgctaaaggatattcaggcatcagcttagagacactcaaacaggtgatcgaaatgtttaatgcctcatgccttccctacgtcccggagaagggaactgtaggagcctccggcgatctcgctcccctgtcacatttagccctggggctagtcggtgaggggaagatgtggagtcccaaatccggatgggctgacgcaaagtatgtgctcgaggcccacggccttaagcccgtcatcctcaagccaaaggagggcttagcccttatcaacggaacacagatgataacaagtttaggctgcgaggcagtggagcgtgcaagtgccatagccagacaggccgatattgttgccgccctgaccctcgaggttctgaagggcacgaccaaggcatttgacacagacattcatgccctgcggcctcaccgcggccagatagaggtcgcgttcagatttcgtagtctcctggactccgatcaccatccaagcgagatagccgagagtcatcggttctgcgatcgcgtgcaggacgcctacactctgagatgttgcccccaagtccatggagtcgtgaatgatactatcgcctttgtgaagaatataatcaccactgaactcaatagcgcaactgataatcccatggtgtttgccaacagaggcgaaactgttagcggtggcaactttcatggcgaataccctgcaaaggccttagattacctggcaatcgggattcatgaactggcagctatatcagaacggagaattgagagactgtgtaacccatccttgagcgagctgcccgcgttcctggtggccgaaggagggctcaactccggtttcatgatcgcccattgcactgcggcagctttggtgtccgaaaacaaggccctgtgtcatccatctagcgtggacagtctatccacgagcgcagctaccgaagaccatgtctctatgggtggttgggcagccagaaaagcacttcgagtgatcgagcacgttgagcaggtgctcgctatcgagctgcttgctgcctgccaggggatagaatttctcaggcctctcaaaaccacaactccactggaaaaggtctacgatttagtgcggtctgtcgtgcgctttggtaagtag

SEQ ID NO: 92963 - DNA, 1776 bp, Artificial Sequence
  derived and/or modified sequence
atgccgaggtacaccgtccatgtacggggtgagtggctggctgtcccatgccaagatgcacaactaacagtcggctggctcgggagggaggcagtccgtcgctacatcaaaaataagccagacaacggcggattcacttcagtggacgacgcgcatttcctggtccggcgatgtaaggggctgggtctgctcgacaatgaagatagactggaagtagccctggaaaacaacgagtttgtggaggtggttatcgagggcgacgccatgagccctgatttcatcccttcacaacctgagggagtgtatctttactccaaataccgtgaaccagagaaatacatcgaattggacggcgatcgattgacaactgaggacctggtcaacctgggcaaaggcaggtacaagattaaactaacccctaccgcggaaaagagagttcaaaaaagtcgggaggttatcgattccataataaaggaaaaaacagtggtgtacggtatcaccactggatttggtaagttcgccaggacagtcatcccaatcaacaagttgcaagagctacaggttaatctggtgcgttcccacagctcaggtgtgggaaaaccactgagcccagagcgctgtcgcatgttgctggccctgcgcatcaacgtgctcgcaaagggctactccggaatctcactcgaaacgttgaaacaggtcattgaaatgtttaatgcttcttgtctaccttatgttccagagaagggaacagtgggagcctcaggtgatttggcacctctgtcacacttggccctcggcctggtgggcgagggaaagatgtggtctcccaaatcaggatgggcagacgctaagtacgtattggaggctcatggcctgaaaccagtgatcctcaagcctaaagaaggccttgccctcataaacgggactcaaatgattacctccctcggatgtgaggcagtggagcgcgcttcagccatcgcgcgtcaggccgatattgtcgccgcactcacactggaggtgttgaagggtaccaccaaagccttcgacacggacatccacgcactgagacctcatagagggcagatcgaggttgcctttagattccggtcacttctggacagtgatcaccatccgagcgagatcgccgagagccaccgcttttgtgaccgcgtgcaagatgcctataccttgcggtgctgcccccaggtgcacggagtcgtgaatgacactatcgcattcgtcaaaaacatcataacaaccgaactcaactccgctacagacaatcccatggtgttcgccaaccgaggagagaccgtctcaggcggtaacttccatggcgagtaccctgccaaggcccttgattacctggccatcgggatccatgagctggccgctattagcgagcggcgaatcgaaaggctgtgtaatccatctctgagtgagttaccggcattcctcgtcgccgagggaggattaaactccggctttatgattgcacattgtaccgccgctgctctcgtaagtgagaacaaggctctgtgtcatccaagttcggtggacagtctgtcgacctcagccgcaacagaggaccacgtgagcatgggtggatgggctgctagaaaggcgctcagagtgatagaacacgtggagcaggtcctggcaatcgaacttctggcggcttgccagggtatcgaatttctccgcccacttaaaacgaccacaccactggaaaaagtgtacgacctggtgaggtccgtggttagattcgggaagtag

SEQ ID NO: 92964 - protein, 63 aa, Artificial Sequence
  derived and/or modified sequence
MELVQVLKRGLQQITGHGGLRGYLRVFFRTNDAKVGTLVGEDKYGNKYYEDNKQFFGIVGFTV

SEQ ID NO: 92965 - DNA, 192 bp, Artificial Sequence
  derived and/or modified sequence
atggagctggtgcaggtgctgaagagaggcctgcagcagatcaccggccacggcggcctgagaggctacctgagagtgttcttcagaaccaacgacgccaaggtgggcaccctggtgggcgaggacaagtacggcaacaagtactacgaggacaacaagcagttcttcggcatcgtgggcttcaccgtgtag

SEQ ID NO: 92966 - DNA, 192 bp, Artificial Sequence
  derived and/or modified sequence
atggagctggtacaggtactgaaacggggcctgcagcagatcaccggacatggcggtctaagaggttacctccgggttttctttcgcaccaacgacgccaaagtgggtactctggttggcgaagacaagtacgggaataagtactacgaggataacaagcaattttttggtatagttggattcactgtatag

SEQ ID NO: 92967 - DNA, 192 bp, Artificial Sequence
  derived and/or modified sequence
atggagctggtgcaggtgctgaagaggggcctgcagcagatcactggacatggaggcctgcggggctacctgcgggtcttcttccgcaccaatgatgccaaggtgggcaccctggtgggggaggacaagtatggcaacaagtactatgaggacaacaagcagttcttcggcatcgtgggcttcaccgtgtag

SEQ ID NO: 92968 - DNA, 192 bp, Artificial Sequence
  derived and/or modified sequence
atggagctggtgcaggtgctgaagcggggcctgcagcagatcaccgggcatggcggcctcagaggttaccttagggtctttttccgcactaatgatgccaaggttggcactctggtgggtgaggataagtacggaaacaagtattatgaggataacaagcagttctttggaatagtgggttttaccgtttag

SEQ ID NO: 92969 - DNA, 192 bp, Artificial Sequence
  derived and/or modified sequence
atggagctggtgcaggttctcaagcgaggcctgcagcagattaccggtcacggtggactccgtggatatttgagagtcttttttaggacaaatgacgccaaagtggggaccctcgttggggaggacaaatatggaaacaagtactacgaggataataagcagtttttcggaattgtcggatttacagtctag

SEQ ID NO: 92970 - protein, 962 aa, Artificial Sequence
  derived and/or modified sequence
MDTDLYDEFGNYIGPELDSDEDDDELGRETKDLDEMDDDDDDDDVGDHDDDHPGMEVVLHEVYGPEVETIVQEEDTQPLTEPIIKPVKTKKFTLMEQTLPVTVYEMDFLADLMDNSELIRNVTLCGHLHHGKTCFVDCLIEQTHPEIRKRYDQDLCYTDILFTEQERGVGIKSTPVTVVLPDTKGKSYLFNIMDTPGHVNFSDEVTAGLRISDGVVLFIDAAEGVMLNTERLIKHAVQERLAVTVCINKIDRLILELKLPPTDAYYKLRHIVDEVNGLISMYSTDENLILSPLLGNVCFSSSQYSICFTLGSFAKIYADTFGDINYQEFAKRLWGDIYFNPKTRKFTKKAPTSSSQRSFVEFILEPLYKILAQVVGDVDTSLPRTLDELGIHLTKEELKLNIRPLLRLVCKKFFGEFTGFVDMCVQHIPSPKVGAKPKIEHTYTGGVDSDLGEAMSDCDPDGPLMCHTTKMYSTDDGVQFHAFGRVLSGTIHAGQPVKVLGENYTLEDEEDSQICTVGRLWISVARYHIEVNRVPAGNWVLIEGVDQPIVKTATITEPRGNEEAQIFRPLKFNTTSVIKIAVEPVNPSELPKMLDGLRKVNKSYPSLTTKVEESGEHVILGTGELYLDCVMHDLRKMYSEIDIKVADPVVTFCETVVETSSLKCFAETPNKKNKITMIAEPLEKGLAEDIENEVVQITWNRKKLGEFFQTKYDWDLLAARSIWAFGPDATGPNILVDDTLPSEVDKALLGSVKDSIVQGFQWGTREGPLCDELIRNVKFKILDAVVAQEPLHRGGGQIIPTARRVVYSAFLMATPRLMEPYYFVEVQAPADCVSAVYTVLARRRGHVTQDAPIPGSPLYTIKAFIPAIDSFGFETDLRTHTQGQAFSLSVFHHWQIVPGDPLDKSIVIRPLEPQPAPHLAREFMIKTRRRKGLSEDVSISKFFDDPMLLELAKQDVVLNYPM

SEQ ID NO: 92971 - protein, 972 aa, Artificial Sequence
  derived and/or modified sequence
MDTDLYDEFGNYIGPELDSDEDDDELGRETKDLDEMDDDDDDDDVGDHDDDHPGMEVVLHEDKKYYPTAEEVYGPEVETIVQEEDTQPLTEPIIKPVKTKKFTLMEQTLPVTVYEMDFLADLMDNSELIRNVTLCGHLHHGKTCFVDCLIEQTHPEIRKRYDQDLCYTDILFTEQERGVGIKSTPVTVVLPDTKGKSYLFNIMDTPGHVNFSDEVTAGLRISDGVVLFIDAAEGVMLNTERLIKHAVQERLAVTVCINKIDRLILELKLPPTDAYYKLRHIVDEVNGLISMYSTDENLILSPLLGNVCFSSSQYSICFTLGSFAKIYADTFGDINYQEFAKRLWGDIYFNPKTRKFTKKAPTSSSQRSFVEFILEPLYKILAQVVGDVDTSLPRTLDELGIHLTKEELKLNIRPLLRLVCKKFFGEFTGFVDMCVQHIPSPKVGAKPKIEHTYTGGVDSDLGEAMSDCDPDGPLMCHTTKMYSTDDGVQFHAFGRVLSGTIHAGQPVKVLGENYTLEDEEDSQICTVGRLWISVARYHIEVNRVPAGNWVLIEGVDQPIVKTATITEPRGNEEAQIFRPLKFNTTSVIKIAVEPVNPSELPKMLDGLRKVNKSYPSLTTKVEESGEHVILGTGELYLDCVMHDLRKMYSEIDIKVADPVVTFCETVVETSSLKCFAETPNKKNKITMIAEPLEKGLAEDIENEVVQITWNRKKLGEFFQTKYDWDLLAARSIWAFGPDATGPNILVDDTLPSEVDKALLGSVKDSIVQGFQWGTREGPLCDELIRNVKFKILDAVVAQEPLHRGGGQIIPTARRVVYSAFLMATPRLMEPYYFVEVQAPADCVSAVYTVLARRRGHVTQDAPIPGSPLYTIKAFIPAIDSFGFETDLRTHTQGQAFSLSVFHHWQIVPGDPLDKSIVIRPLEPQPAPHLAREFMIKTRRRKGLSEDVSISKFFDDPMLLELAKQDVVLNYPM

SEQ ID NO: 92972 - DNA, 2889 bp, Artificial Sequence
  derived and/or modified sequence
atggacacagacctgtatgacgaattcggtaattacataggtcctgagctcgactctgatgaagatgacgatgagctggggagagaaacaaaggacctggatgagatggacgatgatgacgacgatgacgatgtgggagaccatgatgatgatcatcccggtatggaggtggtcctccatgaagtgtatggtcccgaagtggagacaatcgtccaggaagaggatacgcagccattaaccgagcccataatcaagcctgttaaaacgaaaaagtttaccttaatggagcaaactcttcctgttacagtgtatgagatggatttcctggccgatctaatggacaactccgaactgatcagaaacgtcacactgtgcggccatttgcatcatgggaagacttgcttcgtagactgcctcatagaacagactcaccctgagatcagaaaaagatacgaccaagacctgtgttataccgacatcttattcaccgaacaggaaaggggcgtcggaatcaaatccactcccgtaaccgtggttctgcccgataccaaggggaagtcatatctcttcaatattatggacaccccagggcacgtcaatttttccgacgaggtgactgctgggctccggattagcgatggcgtggtgctcttcattgatgctgcagaaggggtgatgctaaacactgagaggctgatcaagcatgctgtccaggagcgcctcgccgtcacagtgtgcattaacaagatcgatcggcttatcttagagctgaaactgccccctacagatgcttattacaagctcagacatattgtagacgaggtaaacgggctgatctccatgtattcaacagacgaaaacctgattctgtctcccttgctgggcaacgtgtgcttcagttcctcacagtattctatctgttttacgctgggttcattcgccaaaatctacgccgatactttcggcgacattaattaccaggaattcgccaaacgcctctggggagatatctactttaacccaaaaacccggaaattcacaaaaaaggcaccgacctcctcttcccaaagaagctttgttgagttcatcttggaacccctatataagattttagcacaagtggtcggcgatgtcgacacatccctgcctcgtacattggatgagctcggaatccaccttacaaaagaggaattgaagctgaatattcgcccgttgctgagactcgtgtgtaagaagttctttggagaatttacagggttcgtggatatgtgcgtccagcacatcccgtctcccaaagtgggagccaaacccaaaatcgagcatacatacactgggggagttgattccgacctcggggaggccatgagcgactgtgatccagacggtcccctgatgtgtcacacaaccaaaatgtattcgaccgatgacggggtgcagttccatgcttttggccgagtgttgtccggaacaatccacgccggacaaccagtgaaggtattgggcgaaaattatactctggaggacgaagaagactctcaaatatgtactgtggggcgtctgtggatttccgttgccaggtatcacatcgaagtaaaccgagtccccgccggcaactgggtgctgattgagggcgtagaccagccaattgttaaaactgccactatcaccgagccccggggcaacgaggaagcgcagatcttcagacccctcaaattcaacaccacttcagtgataaaaattgcagtggaacctgtgaaccccagcgagctccctaagatgctggatgggctgcgtaaagtgaacaaatcctacccttctctcaccaccaaagttgaggagtcaggcgagcacgttattctgggcacaggtgaactatacctcgactgcgtgatgcacgacctgagaaagatgtattccgagattgacataaaagtcgcagaccctgtagtgactttctgcgagacagtggtggagacatctagcctgaagtgctttgccgagacccctaacaaaaaaaacaagatcacaatgatcgccgagccacttgaaaaaggactggcagaagacatcgaaaacgaagtcgtccaaatcacctggaaccggaagaaacttggagagttctttcaaacaaagtatgattgggatctcctggccgccagaagtatttgggcttttgggccagatgcaacaggaccgaacatactggtggatgacactttgccctcggaggtagataaggccctgctgggcagtgtcaaggatagtattgttcagggctttcagtggggtacaagagaggggccgttatgcgatgaactgatacggaatgtgaaattcaaaatcctggatgcggtcgtggcccaggagccattgcatcgcggtggcgggcagataattcccaccgctaggcgtgttgtgtacagcgcttttctcatggcaaccccaagactgatggagccctactacttcgtcgaggtgcaggctcccgctgattgtgtctcggcagtttacactgtgcttgcccgtagacgtggccatgttacgcaagatgcccctattccaggctctccgctctacacaattaaggcctttatcccagccattgattccttcggcttcgagactgaccttagaacccatactcaggggcaggcctttagtttgagcgttttccaccattggcaaattgtccccggcgatcccctggacaagagcattgtgataaggcccctggaaccccagcctgccccacacctggccagggaatttatgatcaagactcggcggagaaagggactatctgaggatgtttccatctcaaaattcttcgatgatcccatgttattggagctcgctaaacaagatgtggtgctaaactaccccatgtag

SEQ ID NO: 92973 - DNA, 2814 bp, Artificial Sequence
  derived and/or modified sequence
atggacgacgacgacgacgatgacgacgtgggcgatcatgatgatgaccaccccgggatggaggtggtcctgcacgaggacaaaaagtattatccaactgccgaggaggtgtacggtcctgaggttgagaccatcgttcaggaagaagacactcagccattaactgaacctatcattaagccggtgaaaacgaaaaagtttaccctcatggaacaaactcttcccgtcacagtgtacgagatggactttctggctgacttgatggacaattctgagttgatccggaacgtcacactatgtggccacctgcatcacggtaagacctgctttgtagactgtttgatcgaacagacccacccagagattcggaaacgctacgaccaggacctttgctataccgatatcttatttaccgagcaggaaaggggcgtcgggatcaaaagcacaccagtgactgttgtgctcccagacacaaaagggaaatcttacctgtttaatattatggatacacccgggcatgtcaattttagtgatgaggtgacggccggattgagaatttctgatggagtagtgttattcatcgacgccgcagaaggggtgatgcttaatacggagcgtttaatcaaacatgccgttcaggagcggctcgccgtgactgtttgcataaacaagattgatcgattaatcctggagctgaagctgccgcccactgatgcctattataagctgagacacatagtggacgaggtgaacggcctgatctccatgtactccacagatgaaaacctcatactgagccccctgcttgggaatgtgtgcttctctagcagccagtactctatttgttttacactcgggtccttcgcaaaaatctatgcagatacttttggcgacattaactaccaggagtttgcaaagagactctggggggacatttacttcaatccgaagactaggaagttcaccaaaaaggcacccacttcttcatcgcaacggagctttgtagagttcattctggagccgctctacaaaatactggcccaggtcgtcggagacgtggatacgagcctgccgcggactcttgatgagctcggcatccacctcacaaaggaggagctaaagctgaatatccgaccactgctccgcctggtctgcaaaaaattttttggggaattcacaggttttgttgacatgtgtgtgcaacacataccatccccaaaggtcggcgctaagcctaaaatcgagcatacgtatacaggcggagtggactcagatctgggggaggctatgagcgattgtgaccctgacggacccctaatgtgccatacaacaaaaatgtattccactgacgacggggtgcagtttcacgctttcggacgcgtgctgtctggcaccattcacgccggccagcctgttaaagtgttgggagaaaactatacactcgaggatgaggaggactctcagatctgtaccgtgggtagattgtggatctcggtggctcgttaccacattgaagtaaaccgggtccccgccggaaactgggttcttatcgaaggagtggatcagccaatagtgaagacagcaacgataaccgaacctcgagggaacgaggaggcacagatattccgccccctgaaattcaataccacatccgtcattaaaatcgctgtcgagccggtgaacccaagcgaacttcccaagatgctcgacgggttgcggaaagtgaacaagagctacccatcactaacaactaaggtggaggaaagtggggagcatgttatactgggcaccggggagttatatctggattgtgtcatgcacgatctgagaaagatgtactccgagattgatatcaaggtggctgatcccgtggtcacattttgcgaaaccgtggtggaaacctcttcgcttaagtgcttcgctgagaccccaaataaaaaaaataaaatcacaatgatagccgagcctttagagaagggactggctgaagacatcgagaacgaggtggtgcagattacgtggaacagaaagaagctcggcgaattcttccagaccaagtatgattgggatctgttggcagccagatcaatctgggcttttggcccagatgccaccggcccgaatattctggtggacgacacgctgccatccgaggtggacaaggccctactcggcagcgtgaaagattccattgttcaaggattccagtgggggacccgagagggtccgttgtgtgacgagctaatacgcaacgtcaagttcaaaattctcgacgctgtggtggcgcaagaaccacttcacagaggaggcggccaaatcattccgacagcgaggcgcgtcgtatacagcgcctttcttatggcgaccccccgtctaatggaaccctactacttcgttgaagttcaggccccggctgactgtgtgtctgccgtgtataccgtgttggcccgcagaaggggccatgtgactcaggacgcccctatccctggctcccctttatataccattaaagcttttatccccgccatagactctttcggctttgagactgatctccgcacacacacgcaaggccaggcattcagcctgagcgtgtttcatcactggcagatcgtgcccggagaccctcttgataaatccatcgtaattcgaccactagagccgcagccagccccccacctggctcgggaatttatgatcaagactagacgccgcaaaggtctgagcgaggacgtgtccatctcaaagttcttcgatgatcctatgctgctcgagttagccaagcaggacgtcgttctgaattaccccatgtag

SEQ ID NO: 92974 - DNA, 2919 bp, Artificial Sequence
  derived and/or modified sequence
atggacaccgatctgtatgacgaatttggaaattacatcggtccagagctggatagcgacgaggacgacgacgagctcggacgcgagacaaaagatctggatgaaatggatgatgacgacgacgatgacgatgttggagaccacgacgacgatcatcccggcatggaggtcgtcctgcacgaggacaaaaagtactaccccaccgcagaggaggtttacggtcctgaggtagagaccattgttcaggaggaggacactcagccgctcactgaacccatcatcaagcctgtcaaaacaaaaaaattcacattaatggaacagaccctccctgtcaccgtttacgagatggattttctggccgacctgatggacaactcagaactcattaggaacgtgaccctctgcggacatctgcatcatggaaagacatgtttcgtcgattgcctgatagaacagactcaccccgagatcaggaaacgatatgatcaggacctttgttatactgacattctgtttactgagcaagagcgaggcgttggcattaaaagcacccccgtgaccgtcgtgctgcccgataccaagggaaagagttatctgttcaacataatggataccccgggacacgtgaacttttctgacgaagtaacagctggcctccgcataagcgacggcgtcgtgctcttcatcgatgccgccgagggagtcatgcttaacacagagcgcctgatcaagcatgctgtacaggaaaggctcgctgtcacagtttgcatcaataaaattgatcgcctgatcctggaactgaaactcccccccactgatgcctactacaagctcaggcacatcgtagacgaagtgaatggacttatctctatgtacagcacagatgagaatttgatcttgagcccattactggggaacgtgtgtttttcctccagccaatattctatatgcttcaccctaggctcctttgctaagatttatgccgacaccttcggggacatcaactaccaggaattcgcaaagagactctggggtgacatttacttcaacccaaaaacccgcaagtttaccaagaaggcccctacaagttcctctcagagaagtttcgtagagtttatattagagcctctctataaaattctcgcacaggttgtaggtgacgtggacacaagccttccacgcacccttgatgagctcgggatccatctcacaaaggaggagctcaaactgaacattagaccactgttgcgccttgtgtgcaaaaagttcttcggcgagttcacaggctttgttgatatgtgcgtgcagcacatccccagccctaaggtaggggcaaagccgaagatagaacacacctacaccggaggcgtcgactccgacttgggcgaggccatgagcgactgcgaccccgacggtccactaatgtgtcacaccaccaagatgtacagtacagacgacggggttcagtttcatgctttcggcagggttctcagcggcaccatccacgccgggcagccggtcaaagtactgggcgaaaactatactctggaagatgaagaggactcgcagatctgcactgtgggtcgtctgtggatttcagtggccaggtaccatatcgaagtgaatagagtccctgccggaaactgggtacttattgagggtgtggatcagccaatcgttaagactgctactattactgagcccaggggcaacgaagaggctcagatttttcggcccttgaagttcaacactacaagtgtgattaagattgcggtagagcccgtgaacccaagtgagcttcccaagatgttggacggactgagaaaagttaataaatcatatccctctctgacaaccaaggtggaggagtccggcgaacacgttatacttggcacaggggaactgtacctagattgtgtgatgcacgacctccgcaagatgtactctgaaattgacattaaggtggcagacccagtcgtgactttttgtgaaacggtcgtagagacatcatcactcaagtgttttgccgaaaccccaaataaaaagaacaagatcacaatgatcgccgaacccctggagaaaggactagcggaagacattgaaaacgaggtagtccagattacatggaatcggaaaaagctcggggagtttttccaaacaaagtacgactgggacctcctagcagctagaagtatctgggcctttggcccagatgccacaggcccaaatatcctggtggatgatacgctgccctccgaagtggacaaggctctgctgggttctgtcaaagattcaatagtgcaggggttccaatgggggactcgggaagggcccctctgtgatgaactgattcgtaatgtgaaattcaagatcctggacgccgtcgtggctcaagaacctctgcatagaggtggcggtcaaatcatccctaccgctcgcagagtggtatattcagcctttctgatggctacgcccagactaatggaaccttattacttcgtggaagtgcaggccccagcagactgtgtcagtgccgtgtacaccgtactggcccggcggagaggccacgtgacacaggatgccccgatccccgggtctccgttatacaccatcaaagcattcataccagcgatcgattctttcgggtttgagaccgatctccggactcacacacaggggcaggcattcagcctctccgtgtttcaccactggcaaatagtaccaggggatcctcttgataaatccatagtgattagacccctggagccccaacctgcacctcaccttgcccgcgagtttatgattaagacacgccggagaaagggtctaagtgaggacgtcagcatcagtaagttctttgacgaccccatgctcttggaactcgccaaacaggatgtcgtcctgaactatcctatgtag

SEQ ID NO: 92975 - DNA, 2889 bp, Artificial Sequence
  derived and/or modified sequence
atggacacagacctgtatgatgaatttggaaactacatcggccctgagctggacagtgatgaagatgatgatgagctgggccgggagaccaaggacctggatgagatggatgatgatgatgatgatgatgatgtgggggaccatgatgatgaccaccctggcatggaggtggtgctgcacgaggtgtatggccctgaggtggagaccatcgtgcaggaggaggacacccagcccctgacagagcccatcatcaagcctgtgaagaccaagaagttcaccctgatggagcagaccctgcctgtgacagtgtatgagatggacttcctggccgacctgatggacaacagcgagctgatcagaaatgtgaccctgtgtggccacctgcaccacggcaagacctgctttgtggactgcctgattgagcagacccaccctgagatcaggaagagatatgaccaggacctgtgctacacagacatcctcttcacagagcaggagcggggcgtgggcatcaagagcacccctgtgacagtggtgctgcctgacaccaagggcaagagctacctgttcaacatcatggacaccccaggccacgtgaacttcagtgatgaggtgacagctggcctgcgcatcagtgatggagtggtgctcttcattgatgctgctgagggcgtgatgctgaacacagagcggctcatcaagcatgctgtgcaggagcggctggccgtgacagtgtgcatcaacaagattgacaggctcatcctggagctgaagctgcccccaacagatgcctactacaagctgcggcacatcgtggatgaggtgaatggcctcatctccatgtacagcacagatgagaacctgatcctgagccccctgctgggcaatgtgtgcttcagcagcagccagtacagcatctgcttcaccctgggcagctttgccaagatctatgctgacacctttggagacatcaactaccaggagtttgccaagaggctgtggggagacatctacttcaaccccaagaccaggaagttcaccaagaaggcccccaccagcagcagccagaggagctttgtggagttcatcctggagcccctgtacaagatcctggcccaggtggtgggagatgtggacaccagcctgcccaggaccctggatgagctgggcatccacctgaccaaggaggagctgaagctgaacatccggcccctgctgcggctggtgtgcaagaagttcttcggggagttcaccggctttgtggacatgtgtgtgcagcacatccccagccccaaggtgggcgccaagcccaagattgagcacacctacacaggaggagtggacagcgacctgggggaggccatgtctgactgtgaccctgatggccccctgatgtgccacaccaccaagatgtacagcacagatgatggagtgcagttccacgccttcggccgggtgctgagcggcaccatccatgctggccagcctgtgaaggtgctgggggagaactacaccctggaggatgaggaggacagccagatctgcaccgtgggccgcctgtggatctctgtggcccgctaccacatcgaggtgaacagagtgcctgctggcaactgggtgctgattgagggcgtggaccagcccatcgtgaagacagccaccatcacagagcccagaggaaatgaggaggcccagatcttccggcccctgaagttcaacaccaccagcgtcatcaagattgctgtggagcctgtgaaccccagcgagctgcccaagatgctggatggcctgaggaaggtgaacaagagctaccccagcctgaccaccaaggtggaggagagcggggagcacgtgatcctgggcaccggggagctgtacctggactgtgtgatgcatgacctgaggaagatgtacagcgagattgacatcaaggtggccgaccctgtggtgaccttctgtgaaacagtggtggagaccagcagcctgaagtgctttgctgagacccccaacaagaagaacaagatcaccatgattgctgagcccctggagaagggcctggccgaggacattgaaaatgaggtggtgcagatcacctggaacaggaagaagctgggggagttcttccagaccaagtatgactgggacctgctggccgcccggagcatctgggcctttggaccagatgccaccggccccaacatcctggtggatgacaccctgcccagcgaggtggacaaggccctgctgggctctgtgaaggacagcatcgtgcagggcttccagtggggcacccgggagggccccctgtgtgatgagctgatcagaaatgtgaagttcaagatcctggatgctgtggtggcccaggagcccctgcaccggggcggcggccagatcatccccacagccaggagagtggtgtacagcgccttcctgatggccaccccccggctgatggagccctactactttgtggaggtgcaggccccagctgactgtgtgtctgctgtgtacacagtgctggccaggagaagaggccacgtgacccaggatgcccccatccctggcagccccctgtacaccatcaaggccttcatcccagccatcgacagctttggatttgaaacagacctgcggacccacacccagggccaggccttcagcctgtctgtgttccaccactggcagatcgtgcctggggaccccctggacaagagcatcgtcatccggcccctggagccccagcctgccccccacctggcccgggagttcatgatcaagaccaggaggaggaagggcctgtctgaagatgtgtccatcagcaagttctttgatgaccccatgctgctggagctggccaagcaggatgtggtgctgaactaccccatgtag

SEQ ID NO: 92976 - DNA, 2814 bp, Artificial Sequence
  derived and/or modified sequence
atggatgatgatgatgatgatgatgatgtgggggaccatgatgatgaccaccctggcatggaggtggtgctgcacgaggacaagaagtactaccccacagctgaggaggtgtatggccctgaggtggagaccatcgtgcaggaggaggacacccagcccctgacagagcccatcatcaagcctgtgaagaccaagaagttcaccctgatggagcagaccctgcctgtgacagtgtatgagatggacttcctggccgacctgatggacaacagcgagctgatcagaaatgtgaccctgtgtggccacctgcaccacggcaagacctgctttgtggactgcctgattgagcagacccaccctgagatcaggaagagatatgaccaggacctgtgctacacagacatcctcttcacagagcaggagcggggcgtgggcatcaagagcacccctgtgacagtggtgctgcctgacaccaagggcaagagctacctgttcaacatcatggacaccccaggccacgtgaacttcagtgatgaggtgacagctggcctgcgcatcagtgatggagtggtgctcttcattgatgctgctgagggcgtgatgctgaacacagagcggctcatcaagcatgctgtgcaggagcggctggccgtgacagtgtgcatcaacaagattgacaggctcatcctggagctgaagctgcccccaacagatgcctactacaagctgcggcacatcgtggatgaggtgaatggcctcatctccatgtacagcacagatgaaaatctcatcctgagccccctgctgggcaatgtgtgcttcagcagcagccagtacagcatctgcttcaccctgggcagctttgccaagatctatgctgacaccttcggggacatcaactaccaggagtttgccaagaggctgtggggagacatctacttcaaccccaagaccaggaagttcaccaagaaggcccccaccagcagcagccagaggagctttgtggagttcatcctggagcccctgtacaagatcctggcccaggtggtgggagatgtggacaccagcctgcccaggaccctggatgagctgggcatccacctgaccaaggaggagctgaagctgaacatccggcccctgctgcggctggtgtgcaagaagttctttggagagttcaccggctttgtggacatgtgtgtgcagcacatccccagccccaaggtgggcgccaagcccaagattgagcacacctacacaggaggagtggacagcgacctgggggaggccatgtctgactgtgaccctgatggccccctgatgtgccacaccaccaagatgtacagcacagatgatggagtgcagttccacgccttcggccgggtgctgagcggcaccatccacgccggccagcctgtgaaggtgctgggggagaactacaccctggaggatgaggaggacagccagatctgcaccgtgggccgcctgtggatctctgtggcccgctaccacatcgaggtgaacagagtgcctgctggcaactgggtgctgattgaaggagtggaccagcccatcgtgaagacagccaccatcacagagcccagaggaaatgaggaggcccagatcttccggcccctgaagttcaacaccaccagcgtcatcaagattgctgtggagcctgtgaaccccagcgagctgcccaagatgctggatggcctgaggaaggtgaacaagagctaccccagcctgaccaccaaggtggaggagagcggggagcacgtgatcctgggcactggagagctgtacctggactgtgtgatgcatgacctgaggaagatgtacagcgagattgacatcaaggtggccgaccctgtggtgaccttctgtgagaccgtggtggagaccagcagcctgaagtgctttgctgagacccccaacaagaagaacaagatcaccatgattgctgagcccctggagaagggcctggctgaagatattgaaaatgaggtggtgcagatcacctggaacaggaagaagctgggggagttcttccagaccaagtatgactgggacctgctggccgcccggagcatctgggccttcggcccagatgccaccggccccaacatcctggtggatgacaccctgcccagcgaggtggacaaggccctgctgggctctgtgaaggacagcatcgtgcagggcttccagtggggcacccgggagggccccctgtgtgatgagctgatcagaaatgtgaagttcaagatcctggatgctgtggtggcccaggagcccctgcacagaggaggcggccagatcatccccacagcccggcgggtggtgtacagcgccttcctgatggccaccccccggctgatggagccctactactttgtggaggtgcaggccccagctgactgtgtgtctgctgtgtacacagtgctggcccggcggcggggccacgtgacccaggatgcccccatccctggcagccccctgtacaccatcaaggccttcatcccagccatcgacagctttggatttgaaacagacctgcggacccacacccagggccaggccttcagcctgagcgtcttccaccactggcagatcgtgcctggggaccccctggacaagagcatcgtcatccggcccctggagccccagcctgccccccacctggcccgggagttcatgatcaagaccaggaggaggaagggcctgtctgaagatgtgtccatcagcaagttctttgatgaccccatgctgctggagctggccaagcaggatgtggtgctgaactaccccatgtag

SEQ ID NO: 92977 - DNA, 2919 bp, Artificial Sequence
  derived and/or modified sequence
atggacacagacctgtatgatgaatttggaaactacatcggccctgagctggacagtgatgaagatgatgatgagctgggccgggagaccaaggacctggatgagatggatgatgatgatgatgatgatgatgtgggggaccatgatgatgaccaccctggcatggaggtggtgctgcacgaggacaagaagtactaccccacagctgaggaggtgtatggccctgaggtggagaccatcgtgcaggaggaggacacccagcccctgacagagcccatcatcaagcctgtgaagaccaagaagttcaccctgatggagcagaccctgcctgtgacagtgtatgagatggacttcctggccgacctgatggacaacagcgagctgatcagaaatgtgaccctgtgtggccacctgcaccacggcaagacctgctttgtggactgcctgattgagcagacccaccctgagatcaggaagagatatgaccaggacctgtgctacacagacatcctcttcacagagcaggagcggggcgtgggcatcaagagcacccctgtgacagtggtgctgcctgacaccaagggcaagagctacctgttcaacatcatggacaccccaggccacgtgaacttcagtgatgaggtgacagctggcctgcgcatcagtgatggagtggtgctcttcattgatgctgctgagggcgtgatgctgaacacagagcggctcatcaagcatgctgtgcaggagcggctggccgtgacagtgtgcatcaacaagattgacaggctcatcctggagctgaagctgcccccaacagatgcctactacaagctgcggcacatcgtggatgaggtgaatggcctcatctccatgtacagcacagatgagaacctgatcctgagccccctgctgggcaatgtgtgcttcagcagcagccagtacagcatctgcttcaccctgggcagctttgccaagatctatgctgacacctttggagacatcaactaccaggagtttgccaagaggctgtggggagacatctacttcaaccccaagaccaggaagttcaccaagaaggcccccaccagcagcagccagaggagctttgtggagttcatcctggagcccctgtacaagatcctggcccaggtggtgggagatgtggacaccagcctgcccaggaccctggatgagctgggcatccacctgaccaaggaggagctgaagctgaacatccggcccctgctgcggctggtgtgcaagaagttcttcggggagttcaccggctttgtggacatgtgtgtgcagcacatccccagccccaaggtgggcgccaagcccaagattgagcacacctacacaggaggagtggacagcgacctgggggaggccatgtctgactgtgaccctgatggccccctgatgtgccacaccaccaagatgtacagcacagatgatggagtgcagttccacgccttcggccgggtgctgagcggcaccatccatgctggccagcctgtgaaggtgctgggggagaactacaccctggaggatgaggaggacagccagatctgcaccgtgggccgcctgtggatctctgtggcccgctaccacatcgaggtgaacagagtgcctgctggcaactgggtgctgattgagggcgtggaccagcccatcgtgaagacagccaccatcacagagcccagaggaaatgaggaggcccagatcttccggcccctgaagttcaacaccaccagcgtcatcaagattgctgtggagcctgtgaaccccagcgagctgcccaagatgctggatggcctgaggaaggtgaacaagagctaccccagcctgaccaccaaggtggaggagagcggggagcacgtgatcctgggcaccggggagctgtacctggactgtgtgatgcatgacctgaggaagatgtacagcgagattgacatcaaggtggccgaccctgtggtgaccttctgtgaaacagtggtggagaccagcagcctgaagtgctttgctgagacccccaacaagaagaacaagatcaccatgattgctgagcccctggagaagggcctggccgaggacattgaaaatgaggtggtgcagatcacctggaacaggaagaagctgggggagttcttccagaccaagtatgactgggacctgctggccgcccggagcatctgggcctttggaccagatgccaccggccccaacatcctggtggatgacaccctgcccagcgaggtggacaaggccctgctgggctctgtgaaggacagcatcgtgcagggcttccagtggggcacccgggagggccccctgtgtgatgagctgatcagaaatgtgaagttcaagatcctggatgctgtggtggcccaggagcccctgcaccggggcggcggccagatcatccccacagccaggagagtggtgtacagcgccttcctgatggccaccccccggctgatggagccctactactttgtggaggtgcaggccccagctgactgtgtgtctgctgtgtacacagtgctggccaggagaagaggccacgtgacccaggatgcccccatccctggcagccccctgtacaccatcaaggccttcatcccagccatcgacagctttggatttgaaacagacctgcggacccacacccagggccaggccttcagcctgtctgtgttccaccactggcagatcgtgcctggggaccccctggacaagagcatcgtcatccggcccctggagccccagcctgccccccacctggcccgggagttcatgatcaagaccaggaggaggaagggcctgtctgaagatgtgtccatcagcaagttctttgatgaccccatgctgctggagctggccaagcaggatgtggtgctgaactaccccatgtag

SEQ ID NO: 92978 - DNA, 2889 bp, Artificial Sequence
  derived and/or modified sequence
atggacaccgacctgtacgacgagttcggcaactacatcggccccgaactggacagtgacgaggacgacgatgaactcgggagagagaccaaggatctcgacgaaatggacgacgatgacgacgacgatgatgtgggcgaccacgacgatgatcaccctgggatggaggtggtactgcacgaggtttacggccccgaagttgaaaccatcgtgcaagaggaagacacccaacctttgaccgagccaattattaagcctgtcaagaccaagaagttcactctgatggaacagaccctcccagtgacagtctatgagatggactttctggccgacctgatggacaacagcgagctcattcgcaacgtaaccctatgtggccatctgcatcacggcaagacttgttttgttgattgtttaatcgaacagactcatccagagatccgtaaacggtacgatcaggacctgtgttacacagacatcctgttcacagaacaggagcgcggggtggggatcaaatccacacctgtcactgtggtgcttcccgacactaaggggaaaagctacctgtttaatatcatggataccccggggcacgttaatttttcggatgaggtgacggcagggctgcgtatctcagacggggttgtcctgttcatcgatgccgccgaaggtgtgatgcttaatacagaacggcttattaagcatgccgtgcaggagaggctggcagtgacagtgtgcataaacaaaattgataggctaatcctggaactgaagctgccacccaccgatgcatattataagttgcgacacattgttgatgaggtgaatggcctaatttctatgtattcaaccgacgaaaatctcatactgtcgcccttacttggaaacgtttgcttttcatcctctcagtattccatatgttttaccttaggtagctttgcgaagatttacgcggacacattcggtgatatcaactatcaggaattcgctaagcgcctgtggggggatatctatttcaacccaaagaccaggaagtttaccaaaaaggccccgacaagcagctcccaaagatccttcgtggagttcatacttgagccactttataagatactggcgcaggtggtgggggacgtggatacgtctctcccgcgcactctggacgagctcggtattcatttaaccaaggaagaacttaaactaaatattcgaccacttctgaggttagtgtgtaagaaattttttggagagtttactgggttcgttgacatgtgtgtgcagcacatcccctcccccaaggtgggagcaaaacccaaaatcgagcatacctacactgggggtgtggatagcgatctgggcgaggcgatgtctgattgtgatcctgacggacccctaatgtgccacactacgaagatgtacagcacagatgacggcgttcagttccacgcttttggacgagttctcagcggaaccatacacgcaggccagccagtgaaggtattgggagaaaattacaccctggaagacgaagaggattctcaaatttgtacagtgggtcgactgtggatttcagttgccaggtatcatatagaggtcaaccgcgtccctgcggggaattgggttctcatcgagggagtggaccagccaattgtgaaaacagccaccattacagaaccacgtgggaatgaggaagctcagatcttccgtcccttgaagtttaacacaacctccgtaattaagattgcagtcgagcctgttaatccctccgaattgcctaagatgcttgacggtctgaggaaagtgaacaaatcttatcctagtctcactacaaaagtcgaggagtcaggcgaacacgtcatcctgggaaccggtgagttgtaccttgactgcgtgatgcacgacctgaggaagatgtattccgagatcgatataaaggtcgccgatcccgttgttactttctgcgagaccgtggtggaaacttctagtttaaaatgtttcgccgagacccccaacaagaagaacaagatcaccatgatagcggagccacttgagaagggtctggctgaggacatagaaaatgaggttgttcaaattacctggaacaggaagaagctaggggagttcttccagaccaaatacgattgggatttgctggcggcacggtctatttgggcatttgggcctgatgcaacaggccccaacatcttagtcgatgacaccctgcctagcgaagttgacaaagctcttctgggctctgtcaaagattcgattgtacagggattccaatggggaacccgtgaggggcccctttgtgatgaattgattaggaacgtcaaatttaaaatcctggatgcggtcgttgcccaggaacctcttcatcgcggcggcggtcaaatcatccctaccgcccgacgtgtcgtctactccgcattcctgatggccacaccacggctaatggaaccttattactttgtggaggtgcaggcacccgctgactgcgtttctgccgtctataccgtgttagctagacggaggggccatgtcacccaggacgcccccataccgggaagtcccctgtacactatcaaagcctttatccccgcgatagactcctttggctttgagacagatcttaggacccatacccagggccaagcctttagcctatccgtttttcaccattggcagatcgttcccggtgacccactggacaagtctattgtaatcaggcctctagaaccacagccagctccacatttagcccgcgaattcatgataaaaaccagacggagaaagggtttgtctgaagatgtgagcattagcaaattttttgatgaccctatgttgctcgagctagccaaacaagacgtggttctgaattaccccatgtag

SEQ ID NO: 92979 - DNA, 2814 bp, Artificial Sequence
  derived and/or modified sequence
atggacgacgacgacgacgacgacgacgtgggcgaccacgacgacgaccatcccggcatggaagtcgttctccatgaagacaaaaaatactatccaactgcggaagaggtctacgggcctgaggtggagacaattgtgcaagaggaggatactcagcctttaacggagccaataatcaaacctgttaaaaccaaaaaattcaccttgatggaacagacactgccagtcactgtgtacgaaatggattttctcgccgatctgatggacaattctgagctgattcgaaacgtaacgctctgcggacacctccatcacgggaagacttgttttgtggactgcttgattgaacaaacccatccagaaattcggaaaagatatgaccaggacctctgctacactgacattctgtttactgaacaggaaaggggggtggggatcaaatccacccccgtgactgtggtcttacctgacacgaaaggcaagagttatttgttcaatattatggacaccccgggccacgtgaacttctcggatgaggtgaccgccgggctgagaatttccgatggtgtcgtgctcttcatcgatgccgccgaaggagtcatgttgaatacggaaagactgatcaaacatgctgtacaggaacgacttgcagttacagtttgtataaacaaaatcgaccggctgatcctcgaattgaagctgcctccaaccgatgcttattacaaactgcgacacatagtggacgaggtcaatggacttattagtatgtatagcacagacgaaaatttgatcttgtcacccctgctcggcaacgtgtgcttttcctctagccagtattccatttgttttaccttgggatcgtttgcaaaaatttatgccgacacttttggcgatattaactaccaggagtttgcaaaacggctgtggggcgatatttactttaaccctaagaccagaaaatttacgaagaaggcacccacatccagctctcagcgatctttcgtggaatttatcctggaacccctatacaagattctcgcacaggtggtgggagatgtggacacttccctcccgaggactttggatgagctgggaattcaccttacgaaagaggaactgaaactaaatattagaccactcttgcgcctggtgtgcaagaaattttttggcgagtttactgggttcgtcgacatgtgtgtccagcacattccgtcccccaaggttggagccaaacccaagatcgagcatacatacacaggtggcgtggactctgacttgggcgaggctatgagtgattgtgaccctgacggcccattgatgtgtcacaccacaaaaatgtacagcacagatgatggagtgcagtttcacgctttcggccgagtgctcagtggcacaatccatgccggacagcccgtgaaggtcttaggtgaaaactatacgctcgaagatgaggaagatagccaaatctgcaccgttgggcgattgtggatcagcgtggctcgttatcacatcgaagtgaatagggtgcccgctgggaactgggtcctgattgagggagtggaccaacccatagtgaagaccgccaccatcactgagccccggggcaacgaagaagcgcaaatctttcgcccactgaaatttaacacaacctcggtgataaagattgccgtcgagccagtgaatccaagtgagcttcctaagatgctggacggcttaagaaaagtgaacaaatcctaccccagcctgactacaaaggttgaggaatccggcgagcatgtcattctagggactggggaactctaccttgattgtgtgatgcatgacctgagaaaaatgtactccgagatcgacatcaaggtggccgatccagtggttactttctgcgaaacagtagttgagaccagcagcctcaagtgtttcgccgagacccccaacaagaaaaataagatcaccatgatcgctgagcctctggaaaagggtctagcagaagatatcgagaatgaagtagtgcagatcacgtggaatagaaagaagttgggggaatttttccagacaaaatacgattgggacctcttggccgcacgaagcatttgggcctttggaccagacgccacaggaccgaacatcctggttgatgataccctgccatcagaagtggacaaagcactgctgggcagcgtgaaagactcaattgtacaggggtttcagtgggggactagagaaggaccgctctgcgacgagctgataagaaatgtcaaattcaaaattttagatgcagtcgtagctcaggaaccactgcaccgggggggcggccagatcatcccaaccgcacgacgagtcgtttactccgcattcctgatggccacccctcgcttgatggagccatattacttcgtcgaggtgcaggccccagctgactgcgtgtcagctgtgtataccgtcctggcacgtagacgagggcatgttacccaggacgcaccaatccccggcagtccgctgtatactattaaagccttcattcctgccatcgatagctttggtttcgagaccgatcttcgcacgcatacgcaaggccaagccttctcactctccgtgttccatcactggcagatcgtgcccggagaccctctggataagtctatcgtgattcgccctctagaaccccaaccagctccccatttagcacgggaatttatgattaagacacgaagaagaaaagggctgagcgaggacgtctctatctcaaagttctttgacgaccccatgctgctcgaactggccaagcaggatgtggttctcaattatccgatgtag

SEQ ID NO: 92980 - DNA, 2919 bp, Artificial Sequence
  derived and/or modified sequence
atggacaccgacctgtacgacgagttcggcaactacatcggccccgagcttgattctgatgaagatgacgacgagttaggtcgagaaactaaggaccttgacgagatggatgatgacgatgatgatgacgatgtaggtgaccacgatgatgaccacccagggatggaagtggtgcttcacgaagataagaaatattatcccacggccgaggaggtttacgggccagaggtcgagactattgttcaagaagaagacacgcaaccattgacggagcccattataaagccagtcaaaacaaaaaagtttactctcatggaacagacactgcccgttactgtgtacgagatggattttctagctgacctaatggacaactctgagttgatccggaacgttacattatgcggccatctccaccatggaaaaacctgtttcgtggattgtttaattgagcagacgcaccctgagattagaaagcgctatgatcaggacttgtgctatactgacatactgttcacagaacaagaacgcggcgtggggatcaaaagtacccctgtgaccgtggttctcccggataccaaggggaaaagctacctctttaatattatggacacaccggggcatgtgaacttcagcgacgaagtgacagccggactgcggattagcgatggagtggtgctcttcattgacgccgctgagggggttatgctgaataccgaacgactgatcaagcacgccgttcaggagcggttggctgttaccgtttgcatcaataagattgataggctaatcctcgagttaaagttgcctccaaccgacgcttactacaaactcagacacattgtcgatgaggtgaacggccttattagtatgtacagtaccgatgaaaacctgatactgagtcctctactgggtaatgtgtgcttcagcagctcacagtacagcatttgctttaccttaggatccttcgctaaaatttacgccgatacattcggagatatcaactatcaggaattcgctaagcgactttggggcgatatttacttcaacccaaagacaagaaagttcaccaagaaagcaccaacgtccagctcccagcgctctttcgttgaattcattctagagcccctgtataaaatcctcgctcaggttgtgggtgacgtggacacaagtttgccgagaacccttgatgagttgggcatccatctgactaaagaggagctaaagctgaacatccggccactactacgcttggtatgtaagaaatttttcggcgagttcaccgggttcgtggacatgtgtgtgcagcatattccgtcaccgaaagtcggagcgaaacctaagattgaacacacctataccgggggcgtagactccgatcttggcgaggccatgtctgactgcgatcccgacggaccactgatgtgccatacaacgaagatgtattcaaccgacgacggcgtgcaattccatgcttttggcagggtgctgagcggaaccattcacgccggacagccggtcaaggtgctaggcgaaaactatacattggaggacgaggaggattcacaaatttgcactgtgggccggctttggatttccgtcgctcgctatcatatcgaggtgaatcgggtgcccgctggtaactgggtactgattgagggggttgaccaacccatagtgaagacggccacgattaccgaaccccgcggcaatgaagaagctcaaatatttcgacccctgaagttcaatactacgagtgtaatcaagatcgcagtggaacctgtgaacccatctgaacttccaaagatgctggatgggctgcgcaaggtgaacaagagctacccctctctgacaactaaagtagaggagagtggcgagcacgtgatcctagggacaggtgaactttatctcgattgcgtcatgcacgacctacgcaaaatgtattcggagatagatataaaagtggcagatcccgtggtcactttttgtgagactgtagtagaaaccagttctcttaagtgtttcgcagagacccctaataagaaaaacaagatcacaatgattgcagaaccgctagaaaagggactggccgaagacattgagaatgaggtggtgcagataacatggaataggaaaaagctgggtgaattttttcaaacaaagtacgattgggacctactagccgccaggtctatttgggctttcgggccagatgccaccgggccaaatatactggtagacgatactctgccgagtgaagtggataaggccctcctggggtctgtgaaagactctatcgtgcaggggtttcaatggggtacccgggaggggccgttgtgtgacgaactgattcgcaatgttaagttcaagattctggacgccgtggtggctcaggaaccactgcacaggggaggaggacagattattccaactgccaggagggtggtctactcagcctttctgatggctaccccccgtctcatggaaccctactacttcgttgaggtgcaggctcctgccgactgtgttagcgcagtatacacagtcctcgctcggcgtcggggacatgttacccaagacgcacctatccccgggagtcccctctatactatcaaggcgtttatcccggcaatcgacagctttggcttcgaaactgacctgcggacccacacacagggtcaagccttttccctgtccgtgtttcaccattggcagatcgtccctggtgatccactcgataaatctatcgttatccgaccgctggaaccgcagcccgcgccccaccttgctagagaattcatgattaaaaccagacggcgtaaaggcctttctgaagatgtgagtataagcaagttcttcgacgatcctatgctgctggagttggctaagcaggacgttgtgcttaattaccctatgtag

SEQ ID NO: 92981 - DNA, 2889 bp, Artificial Sequence
  derived and/or modified sequence
atggacaccgatctgtatgacgagttcggaaactacattggcccagaacttgactctgatgaggatgatgatgagctcggccgagaaacaaaagacctggatgaaatggacgacgatgacgacgacgacgatgtgggagatcatgacgatgatcacccgggaatggaggtcgttctgcatgaggtatacggtcccgaggtagaaacaattgtgcaagaggaagatactcagcccctcacagaacccatcatcaagcctgtaaagacaaagaagtttaccttaatggagcaaacactgccagttacagtatatgaaatggactttctggctgacctgatggataatagcgagctcatccggaacgtgactttgtgcggtcatctccaccatggaaaaacttgctttgtggactgcttaattgaacagacccacccagaaatcaggaaaaggtatgaccaggacctttgctataccgatatcttgttcacagagcaagagcggggagtcgggattaagtctaccccagtgactgtggtactgccggacacaaagggcaaaagttatttgtttaacatcatggatacacctggtcacgttaactttagcgatgaagttacagctgggctgagaatttccgacggagtggttttgttcatcgacgctgccgagggcgtaatgctgaacacagagaggctcatcaaacacgccgtgcaggaacgccttgccgtcacagtctgcataaacaagattgacaggttgatcctcgaactcaagctgcctcctactgatgcgtattacaagcttcgtcacattgtagacgaggttaacgggctcatttccatgtacagtaccgatgagaaccttattctctccccactactggggaacgtttgtttctctagctcccagtatagcatctgcttcactctcggaagcttcgccaagatttatgccgacaccttcggggatataaactaccaggaatttgccaagaggctgtggggcgacatttatttcaaccctaagactcggaaattcaccaaaaaagccccaacatcctcaagccagcgatcctttgtggagtttatactagaaccgctctacaagattttagcccaggtagtgggggatgtggatacttcactccctcgcaccctggatgaattgggcattcatctgacaaaggaggaactgaagttgaatattaggcctctcctgcgtcttgtgtgtaaaaaatttttcggcgagttcacaggcttcgtggacatgtgtgtacaacacattccaagtcccaaggtaggagccaaaccaaagatcgagcacacatataccggcggagtggattccgatcttggcgaggcgatgtcagattgtgatcccgacgggcctctgatgtgtcacaccacgaagatgtatagtaccgacgacggagtgcagtttcatgcatttgggagggtcctgagcggcacaattcacgccggacagccggttaaagtgctcggtgaaaattatactttggaggatgaagaagactctcagatctgtacagtgggcagactctggatatcagtggccagataccatatagaagtgaaccgcgtcccggctggaaattgggtcttaattgaaggcgttgaccagcccattgtaaagacggctacaattactgagccacgaggcaatgaggaggctcaaatcttcaggccactaaagtttaacacgacgtctgtgattaagatcgccgttgagccggtgaaccctagtgaactacccaaaatgctggacggccttcgaaaagttaataaatcttatccctcactgactacaaaggtagaagagagtggcgaacacgtgattctgggaacgggtgagctatatttggactgcgtaatgcacgacttgaggaagatgtattccgaaattgatattaaggtggctgaccctgtcgtgactttttgcgaaacagtagtggagaccagtagcctcaaatgctttgccgagactccgaataagaaaaacaagatcacaatgattgctgagccactggagaagggtctggccgaggatatagaaaatgaagttgtccagataacctggaaccgcaaaaagctgggtgaattcttccagacgaaatacgactgggatctgctcgcagctagatccatttgggcgttcggcccagatgccaccggaccaaatattctggtagacgatacactcccatcagaggtcgataaggcattactgggatcagttaaggacagtatagtgcagggctttcaatggggcaccagagaagggcctctgtgtgatgagctcattcgaaacgtgaagttcaagattctcgatgcggtcgtagctcaagaaccccttcacagaggtggaggtcagataattccaaccgcccgacgcgtggtgtacagtgcatttctgatggctacacctagattgatggaaccctactacttcgtcgaggtccaggcacctgccgactgtgtgagtgccgtctacacagtgctggcccgacgcaggggtcacgtaactcaggatgcgcctattccagggtctcccctgtataccatcaaggcatttatccccgcaatcgatagctttggtttcgagacggacctgcggactcacacccaaggtcaggctttctctctgtcagtcttccaccattggcaaatcgtccccggtgaccccctggataaaagcatcgtcattcgccctcttgagccacaacctgccccacatctcgctagggagtttatgatcaaaaccagaagacgcaaagggctgagtgaggacgttagtatttcaaagttcttcgatgacccaatgctgctcgaactggcaaaacaggacgtggtgcttaactaccccatgtag

SEQ ID NO: 92982 - DNA, 2814 bp, Artificial Sequence
  derived and/or modified sequence
atggatgatgacgacgacgacgacgatgtcggggaccatgatgatgatcacccgggtatggaggtggtgttacacgaggataagaagtactatccgactgccgaagaggtgtacggccctgaagtcgaaacgatagtgcaggaggaggacacgcaaccgctgacggagccaattatcaaacccgtgaagaccaagaagttcactctgatggagcaaactcttccagtgacagtgtatgagatggatttcctggctgatctcatggataattctgaattaatccggaacgtgacattatgcggacatctccatcacggaaaaacctgcttcgtggattgtttaatcgagcagactcacccggaaattcgaaagcggtatgatcaggacctgtgctacacagatatcctatttaccgagcaagagaggggggtagggattaagtccaccccagtgaccgtggtcttaccagacacgaagggcaaaagctaccttttcaatatcatggatactccaggacacgtcaacttctcggatgaagttaccgcagggctccgtatctccgatggcgtagtgctgtttattgatgccgctgaaggggtcatgctgaacacagagcgcctcatcaagcatgccgtgcaggaaagactcgccgttactgtttgcatcaacaagatcgacagactgatcctggaacttaaattgccaccgacagatgcctattataaactgcggcacatagtggacgaggtgaacggcctgattagcatgtactctaccgacgaaaacttgattttgtcacctctcctcggtaacgtatgcttttcaagttctcagtattcgatctgtttcactctcggctccttcgccaaaatctatgccgacacattcggcgacataaattaccaggagttcgccaagcgtctgtggggtgatatatactttaatccaaaaacccgcaaattcacaaagaaagcacccacaagctcatcccaacgcagttttgttgaatttatccttgaaccactgtataaaatacttgcccaggtggttggagatgtcgacacatccctgccgaggacactggacgaacttggaatacacctgacaaaggaagagctgaagctgaacattaggcccctcctgcggcttgtctgtaaaaaatttttcggtgagtttactggcttcgtagatatgtgcgtccaacacatcccaagccccaaagtgggagccaaacctaagatcgaacacacctacacaggtggggttgatagtgatctgggtgaagctatgtcagattgcgaccctgacggaccattgatgtgtcatacaacgaagatgtacagcaccgatgatggagtccagttccacgcatttggacgtgtcctgtcaggcacaatccacgctggtcaacctgtcaaagttttgggcgaaaattatactttagaggatgaggaagacagccaaatctgtactgtcggaagactatggatctctgttgctagatatcacatcgaggtgaaccgtgtgcctgcaggaaattgggtgctgattgagggtgtggatcagcccatcgtcaaaaccgcaaccatcacagagccacggggaaacgaagaggcccagatttttcgacctcttaagttcaatacaacaagcgtgatcaagatcgccgtggagccggtgaatcctagtgaactgcctaagatgttagacgggctaaggaaggtaaataaaagctacccgtccctgacaaccaaggtggaggaaagtggggaacatgtcatcctgggcaccggggagctctacctggattgcgttatgcacgacctaagaaagatgtattcagagattgacattaaggttgcagatcccgttgtaaccttttgcgagaccgtcgtggaaacgtcctctttgaagtgcttcgcagaaactccaaataaaaagaacaaaattacgatgatcgccgagcccctggagaaaggtctggccgaggacatcgaaaacgaagtcgtgcaaatcacttggaaccgcaagaagcttggagagttcttccagacaaagtatgactgggacctgctggccgctaggtccatctgggcgttcggtcctgacgccaccggccctaacattctcgtggacgatacgctcccgagcgaggtagacaaggccctgttggggtccgttaaagactctattgtacaaggcttccagtggggaacgcgggaaggtcccctgtgcgacgagctcatccgcaacgtgaagtttaaaattctggatgccgtcgttgcccaagaaccactgcaccgcggtggaggccaaattattccaacagccagaagagtggtgtattctgcctttctcatggctacacccagacttatggagccatactatttcgtggaggtccaagctcccgcagattgtgtgagtgctgtgtataccgtgcttgctagacgaaggggccacgtaacacaggatgccccaattcccggaagcccactttatactattaaggcttttataccggctattgactcatttgggttcgagacagacctccgaacacacacacaggggcaggcctttagcctctccgtgttccatcattggcagatcgtgcctggcgatccactcgacaagtccattgtgatccggccattggagccacagcctgccccacatctggccagagaattcatgattaaaactcgaagaaggaaaggtctgtccgaggatgtgagcattagtaagttcttcgacgacccgatgctcctggaactggccaagcaggacgtggtgctcaattaccccatgtag

SEQ ID NO: 92983 - DNA, 2919 bp, Artificial Sequence
  derived and/or modified sequence
atggacaccgacctttacgacgagttcgggaattacatcggccctgagctggatagcgatgaagatgatgacgaacttggcagagaaaccaaagatctcgacgaaatggacgacgatgacgatgacgacgacgttggtgatcacgatgacgaccatccaggaatggaggtagttctccatgaggataaaaaatactacccgacggccgaggaagtctacggtccggaggtcgaaaccatcgtgcaagaggaagacacacaaccactgacagaacccatcataaagcctgtaaagaccaagaagttcactttaatggaacagacactgccagtcacagtgtatgagatggattttctagccgatctgatggacaattctgagctcattcggaacgtgacactgtgcgggcacctgcatcacggcaagacttgcttcgttgattgtctgatcgaacagactcacccagagatccgcaagcgctacgatcaagatctgtgttacactgacatcttgtttacagagcaagagaggggcgttgggatcaagtcaactcctgtgacagtggtgctcccggacactaaaggcaagagttatttatttaatattatggatacccctggccatgtcaattttagcgacgaggtgaccgccggattgcggatctcagatggagtggtcctcttcatcgacgctgctgagggcgtgatgctgaacacggagaggctgattaaacatgcagtccaggagagactcgcagtgactgtctgtatcaacaagatagatcgcctgattcttgagttgaagttaccaccaacggatgcttactataagctaagacacatagtggacgaagtcaatggactcattagcatgtatagtactgacgagaatctgattctgtcccctcttctggggaatgtctgtttcagctcctcacaatacagcatttgctttacactggggagctttgcaaagatttatgccgacactttcggcgacataaactaccaggaattcgctaaacgtctgtggggtgatatatattttaaccccaaaacacggaagttcactaagaaggcacctacctcaagttctcagcgttcctttgtggaatttattcttgagccgttgtataaaatccttgcacaggttgtcggggatgtggatacttctctcccccgaacactggacgaactgggaattcacctgaccaaggaggagttaaaacttaatatccgaccactccttcggcttgtgtgtaagaaattctttggcgaatttaccgggtttgtcgacatgtgtgtccagcacatcccatcccccaaggtcggggctaagcccaagatcgaacatacttacacaggcggagtcgacagtgatctcggtgaggcgatgtcagattgtgatccggacgggccactaatgtgccataccacaaagatgtactctacagacgatggagtgcagttccatgccttcggtcgggtgctctctggcacaattcacgcgggtcaacccgtgaaagtgttgggcgaaaattacacactagaggatgaagaagattcgcaaatatgcacagtgggcagactctggataagcgttgccagataccacatagaagtgaaccgcgtgccagccggtaattgggtgttgatagagggcgtggaccagcctatcgtaaagactgcaacaataaccgaaccccgtggcaacgaggaagcacagatcttcagaccgttgaagtttaatacgacttcagtgataaaaatcgcagtggaacctgtaaacccctccgaactgcccaaaatgttggatggcttgagaaaggtgaataaaagttatccgagcttaactacaaaggtggaggaaagcggggaacacgttattttaggcactggagagctatacctagactgtgtcatgcatgacttgcgtaagatgtactcggagatcgacatcaaagtggcagacccagttgttactttctgtgaaacagtggttgagacatcctcgctaaagtgttttgccgagacacctaataagaagaataagatcaccatgattgccgagcccctggagaaggggctggccgaggacatcgagaacgaggtagtgcagatcacttggaataggaagaagctcggggaattcttccagaccaagtatgattgggacctactcgcagcaaggagcatctgggcattcggacctgatgctacaggtcctaatattcttgtcgacgacacactgccctcagaagtggataaggcactgctggggagtgttaaggatagcatagttcagggctttcaatggggcacccgggaagggccactctgtgacgagctcatacgcaacgtaaagttcaaaatcctcgatgccgtagtggcgcaagaaccgctgcatcgcggagggggacagatcataccaactgcccgtagggtggtgtacagcgctttcttaatggccaccccaagactgatggaaccctattacttcgtagaggtccaggcccctgccgactgcgtctcggccgtctacaccgtgttggctcgccgtaggggtcacgtcactcaggacgccccaattcccggttctcccttgtacactataaaagcatttatcccagctattgactcctttgggtttgagactgacctccggactcatactcagggtcaggctttctccttatctgtattccaccattggcagatcgtacctggagatcccctcgacaaatcaatagtcatacggccactggagcctcaacctgccccacacctggcccgtgaatttatgattaagacccgcaggcggaaaggtctgagcgaggatgtgtcgattagcaagttttttgacgatcccatgctcttagaactggctaagcaggatgttgtcctaaattacccaatgtag

SEQ ID NO: 92984 - DNA, 2889 bp, Artificial Sequence
  derived and/or modified sequence
atggacaccgacctgtacgacgagttcggcaactacatcggccccgagctggacagcgacgaggacgacgacgagctgggcagagagaccaaggacctggacgagatggacgacgacgacgacgacgacgacgtgggcgaccacgacgacgaccaccccggcatggaggtggtgctgcacgaggtgtacggccccgaggtggagaccatcgtgcaggaggaggacacccagcccctgaccgagcccatcatcaagcccgtgaagaccaagaagttcaccctgatggagcagaccctgcccgtgaccgtgtacgagatggacttcctggccgacctgatggacaacagcgagctgatcagaaacgtgaccctgtgcggccacctgcaccacggcaagacctgcttcgtggactgcctgatcgagcagacccaccccgagatcagaaagagatacgaccaggacctgtgctacaccgacatcctgttcaccgagcaggagagaggcgtgggcatcaagagcacccccgtgaccgtggtgctgcccgacaccaagggcaagagctacctgttcaacatcatggacacccccggccacgtgaacttcagcgacgaggtgaccgccggcctgagaatcagcgacggcgtggtgctgttcatcgacgccgccgagggcgtgatgctgaacaccgagagactgatcaagcacgccgtgcaggagagactggccgtgaccgtgtgcatcaacaagatcgacagactgatcctggagctgaagctgccccccaccgacgcctactacaagctgagacacatcgtggacgaggtgaacggcctgatcagcatgtacagcaccgacgagaacctgatcctgagccccctgctgggcaacgtgtgcttcagcagcagccagtacagcatctgcttcaccctgggcagcttcgccaagatctacgccgacaccttcggcgacatcaactaccaggagttcgccaagagactgtggggcgacatctacttcaaccccaagaccagaaagttcaccaagaaggcccccaccagcagcagccagagaagcttcgtggagttcatcctggagcccctgtacaagatcctggcccaggtggtgggcgacgtggacaccagcctgcccagaaccctggacgagctgggcatccacctgaccaaggaggagctgaagctgaacatcagacccctgctgagactggtgtgcaagaagttcttcggcgagttcaccggcttcgtggacatgtgcgtgcagcacatccccagccccaaggtgggcgccaagcccaagatcgagcacacctacaccggcggcgtggacagcgacctgggcgaggccatgagcgactgcgaccccgacggccccctgatgtgccacaccaccaagatgtacagcaccgacgacggcgtgcagttccacgccttcggcagagtgctgagcggcaccatccacgccggccagcccgtgaaggtgctgggcgagaactacaccctggaggacgaggaggacagccagatctgcaccgtgggcagactgtggatcagcgtggccagataccacatcgaggtgaacagagtgcccgccggcaactgggtgctgatcgagggcgtggaccagcccatcgtgaagaccgccaccatcaccgagcccagaggcaacgaggaggcccagatcttcagacccctgaagttcaacaccaccagcgtgatcaagatcgccgtggagcccgtgaaccccagcgagctgcccaagatgctggacggcctgagaaaggtgaacaagagctaccccagcctgaccaccaaggtggaggagagcggcgagcacgtgatcctgggcaccggcgagctgtacctggactgcgtgatgcacgacctgagaaagatgtacagcgagatcgacatcaaggtggccgaccccgtggtgaccttctgcgagaccgtggtggagaccagcagcctgaagtgcttcgccgagacccccaacaagaagaacaagatcaccatgatcgccgagcccctggagaagggcctggccgaggacatcgagaacgaggtggtgcagatcacctggaacagaaagaagctgggcgagttcttccagaccaagtacgactgggacctgctggccgccagaagcatctgggccttcggccccgacgccaccggccccaacatcctggtggacgacaccctgcccagcgaggtggacaaggccctgctgggcagcgtgaaggacagcatcgtgcagggcttccagtggggcaccagagagggccccctgtgcgacgagctgatcagaaacgtgaagttcaagatcctggacgccgtggtggcccaggagcccctgcacagaggcggcggccagatcatccccaccgccagaagagtggtgtacagcgccttcctgatggccacccccagactgatggagccctactacttcgtggaggtgcaggcccccgccgactgcgtgagcgccgtgtacaccgtgctggccagaagaagaggccacgtgacccaggacgcccccatccccggcagccccctgtacaccatcaaggccttcatccccgccatcgacagcttcggcttcgagaccgacctgagaacccacacccagggccaggccttcagcctgagcgtgttccaccactggcagatcgtgcccggcgaccccctggacaagagcatcgtgatcagacccctggagccccagcccgccccccacctggccagagagttcatgatcaagaccagaagaagaaagggcctgagcgaggacgtgagcatcagcaagttcttcgacgaccccatgctgctggagctggccaagcaggacgtggtgctgaactaccccatgtag

SEQ ID NO: 92985 - DNA, 2814 bp, Artificial Sequence
  derived and/or modified sequence
atggacgacgacgacgacgacgacgacgtgggcgaccacgacgacgaccaccccggcatggaggtggtgctgcacgaggacaagaagtactaccccaccgccgaggaggtgtacggccccgaggtggagaccatcgtgcaggaggaggacacccagcccctgaccgagcccatcatcaagcccgtgaagaccaagaagttcaccctgatggagcagaccctgcccgtgaccgtgtacgagatggacttcctggccgacctgatggacaacagcgagctgatcagaaacgtgaccctgtgcggccacctgcaccacggcaagacctgcttcgtggactgcctgatcgagcagacccaccccgagatcagaaagagatacgaccaggacctgtgctacaccgacatcctgttcaccgagcaggagagaggcgtgggcatcaagagcacccccgtgaccgtggtgctgcccgacaccaagggcaagagctacctgttcaacatcatggacacccccggccacgtgaacttcagcgacgaggtgaccgccggcctgagaatcagcgacggcgtggtgctgttcatcgacgccgccgagggcgtgatgctgaacaccgagagactgatcaagcacgccgtgcaggagagactggccgtgaccgtgtgcatcaacaagatcgacagactgatcctggagctgaagctgccccccaccgacgcctactacaagctgagacacatcgtggacgaggtgaacggcctgatcagcatgtacagcaccgacgagaacctgatcctgagccccctgctgggcaacgtgtgcttcagcagcagccagtacagcatctgcttcaccctgggcagcttcgccaagatctacgccgacaccttcggcgacatcaactaccaggagttcgccaagagactgtggggcgacatctacttcaaccccaagaccagaaagttcaccaagaaggcccccaccagcagcagccagagaagcttcgtggagttcatcctggagcccctgtacaagatcctggcccaggtggtgggcgacgtggacaccagcctgcccagaaccctggacgagctgggcatccacctgaccaaggaggagctgaagctgaacatcagacccctgctgagactggtgtgcaagaagttcttcggcgagttcaccggcttcgtggacatgtgcgtgcagcacatccccagccccaaggtgggcgccaagcccaagatcgagcacacctacaccggcggcgtggacagcgacctgggcgaggccatgagcgactgcgaccccgacggccccctgatgtgccacaccaccaagatgtacagcaccgacgacggcgtgcagttccacgccttcggcagagtgctgagcggcaccatccacgccggccagcccgtgaaggtgctgggcgagaactacaccctggaggacgaggaggacagccagatctgcaccgtgggcagactgtggatcagcgtggccagataccacatcgaggtgaacagagtgcccgccggcaactgggtgctgatcgagggcgtggaccagcccatcgtgaagaccgccaccatcaccgagcccagaggcaacgaggaggcccagatcttcagacccctgaagttcaacaccaccagcgtgatcaagatcgccgtggagcccgtgaaccccagcgagctgcccaagatgctggacggcctgagaaaggtgaacaagagctaccccagcctgaccaccaaggtggaggagagcggcgagcacgtgatcctgggcaccggcgagctgtacctggactgcgtgatgcacgacctgagaaagatgtacagcgagatcgacatcaaggtggccgaccccgtggtgaccttctgcgagaccgtggtggagaccagcagcctgaagtgcttcgccgagacccccaacaagaagaacaagatcaccatgatcgccgagcccctggagaagggcctggccgaggacatcgagaacgaggtggtgcagatcacctggaacagaaagaagctgggcgagttcttccagaccaagtacgactgggacctgctggccgccagaagcatctgggccttcggccccgacgccaccggccccaacatcctggtggacgacaccctgcccagcgaggtggacaaggccctgctgggcagcgtgaaggacagcatcgtgcagggcttccagtggggcaccagagagggccccctgtgcgacgagctgatcagaaacgtgaagttcaagatcctggacgccgtggtggcccaggagcccctgcacagaggcggcggccagatcatccccaccgccagaagagtggtgtacagcgccttcctgatggccacccccagactgatggagccctactacttcgtggaggtgcaggcccccgccgactgcgtgagcgccgtgtacaccgtgctggccagaagaagaggccacgtgacccaggacgcccccatccccggcagccccctgtacaccatcaaggccttcatccccgccatcgacagcttcggcttcgagaccgacctgagaacccacacccagggccaggccttcagcctgagcgtgttccaccactggcagatcgtgcccggcgaccccctggacaagagcatcgtgatcagacccctggagccccagcccgccccccacctggccagagagttcatgatcaagaccagaagaagaaagggcctgagcgaggacgtgagcatcagcaagttcttcgacgaccccatgctgctggagctggccaagcaggacgtggtgctgaactaccccatgtag

SEQ ID NO: 92986 - DNA, 2919 bp, Artificial Sequence
  derived and/or modified sequence
atggacaccgacctgtacgacgagttcggcaactacatcggccccgagctggacagcgacgaggacgacgacgagctgggcagagagaccaaggacctggacgagatggacgacgacgacgacgacgacgacgtgggcgaccacgacgacgaccaccccggcatggaggtggtgctgcacgaggacaagaagtactaccccaccgccgaggaggtgtacggccccgaggtggagaccatcgtgcaggaggaggacacccagcccctgaccgagcccatcatcaagcccgtgaagaccaagaagttcaccctgatggagcagaccctgcccgtgaccgtgtacgagatggacttcctggccgacctgatggacaacagcgagctgatcagaaacgtgaccctgtgcggccacctgcaccacggcaagacctgcttcgtggactgcctgatcgagcagacccaccccgagatcagaaagagatacgaccaggacctgtgctacaccgacatcctgttcaccgagcaggagagaggcgtgggcatcaagagcacccccgtgaccgtggtgctgcccgacaccaagggcaagagctacctgttcaacatcatggacacccccggccacgtgaacttcagcgacgaggtgaccgccggcctgagaatcagcgacggcgtggtgctgttcatcgacgccgccgagggcgtgatgctgaacaccgagagactgatcaagcacgccgtgcaggagagactggccgtgaccgtgtgcatcaacaagatcgacagactgatcctggagctgaagctgccccccaccgacgcctactacaagctgagacacatcgtggacgaggtgaacggcctgatcagcatgtacagcaccgacgagaacctgatcctgagccccctgctgggcaacgtgtgcttcagcagcagccagtacagcatctgcttcaccctgggcagcttcgccaagatctacgccgacaccttcggcgacatcaactaccaggagttcgccaagagactgtggggcgacatctacttcaaccccaagaccagaaagttcaccaagaaggcccccaccagcagcagccagagaagcttcgtggagttcatcctggagcccctgtacaagatcctggcccaggtggtgggcgacgtggacaccagcctgcccagaaccctggacgagctgggcatccacctgaccaaggaggagctgaagctgaacatcagacccctgctgagactggtgtgcaagaagttcttcggcgagttcaccggcttcgtggacatgtgcgtgcagcacatccccagccccaaggtgggcgccaagcccaagatcgagcacacctacaccggcggcgtggacagcgacctgggcgaggccatgagcgactgcgaccccgacggccccctgatgtgccacaccaccaagatgtacagcaccgacgacggcgtgcagttccacgccttcggcagagtgctgagcggcaccatccacgccggccagcccgtgaaggtgctgggcgagaactacaccctggaggacgaggaggacagccagatctgcaccgtgggcagactgtggatcagcgtggccagataccacatcgaggtgaacagagtgcccgccggcaactgggtgctgatcgagggcgtggaccagcccatcgtgaagaccgccaccatcaccgagcccagaggcaacgaggaggcccagatcttcagacccctgaagttcaacaccaccagcgtgatcaagatcgccgtggagcccgtgaaccccagcgagctgcccaagatgctggacggcctgagaaaggtgaacaagagctaccccagcctgaccaccaaggtggaggagagcggcgagcacgtgatcctgggcaccggcgagctgtacctggactgcgtgatgcacgacctgagaaagatgtacagcgagatcgacatcaaggtggccgaccccgtggtgaccttctgcgagaccgtggtggagaccagcagcctgaagtgcttcgccgagacccccaacaagaagaacaagatcaccatgatcgccgagcccctggagaagggcctggccgaggacatcgagaacgaggtggtgcagatcacctggaacagaaagaagctgggcgagttcttccagaccaagtacgactgggacctgctggccgccagaagcatctgggccttcggccccgacgccaccggccccaacatcctggtggacgacaccctgcccagcgaggtggacaaggccctgctgggcagcgtgaaggacagcatcgtgcagggcttccagtggggcaccagagagggccccctgtgcgacgagctgatcagaaacgtgaagttcaagatcctggacgccgtggtggcccaggagcccctgcacagaggcggcggccagatcatccccaccgccagaagagtggtgtacagcgccttcctgatggccacccccagactgatggagccctactacttcgtggaggtgcaggcccccgccgactgcgtgagcgccgtgtacaccgtgctggccagaagaagaggccacgtgacccaggacgcccccatccccggcagccccctgtacaccatcaaggccttcatccccgccatcgacagcttcggcttcgagaccgacctgagaacccacacccagggccaggccttcagcctgagcgtgttccaccactggcagatcgtgcccggcgaccccctggacaagagcatcgtgatcagacccctggagccccagcccgccccccacctggccagagagttcatgatcaagaccagaagaagaaagggcctgagcgaggacgtgagcatcagcaagttcttcgacgaccccatgctgctggagctggccaagcaggacgtggtgctgaactaccccatgtag

SEQ ID NO: 92987 - DNA, 3973 bp, Artificial Sequence
  derived and/or modified sequence
cttcctggcggcgggcgcaggcgtttcctcggcgtggggcggaagcacgatctccggcagcggcctgggaactcttagctgagcaggcgagagcatcatggataccgacttatatgatgagtttgggaattatattggaccagagcttgattctgatgaagatgatgatgaattgggtagagagaccaaagatcttgatgagatggatgatgatgacgacgacgatgacgtaggagatcatgacgatgaccaccctgggatggaggtggtgctgcatgaggtgtatggtcctgaggtggagaccatagttcaagaggaagacactcagcctctcacagaacccattattaagccagtgaaaaccaagaaattcactctgatggagcagacattacctgttacggtgtatgagatggatttcttggcggatctgatggataactcagagctcatcagaaatgtgaccctttgtggacatctccaccatggcaagacatgttttgtggattgtttaattgaacagactcacccggaaatcagaaagcgctatgaccaagatctgtgctatactgacatcctcttcacagagcaagagagaggtgtaggcatcaaaagcactcctgtgacagtggtcttgccagacaccaaaggaaaatcttatctcttcaatatcatggacactccaggacatgtgaatttctctgatgaggtcacagctggcttgcgcatctcagatggagtggtccttttcattgatgctgctgagggggtgatgctgaacacagagcggctgatcaagcatgcggtgcaggagaggctggcagtcactgtgtgcatcaacaagattgaccggctgatcctggagctgaagctgcctccaactgatgcttattacaagctgcgccacattgtggatgaggtcaatggattaataagcatgtattccactgatgagaacctgatcctttccccactcctgggtaacgtctgcttctccagctcccagtacagcatctgcttcacgctgggctcctttgccaagatctatgccgacacctttggtgacattaattaccaagaatttgctaaaagactctggggtgacatctacttcaaccctaagacgcgaaagttcaccaaaaaggccccaactagcagctcccagagaagtttcgtggagtttatcttggagcctctttataagatcctcgcccaggttgtaggtgacgtggacaccagcctcccacggaccctagacgagcttggcatccacctgacgaaggaggagctgaagctgaacatccgccccttgctcaggctggtctgcaaaaagttctttggcgagttcacaggctttgtggacatgtgtgtgcagcatatcccttctccaaaggtgggcgccaagcccaagattgagcacacctacaccggtggtgtggactccgacctcggcgaggctatgagtgactgtgaccctgatggccccctgatgtgccacactactaagatgtacagcacagatgatggagtccagtttcacgcctttggccgggtgctgagtggcaccattcatgctgggcagcctgtgaaggtactgggggagaactacaccctggaggatgaggaagactcccagatatgcaccgtgggccgcctttggatctctgtggccaggtaccacatcgaggtgaaccgtgttcctgctggcaactgggttctgattgaaggtgttgatcaaccaattgtgaagacagcaaccataaccgaaccccgaggcaatgaggaggctcagattttccgacccttgaagttcaataccacatctgttatcaagattgctgtggagccagtcaacccctcagagctgcccaagatgcttgatggcctgcgcaaggtcaacaagagctatccatccctcaccaccaaggtggaggagtctggcgagcatgtgatcctgggcactggggagctctacctggactgtgtgatgcatgatttgcggaagatgtactcagagatagacatcaaggtggctgacccagttgtcacgttttgtgagacggtggtggaaacatcctccctcaagtgctttgctgaaacgcctaataagaagaacaagatcaccatgattgctgagcctcttgagaagggcctggcagaggacatagagaatgaggtggtccagattacgtggaacaggaagaagctgggagagttcttccagaccaagtacgattgggatctgctggctgcccgttccatctgggcttttggccctgatgcgactggccccaacattctggtggatgatactctgccctctgaggtggacaaggctcttcttggttcagtgaaggacagcatcgttcaaggtttccagtggggaaccagggagggccccctctgtgatgaattgattcggaatgtcaagtttaagatcctggatgcggtggttgcccaggagcccctgcaccggggcgggggccagatcatccccacagccaggagagtcgtctactctgccttcctcatggctactcctcgtctgatggagccttactactttgtagaggtccaggcccctgcagattgcgtctctgcagtttataccgtcctggccaggcgcagggggcacgtgactcaggatgcacccatcccaggctcccctctgtacaccatcaaagcttttatcccggccatcgactcttttggctttgagactgatctccggactcacacccagggacaagccttttctctgtctgtcttccaccactggcagattgtgcctggtgatcccctggacaagagcattgtcatccgccccttggagccacagccagctcctcacctggcccgggaattcatgatcaaaacccgccgtaggaagggcctcagtgaagatgtgagcatcagcaaattcttcgatgatcctatgttgctggaacttgccaaacaggatgttgtgctcaattaccccatgtgagtgcgtggactcctgggagctcctgctccctacagtgggctgcaactcctgtacttgaagctgagacctcatatgacgtggccttcgtgttgtcagagagtgtctggaagctgctgttgccatcttgaacaactcaccaacctccaacccagagccccagtgagagaggagcatttggcctcctgcttccttctgtggcctctgccgggctccattcccaaggaaaagagaggagcttgggctcacagaaagagaaggggatgaaaccccaaggggccctatctttgggatttacatggaattttattttctacaagtttgaccttagccatggtttgcaagtgaacagaacattctgacctctgtcttgctctgctcctttcatcctcgtctcccctgccccgtctggtgcttacattctgaatatatgtcatctcccaagaggcttcactgcctctgcttccagctgcagcctccttcctgcctgggtccccagggaagccgcctgccttttaattcagtgttcccatgagcgccaaggccccattattgcccccttgctcccactccatgctgcttctgggtggaacctaagatggcttgggagttgttgggttcctgcgatcagaagtctaccccaccacctcctcaggaaactgctgcctcccctaagaatcttccttgccctggagtagggggccagagcactttgatttccagccatttactccaagtcctctccccagctaccaccagtcccttactctgttctcccccagtgaaaaagagtctgttgattttcctcaaaactgctttattaggaatgtaccagggattgagttaggggagttggacagccccggctcctataggagtcctacttctctccagcatcctgtgccatcctcttgacgtaatcgctgtacattgtgtacacagcacctgtgtgagagaaaagaaataatgccccttggcatcaaacccttc

SEQ ID NO: 92988 - DNA, 4058 bp, Artificial Sequence
  derived and/or modified sequence
atcctcagctctcaccctctttggagcagcccacgtcttgggctactcgtcttggggacccgctactccgccttgccagtccgcggcgggcatacctcggaactggtcctcaggcagagggttgtcctcccgggcagaaaggcgacagcggcgtctgcggggtccttcctggcggcgggcgcaggcgtttcctcggcgtggggcggaagcacgatctccggcagcggcctgggaactcttagctgagcaggcgagagatggatgatgatgacgacgacgatgacgtaggagatcatgacgatgaccaccctgggatggaggtggtgctgcatgaggacaagaagtactacccaacagccgaggaggtgtatggtcctgaggtggagaccatagttcaagaggaagacactcagcctctcacagaacccattattaagccagtgaaaaccaagaaattcactctgatggagcagacattacctgttacggtgtatgagatggatttcttggcggatctgatggataactcagagctcatcagaaatgtgaccctttgtggacatctccaccatggcaagacatgttttgtggattgtttaattgaacagactcacccggaaatcagaaagcgctatgaccaagatctgtgctatactgacatcctcttcacagagcaagagagaggtgtaggcatcaaaagcactcctgtgacagtggtcttgccagacaccaaaggaaaatcttatctcttcaatatcatggacactccaggacatgtgaatttctctgatgaggtcacagctggcttgcgcatctcagatggagtggtccttttcattgatgctgctgagggggtgatgctgaacacagagcggctgatcaagcatgcggtgcaggagaggctggcagtcactgtgtgcatcaacaagattgaccggctgatcctggagctgaagctgcctccaactgatgcttattacaagctgcgccacattgtggatgaggtcaatggattaataagcatgtattccactgatgagaacctgatcctttccccactcctgggtaacgtctgcttctccagctcccagtacagcatctgcttcacgctgggctcctttgccaagatctatgccgacacctttggtgacattaattaccaagaatttgctaaaagactctggggtgacatctacttcaaccctaagacgcgaaagttcaccaaaaaggccccaactagcagctcccagagaagtttcgtggagtttatcttggagcctctttataagatcctcgcccaggttgtaggtgacgtggacaccagcctcccacggaccctagacgagcttggcatccacctgacgaaggaggagctgaagctgaacatccgccccttgctcaggctggtctgcaaaaagttctttggcgagttcacaggctttgtggacatgtgtgtgcagcatatcccttctccaaaggtgggcgccaagcccaagattgagcacacctacaccggtggtgtggactccgacctcggcgaggctatgagtgactgtgaccctgatggccccctgatgtgccacactactaagatgtacagcacagatgatggagtccagtttcacgcctttggccgggtgctgagtggcaccattcatgctgggcagcctgtgaaggtactgggggagaactacaccctggaggatgaggaagactcccagatatgcaccgtgggccgcctttggatctctgtggccaggtaccacatcgaggtgaaccgtgttcctgctggcaactgggttctgattgaaggtgttgatcaaccaattgtgaagacagcaaccataaccgaaccccgaggcaatgaggaggctcagattttccgacccttgaagttcaataccacatctgttatcaagattgctgtggagccagtcaacccctcagagctgcccaagatgcttgatggcctgcgcaaggtcaacaagagctatccatccctcaccaccaaggtggaggagtctggcgagcatgtgatcctgggcactggggagctctacctggactgtgtgatgcatgatttgcggaagatgtactcagagatagacatcaaggtggctgacccagttgtcacgttttgtgagacggtggtggaaacatcctccctcaagtgctttgctgaaacgcctaataagaagaacaagatcaccatgattgctgagcctcttgagaagggcctggcagaggacatagagaatgaggtggtccagattacgtggaacaggaagaagctgggagagttcttccagaccaagtacgattgggatctgctggctgcccgttccatctgggcttttggccctgatgcgactggccccaacattctggtggatgatactctgccctctgaggtggacaaggctcttcttggttcagtgaaggacagcatcgttcaaggtttccagtggggaaccagggagggccccctctgtgatgaattgattcggaatgtcaagtttaagatcctggatgcggtggttgcccaggagcccctgcaccggggcgggggccagatcatccccacagccaggagagtcgtctactctgccttcctcatggctactcctcgtctgatggagccttactactttgtagaggtccaggcccctgcagattgcgtctctgcagtttataccgtcctggccaggcgcagggggcacgtgactcaggatgcacccatcccaggctcccctctgtacaccatcaaagcttttatcccggccatcgactcttttggctttgagactgatctccggactcacacccagggacaagccttttctctgtctgtcttccaccactggcagattgtgcctggtgatcccctggacaagagcattgtcatccgccccttggagccacagccagctcctcacctggcccgggaattcatgatcaaaacccgccgtaggaagggcctcagtgaagatgtgagcatcagcaaattcttcgatgatcctatgttgctggaacttgccaaacaggatgttgtgctcaattaccccatgtgagtgcgtggactcctgggagctcctgctccctacagtgggctgcaactcctgtacttgaagctgagacctcatatgacgtggccttcgtgttgtcagagagtgtctggaagctgctgttgccatcttgaacaactcaccaacctccaacccagagccccagtgagagaggagcatttggcctcctgcttccttctgtggcctctgccgggctccattcccaaggaaaagagaggagcttgggctcacagaaagagaaggggatgaaaccccaaggggccctatctttgggatttacatggaattttattttctacaagtttgaccttagccatggtttgcaagtgaacagaacattctgacctctgtcttgctctgctcctttcatcctcgtctcccctgccccgtctggtgcttacattctgaatatatgtcatctcccaagaggcttcactgcctctgcttccagctgcagcctccttcctgcctgggtccccagggaagccgcctgccttttaattcagtgttcccatgagcgccaaggccccattattgcccccttgctcccactccatgctgcttctgggtggaacctaagatggcttgggagttgttgggttcctgcgatcagaagtctaccccaccacctcctcaggaaactgctgcctcccctaagaatcttccttgccctggagtagggggccagagcactttgatttccagccatttactccaagtcctctccccagctaccaccagtcccttactctgttctcccccagtgaaaaagagtctgttgattttcctcaaaactgctttattaggaatgtaccagggattgagttaggggagttggacagccccggctcctataggagtcctacttctctccagcatcctgtgccatcctcttgacgtaatcgctgtacattgtgtacacagcacctgtgtgagagaaaagaaataatgccccttggcatcaaacccttc

SEQ ID NO: 92989 - DNA, 4167 bp, Artificial Sequence
  derived and/or modified sequence
atcctcagctctcaccctctttggagcagcccacgtcttgggctactcgtcttggggacccgctactccgccttgccagtccgcggcgggcatacctcggaactggtcctcaggcagagggttgtcctcccgggcagaaaggcgacagcggcgtctgcggggtccttcctggcggcgggcgcaggcgtttcctcggcgtggggcggaagcacgatctccggcagcggcctgggaactcttagctgagcaggcgagagcatcatggataccgacttatatgatgagtttgggaattatattggaccagagcttgattctgatgaagatgatgatgaattgggtagagagaccaaagatcttgatgagatggatgatgatgacgacgacgatgacgtaggagatcatgacgatgaccaccctgggatggaggtggtgctgcatgaggacaagaagtactacccaacagccgaggaggtgtatggtcctgaggtggagaccatagttcaagaggaagacactcagcctctcacagaacccattattaagccagtgaaaaccaagaaattcactctgatggagcagacattacctgttacggtgtatgagatggatttcttggcggatctgatggataactcagagctcatcagaaatgtgaccctttgtggacatctccaccatggcaagacatgttttgtggattgtttaattgaacagactcacccggaaatcagaaagcgctatgaccaagatctgtgctatactgacatcctcttcacagagcaagagagaggtgtaggcatcaaaagcactcctgtgacagtggtcttgccagacaccaaaggaaaatcttatctcttcaatatcatggacactccaggacatgtgaatttctctgatgaggtcacagctggcttgcgcatctcagatggagtggtccttttcattgatgctgctgagggggtgatgctgaacacagagcggctgatcaagcatgcggtgcaggagaggctggcagtcactgtgtgcatcaacaagattgaccggctgatcctggagctgaagctgcctccaactgatgcttattacaagctgcgccacattgtggatgaggtcaatggattaataagcatgtattccactgatgagaacctgatcctttccccactcctgggtaacgtctgcttctccagctcccagtacagcatctgcttcacgctgggctcctttgccaagatctatgccgacacctttggtgacattaattaccaagaatttgctaaaagactctggggtgacatctacttcaaccctaagacgcgaaagttcaccaaaaaggccccaactagcagctcccagagaagtttcgtggagtttatcttggagcctctttataagatcctcgcccaggttgtaggtgacgtggacaccagcctcccacggaccctagacgagcttggcatccacctgacgaaggaggagctgaagctgaacatccgccccttgctcaggctggtctgcaaaaagttctttggcgagttcacaggctttgtggacatgtgtgtgcagcatatcccttctccaaaggtgggcgccaagcccaagattgagcacacctacaccggtggtgtggactccgacctcggcgaggctatgagtgactgtgaccctgatggccccctgatgtgccacactactaagatgtacagcacagatgatggagtccagtttcacgcctttggccgggtgctgagtggcaccattcatgctgggcagcctgtgaaggtactgggggagaactacaccctggaggatgaggaagactcccagatatgcaccgtgggccgcctttggatctctgtggccaggtaccacatcgaggtgaaccgtgttcctgctggcaactgggttctgattgaaggtgttgatcaaccaattgtgaagacagcaaccataaccgaaccccgaggcaatgaggaggctcagattttccgacccttgaagttcaataccacatctgttatcaagattgctgtggagccagtcaacccctcagagctgcccaagatgcttgatggcctgcgcaaggtcaacaagagctatccatccctcaccaccaaggtggaggagtctggcgagcatgtgatcctgggcactggggagctctacctggactgtgtgatgcatgatttgcggaagatgtactcagagatagacatcaaggtggctgacccagttgtcacgttttgtgagacggtggtggaaacatcctccctcaagtgctttgctgaaacgcctaataagaagaacaagatcaccatgattgctgagcctcttgagaagggcctggcagaggacatagagaatgaggtggtccagattacgtggaacaggaagaagctgggagagttcttccagaccaagtacgattgggatctgctggctgcccgttccatctgggcttttggccctgatgcgactggccccaacattctggtggatgatactctgccctctgaggtggacaaggctcttcttggttcagtgaaggacagcatcgttcaaggtttccagtggggaaccagggagggccccctctgtgatgaattgattcggaatgtcaagtttaagatcctggatgcggtggttgcccaggagcccctgcaccggggcgggggccagatcatccccacagccaggagagtcgtctactctgccttcctcatggctactcctcgtctgatggagccttactactttgtagaggtccaggcccctgcagattgcgtctctgcagtttataccgtcctggccaggcgcagggggcacgtgactcaggatgcacccatcccaggctcccctctgtacaccatcaaagcttttatcccggccatcgactcttttggctttgagactgatctccggactcacacccagggacaagccttttctctgtctgtcttccaccactggcagattgtgcctggtgatcccctggacaagagcattgtcatccgccccttggagccacagccagctcctcacctggcccgggaattcatgatcaaaacccgccgtaggaagggcctcagtgaagatgtgagcatcagcaaattcttcgatgatcctatgttgctggaacttgccaaacaggatgttgtgctcaattaccccatgtgagtgcgtggactcctgggagctcctgctccctacagtgggctgcaactcctgtacttgaagctgagacctcatatgacgtggccttcgtgttgtcagagagtgtctggaagctgctgttgccatcttgaacaactcaccaacctccaacccagagccccagtgagagaggagcatttggcctcctgcttccttctgtggcctctgccgggctccattcccaaggaaaagagaggagcttgggctcacagaaagagaaggggatgaaaccccaaggggccctatctttgggatttacatggaattttattttctacaagtttgaccttagccatggtttgcaagtgaacagaacattctgacctctgtcttgctctgctcctttcatcctcgtctcccctgccccgtctggtgcttacattctgaatatatgtcatctcccaagaggcttcactgcctctgcttccagctgcagcctccttcctgcctgggtccccagggaagccgcctgccttttaattcagtgttcccatgagcgccaaggccccattattgcccccttgctcccactccatgctgcttctgggtggaacctaagatggcttgggagttgttgggttcctgcgatcagaagtctaccccaccacctcctcaggaaactgctgcctcccctaagaatcttccttgccctggagtagggggccagagcactttgatttccagccatttactccaagtcctctccccagctaccaccagtcccttactctgttctcccccagtgaaaaagagtctgttgattttcctcaaaactgctttattaggaatgtaccagggattgagttaggggagttggacagccccggctcctataggagtcctacttctctccagcatcctgtgccatcctcttgacgtaatcgctgtacattgtgtacacagcacctgtgtgagagaaaagaaataatgccccttggcatcaaacccttc

SEQ ID NO: 92990 - DNA, 3340 bp, Artificial Sequence
  derived and/or modified sequence
gcagagagggcactgggaggaggcagtgggagggcggagggcgggggccttcggggtgggcgcccagggtagggcaggtggccgcggcgtggaggcagggagaatgcgactctccaaaaccctcgtcgacatggacatggccgactacagtgctgcactggacccagcctacaccaccctggaatttgagaatgtgcaggtgttgacgatgggcaatgattttgttgccgctgcgtctcgccagattgaggcatcccctccgacatcactggagcatatctggaggggtggacagttctccacagggagacacgtccccatcagaaggcaccaacctcaacgcgcccaacagcctgggtgtcagcgccctgtgtgccatctgcggggaccgggccacgggcaaacactacggtgcctcgagctgtgacggctgcaagggcttcttccggaggagcgtgcggaagaaccacatgtactcctgcagatttagccggcagtgcgtggtggacaaagacaagaggaaccagtgccgctactgcaggctcaagaaatgcttccgggctggcatgaagaaggaagccgtccagaatgagcgggaccggatcagcactcgaaggtcaagctatgaggacagcagcctgccctccatcaatgcgctcctgcaggcggaggtcctgtcccgacagatcacctcccccgtctccgggatcaacggcgacattcgggcgaagaagattgccagcatcgcagatgtgtgtgagtccatgaaggagcagctgctggttctcgttgagtgggccaagtacatcccagctttctgcgagctccccctggacgaccaggtggccctgctcagagcccatgctggcgagcacctgctgctcggagccaccaagagatccatggtgttcaaggacgtgctgctcctaggcaatgactacattgtccctcggcactgcccggagctggcggagatgagccgggtgtccatacgcatccttgacgagctggtgctgcccttccaggagctgcagatcgatgacaatgagtatgcctacctcaaagccatcatcttctttgacccagatgccaaggggctgagcgatccagggaagatcaagcggctgcgttcccaggtgcaggtgagcttggaggactacatcaacgaccgccagtatgactcgcgtggccgctttggagagctgctgctgctgctgcccaccttgcagagcatcacctggcagatgatcgagcagatccagttcatcaagctcttcggcatggccaagattgacaacctgttgcaggagatgctgctgggagggtcccccagcgatgcaccccatgcccaccaccccctgcaccctcacctgatgcaggaacatatgggaaccaacgtcatcgttgccaacacaatgcccactcacctcagcaacggacagatgtgtgagtggccccgacccaggggacaggcagccacccctgagaccccacagccctcaccgccaggtggctcagggtctgagccctataagctcctgccgggagccgtcgccacaatcgtcaagcccctctctgccatcccccagccgaccatcaccaagcaggaagttatctagcaagccgctggggcttgggggctccactggctccccccagccccctaagagagcacctggtgatcacgtggtcacggcaaaggaagacgtgatgccaggaccagtcccagagcaggaatgggaaggatgaagggcccgagaacatggcctaagggccacatcccactgccacccttgacgccctgctctggataacaagactttgacttggggagacctctactgccttggacaacttttctcatgttgaagccactgccttcaccttcaccttcatccatgtccaacccccgacttcatcccaaaggacagccgcctggagatgacttgaggccttacttaaacccagctcccttcttccctagcctggtgcttctcctctcctagcccctgtcatggtgtccagacagagccctgtgaggctgggtccaattgtggcacttggggcaccttgctcctccttctgctgctgcccccacctctgctgcctccctctgctgtcaccttgctcagccatcccgtcttctccaacaccacctctccagaggccaaggaggccttggaaacgattcccccagtcattctgggaacatgttgtaagcactgactgggaccaggcaccaggcagggtctagaaggctgtggtgagggaagacgcctttctcctccaacccaacctcatcctccttcttcagggacttgggtgggtacttgggtgaggatccctgaaggccttcaacccgagaaaacaaacccaggttggcgactgcaacaggaacttggagtggagaggaaaagcatcagaaagaggcagaccatccaccaggcctttgagaaagggtagaattctggctggtagagcaggtgagatgggacattccaaagaacagcctgagccaaggcctagtggtagtaagaatctagcaagaattgaggaagaatggtgtgggagagggatgatgaagagagagagggcctgctggagagcatagggtctggaacaccaggctgaggtcctgatcagcttcaaggagtatgcagggagctgggcttccagaaaatgaacacagcagttctgcagaggacgggaggctggaagctgggaggtcaggtggggtggatgatataatgcgggtgagagtaatgaggcttggggctggagaggacaagatgggtaaaccctcacatcagagtgacatccaggaggaataagctcccagggcctgtctcaagctcttccttactcccaggcactgtcttaaggcatctgacatgcatcatctcatttaatcctcccttcctccctattaacctagagattgtttttgttttttattctcctcctccctccccgccctcacccgccccactccctcctaacctagagattgttacagaagctgaaattgcgttctaagaggtgaagtgattttttttctgaaactcacacaactaggaagtggctgagtcaggacttgaacccaggtctccctggatcagaacaggagctcttaactacagtggctgaatagcttctccaaaggctccctgtgttctcaccgtgatcaagttgaggggcttccggctcccttctacagcctcagaaaccagactcgttcttctgggaaccctgcccactcccaggaccaagattggcctgaggctgcactaaaattcacttagggtcgagcatcctgtttgctgataaatattaaggagaa

SEQ ID NO: 92991 - protein, 1182 aa, Artificial Sequence
  derived and/or modified sequence
MERHQPRLHHPAQGSAAGTPYPSSASLRGCRESKMPRRKGPQHPPPPSGPEEPGEKRPKFLDKFASIRIPGSKKERPPLPNLKTAFASSDCSAAPLEMMENFPKPLSENELLELFEKMMEDMNLNEDKKAPLREKDFSIKKEMVMQYINTASKTGSLKRSRQISPQEFIHELKMGSADERLVTCLESLRVSLTSNPVSWVESFGHEGLGLLLDILEKLISGKIQEKVVKKNQHKVIQCLKALMNTQYGLERIMSEERSLSLLAKAVDPRHPNMMTDVVKLLSAVCIVGEESILEEVLEALTSAGEEKKIDRFFCIVEGLRHNSVQLQVACMQLINALVTSPDDLDFRLHIRNEFMRCGLKEILPNLKCIKNDGLDIQLKVFDEHKEEDLFELSHRLEDIRAELDEAYDVYNMVWSTVKETRAEGYFISILQHLLLIRNDYFIRQQYFKLIDECVSQIVLHRDGMDPDFTYRKRLDLDLTQFVDICIDQAKLEEFEEKASELYKKFEKEFTDHQETQAELQKKEAKINELQAELQAFKSQFGALPADCNIPLPPSKEGGTGHSALPPPPPLPSGGGVPPPPPPPPPPPLPGMRMPFSGPVPPPPPLGFLGGQNSPPLPILPFGLKPKKEFKPEISMRRLNWLKIRPHEMTENCFWIKVNENKYENVDLLCKLENTFCCQQKERREEEDIEEKKSIKKKIKELKFLDSKIAQNLSIFLSSFRVPYEEIRMMILEVDETRLAESMIQNLIKHLPDQEQLNSLSQFKSEYSNLCEPEQFVVVMSNVKRLRPRLSAILFKLQFEEQVNNIKPDIMAVSTACEEIKKSKSFSKLLELVLLMGNYMNAGSRNAQTFGFNLSSLCKLKDTKSADQKTTLLHFLVEICEEKYPDILNFVDDLEPLDKASKVSVETLEKNLRQMGRQLQQLEKELETFPPPEDLHDKFVTKMSIFVISAKEQYETLSKLHENMEKLYQSIIGYYAIDVKKVSVEDFLTDLNNFRTTFMQAIKENIKKREAEEKEKRVRIAKELAERERLERQQKKKRLLEMKTEGDETGVMDNLLEALQSGAAFRDRRKRTPMPKDVRQSLSPMSQRPVLKVCNHENQKVQLTEGSRSHYNINCNSTRTPVAKELNYNLDTHTSTGRIKAAEKKEACNVESNRKKETELLGSFSKNESVPEVEALLARLRAL

SEQ ID NO: 92992 - DNA, 3549 bp, Artificial Sequence
  derived and/or modified sequence
atggagagacaccagcccagactgcaccaccccgcccagggcagcgccgccggcaccccctaccccagcagcgccagcctgagaggctgcagagagagcaagatgcccagaagaaagggcccccagcacccccccccccccagcggccccgaggagcccggcgagaagagacccaagttcctggacaagttcgccagcatcagaatccccggcagcaagaaggagagaccccccctgcccaacctgaagaccgccttcgccagcagcgactgcagcgccgcccccctggagatgatggagaacttccccaagcccctgagcgagaacgagctgctggagctgttcgagaagatgatggaggacatgaacctgaacgaggacaagaaggcccccctgagagagaaggacttcagcatcaagaaggagatggtgatgcagtacatcaacaccgccagcaagaccggcagcctgaagagaagcagacagatcagcccccaggagttcatccacgagctgaagatgggcagcgccgacgagagactggtgacctgcctggagagcctgagagtgagcctgaccagcaaccccgtgagctgggtggagagcttcggccacgagggcctgggcctgctgctggacatcctggagaagctgatcagcggcaagatccaggagaaggtggtgaagaagaaccagcacaaggtgatccagtgcctgaaggccctgatgaacacccagtacggcctggagagaatcatgagcgaggagagaagcctgagcctgctggccaaggccgtggaccccagacaccccaacatgatgaccgacgtggtgaagctgctgagcgccgtgtgcatcgtgggcgaggagagcatcctggaggaggtgctggaggccctgaccagcgccggcgaggagaagaagatcgacagattcttctgcatcgtggagggcctgagacacaacagcgtgcagctgcaggtggcctgcatgcagctgatcaacgccctggtgaccagccccgacgacctggacttcagactgcacatcagaaacgagttcatgagatgcggcctgaaggagatcctgcccaacctgaagtgcatcaagaacgacggcctggacatccagctgaaggtgttcgacgagcacaaggaggaggacctgttcgagctgagccacagactggaggacatcagagccgagctggacgaggcctacgacgtgtacaacatggtgtggagcaccgtgaaggagaccagagccgagggctacttcatcagcatcctgcagcacctgctgctgatcagaaacgactacttcatcagacagcagtacttcaagctgatcgacgagtgcgtgagccagatcgtgctgcacagagacggcatggaccccgacttcacctacagaaagagactggacctggacctgacccagttcgtggacatctgcatcgaccaggccaagctggaggagttcgaggagaaggccagcgagctgtacaagaagttcgagaaggagttcaccgaccaccaggagacccaggccgagctgcagaagaaggaggccaagatcaacgagctgcaggccgagctgcaggccttcaagagccagttcggcgccctgcccgccgactgcaacatccccctgccccccagcaaggagggcggcaccggccacagcgccctgcccccccccccccccctgcccagcggcggcggcgtgcccccccccccccccccccccccccccccccccctgcccggcatgagaatgcccttcagcggccccgtgcccccccccccccccctgggcttcctgggcggccagaacagcccccccctgcccatcctgcccttcggcctgaagcccaagaaggagttcaagcccgagatcagcatgagaagactgaactggctgaagatcagaccccacgagatgaccgagaactgcttctggatcaaggtgaacgagaacaagtacgagaacgtggacctgctgtgcaagctggagaacaccttctgctgccagcagaaggagagaagagaggaggaggacatcgaggagaagaagagcatcaagaagaagatcaaggagctgaagttcctggacagcaagatcgcccagaacctgagcatcttcctgagcagcttcagagtgccctacgaggagatcagaatgatgatcctggaggtggacgagaccagactggccgagagcatgatccagaacctgatcaagcacctgcccgaccaggagcagctgaacagcctgagccagttcaagagcgagtacagcaacctgtgcgagcccgagcagttcgtggtggtgatgagcaacgtgaagagactgagacccagactgagcgccatcctgttcaagctgcagttcgaggagcaggtgaacaacatcaagcccgacatcatggccgtgagcaccgcctgcgaggagatcaagaagagcaagagcttcagcaagctgctggagctggtgctgctgatgggcaactacatgaacgccggcagcagaaacgcccagaccttcggcttcaacctgagcagcctgtgcaagctgaaggacaccaagagcgccgaccagaagaccaccctgctgcacttcctggtggagatctgcgaggagaagtaccccgacatcctgaacttcgtggacgacctggagcccctggacaaggccagcaaggtgagcgtggagaccctggagaagaacctgagacagatgggcagacagctgcagcagctggagaaggagctggagaccttccccccccccgaggacctgcacgacaagttcgtgaccaagatgagcatcttcgtgatcagcgccaaggagcagtacgagaccctgagcaagctgcacgagaacatggagaagctgtaccagagcatcatcggctactacgccatcgacgtgaagaaggtgagcgtggaggacttcctgaccgacctgaacaacttcagaaccaccttcatgcaggccatcaaggagaacatcaagaagagagaggccgaggagaaggagaagagagtgagaatcgccaaggagctggccgagagagagagactggagagacagcagaagaagaagagactgctggagatgaagaccgagggcgacgagaccggcgtgatggacaacctgctggaggccctgcagagcggcgccgccttcagagacagaagaaagagaacccccatgcccaaggacgtgagacagagcctgagccccatgagccagagacccgtgctgaaggtgtgcaaccacgagaaccagaaggtgcagctgaccgagggcagcagaagccactacaacatcaactgcaacagcaccagaacccccgtggccaaggagctgaactacaacctggacacccacaccagcaccggcagaatcaaggccgccgagaagaaggaggcctgcaacgtggagagcaacagaaagaaggagaccgagctgctgggcagcttcagcaagaacgagagcgtgcccgaggtggaggccctgctggccagactgagagccctgtag

SEQ ID NO: 92993 - DNA, 3549 bp, Artificial Sequence
  derived and/or modified sequence
atggagcgtcaccaacctagactccaccacccagcacagggatcagcagccggaacaccttacccttccagcgcctctttacgtggctgtcgggagtctaaaatgcctcggaggaaggggccccagcatccaccaccaccctccggtcctgaggagcctggcgagaagcggcccaaatttcttgacaagtttgcaagtatacgcatcccaggatcgaagaaggagcgcccgccactgccaaatttgaaaacagcatttgcctcctcagactgcagtgccgcaccactggagatgatggaaaattttcctaaaccccttagtgagaacgaactcctagaactctttgagaagatgatggaggacatgaacttgaatgaagataagaaggctccgctgcgcgaaaaggatttttcgatcaagaaagaaatggtgatgcagtatattaacaccgcttctaaaactggcagcctgaagaggtccagacagattagtcctcaggagtttatccatgaactgaaaatgggttctgccgatgagaggcttgttacatgtctcgagtccctgcgagtgtccctcacttcgaaccccgtctcttgggtggaatcttttggtcatgaggggttaggactactgcttgacatcctggagaagctgatttccggaaaaatccaggaaaaggttgtgaagaagaatcaacacaaggtgatccagtgccttaaggctctcatgaacactcagtatggactggagagaattatgagcgaagagcgcagcctaagcctgctcgccaaggccgtcgaccctcgccacccaaatatgatgaccgacgtcgttaagctacttagcgcagtctgtatcgttggagaagagtccatattggaggaggttttagaggcccttacgagcgcaggagaggagaaaaagatcgatcgattcttttgtattgtggaaggcttgagacataacagcgtgcagctgcaagtggcctgcatgcaactaattaacgctctcgtgacctcaccggacgacctggactttaggctgcatatccggaacgagttcatgcgatgtggccttaaggagatattgccgaatctgaaatgtatcaagaacgacggactggatattcagctcaaggtctttgatgagcataaggaggaggacctttttgaattgtcccaccgactggaggacatcagagctgagttggacgaggcctacgacgtctacaacatggtttggagcactgtgaaggagacccgcgccgaggggtattttatttccatactgcagcatttgcttcttattcgtaatgattactttatcagacagcagtatttcaagctgatagacgagtgcgtttcccagatcgtgctgcacagagacgggatggaccctgattttacttatcgcaaacgccttgaccttgatctgacgcaatttgtggatatttgtatcgaccaggccaagttggaagaatttgaagagaaggcaagcgaactctataagaagttcgaaaaagaatttactgaccaccaggaaactcaggctgaactccagaagaaagaagcaaaaatcaacgagcttcaagcagaactccaagccttcaagtctcagtttggagcactacccgcagattgcaacataccacttcctccatccaaggagggtggtactggacactcagctctcccgccgccccctcctctaccttcaggcgggggagtgccacctcccccccctccacctccgcccccaccactgcctgggatgcgcatgcccttttccggacccgtgccgcctccccctcccctcggtttcctcgggggccaaaattccccacccttgcctatactgccattcggactgaaaccaaaaaaggagttcaaaccagaaataagcatgcggcgcctcaattggctgaagattcggccccatgagatgaccgagaactgcttctggattaaagtcaatgagaacaagtacgaaaacgtggatctactgtgtaaactggagaatacgttttgttgtcagcaaaaggaacgcagggaggaagaagatattgaggagaagaaatctattaaaaagaagatcaaggaactgaagtttttggacagtaaaatcgctcagaatctctccatctttctgtcctcctttagagtgccctacgaggagatacgaatgatgatcctggaggtggacgaaactcgccttgccgagtcaatgatccagaatcttatcaaacacttacctgaccaagagcagcttaactcactatctcagttcaaaagtgagtacagcaatttatgcgaaccagaacagtttgtggtagtcatgtcaaacgtgaagaggcttaggccaagactaagtgccattttgttcaagctgcagttcgaagagcaggtgaataacataaaaccagacatcatggcagtatcaaccgcttgcgaggaaataaaaaagtcaaaatcattctccaaactgctggagctcgtacttctcatgggaaattacatgaacgccggatcccgcaatgcacagacatttggcttcaatctgtcgtcactatgcaagctgaaagacactaagagtgcggatcaaaaaaccacgttactgcactttctcgtcgagatctgcgaggagaagtacccagatatcctaaatttcgttgacgacctcgaacctttggataaagcttctaaagtatcagtggagactctcgagaagaacctgaggcagatgggtcgccagctgcaacaattggaaaaagaactcgaaacctttcctcctccagaagacctacacgacaaattcgtcactaaaatgtctatatttgttatctctgcaaaagaacagtacgagacactgagcaagctgcatgagaatatggaaaaactgtatcagagcattatcgggtactatgccatcgacgtcaagaaagtttcagttgaggacttcctaactgacctcaataactttcgcaccacgtttatgcaggccatcaaagagaatatcaagaagcgcgaggctgaagaaaaggaaaaacgcgtaaggatagccaaggaactggccgagcgtgaaaggctggagcggcagcagaaaaagaagaggctgctcgagatgaaaactgaaggggatgaaaccggcgtgatggacaacctgttggaggcactacagagtggggctgccttcagggatcggcgcaagcgcacgcccatgccaaaagacgtccgccagtctttgagcccaatgagccagcgtcccgtgctgaaagtatgtaaccacgaaaatcagaaagtccaactgacagaaggatctcgatcacactacaacattaactgtaactcaactcgtacgcctgtcgcaaaagagctgaactataacttagacactcatactagcactgggagaataaaggcagctgagaaaaaagaagcctgcaacgttgaatcaaataggaagaaagaaaccgaattattaggaagctttagtaaaaacgagagcgtccctgaggtagaggcgctacttgctcggctcagggccctctag

SEQ ID NO: 92994 - DNA, 4761 bp, Artificial Sequence
  derived and/or modified sequence
tgatccggcggcgcgggattggccagtcccgggccaacacgggtggcgggagttttcagatgtgttggctgcggccccgacttcagcggttgggctaggctgtgctgactgtttgggtggcggaccccgggagtaaaacctgttgtcgatccctcagcttccagcttgcggcttgctgagtggccaccttctttccggtccccggagctgcggggaaagatggaacggcaccagccgcggctgcaccacccggcccaaggctcagccgctgggactccctacccttcctcagcctctctccgcggctgccgggaaagcaagatgccgcgcaggaagggcccccaacaccctccgccgcccagtggccccgaggagcctggggagaagcgccccaagtttctggacaaatttgccagcataagaattccagggagcaagaaagagagacctccacttcccaacctgaagactgcatttgcaagcagtgattgctcagcagcacctttagagatgatggagaactttccaaagccactgtcagagaatgaactcttagaactttttgaaaaaatgatggaagatatgaatttaaatgaagataaaaaggcaccattgcgggaaaaggacttcagtatcaaaaaagaaatggtgatgcagtacattaatactgcttctaagacaggaagtcttaagagaagccgacagatctcacctcaggaattcattcatgagctgaaaatggggtctgcagatgagagacttgtcacatgcctggagtctctccgagtgtctttgaccagcaatcctgtgagttgggtggaaagctttggacatgaagggcttggattattattagacattttggaaaaactgattagtggaaaaatccaagaaaaagttgtaaagaaaaatcaacataaagtcatacagtgtctaaaagccctgatgaatacgcagtatggcttggaaagaattatgagtgaggagaggagcctttccttattggccaaagccgtggatcccagacaccccaatatgatgacagatgtggttaaacttctctctgcggtatgcattgtaggggaagaaagcatccttgaagaagttttagaagctttaacttcagctggtgaagaaaaaaaaattgacagatttttttgtattgtggaaggcctccggcacaattcagttcaactgcaagtagcttgtatgcagctcatcaatgccctggttacatctcctgatgatttggatttcaggcttcacatcagaaatgaatttatgcgttgtggattgaaagagatattgccaaatttaaaatgcattaagaatgatggcctggatatccaacttaaagtctttgatgagcataaagaagaagatttgtttgagttatcccatcgccttgaagatattagagctgaacttgatgaagcatatgatgtttacaacatggtgtggagcacagttaaagaaactagagcagagggatattttatttctattcttcagcatcttttgctgattcgaaatgattattttataaggcaacaatacttcaaattaattgatgagtgtgtatcccagattgtattgcatagagatggaatggatccagacttcacatatcgaaaaagactagatttagatttaacccagtttgtagacatttgcatagatcaagcaaaactagaagagtttgaagagaaagcatcagaactttacaagaaatttgaaaaagagtttaccgaccaccaagaaactcaggctgaattgcagaaaaaagaggcaaagattaatgagcttcaagcagagctacaagcttttaagtctcagtttggtgccttgccagctgattgtaatattcctttgcctccctctaaagaaggtggaactggccactcagcacttcctcctccgcctccactgccttctggtggaggggtgccgcctccacctcctcccccaccacctcctccacttccaggaatgcggatgccattcagtggtcctgtgcctccaccacctcccctgggattccttggaggacaaaattctcctcctctaccaatcctgccatttgggttgaaaccaaagaaagaatttaaacctgaaatcagcatgagaagattgaattggttaaagatcagacctcatgaaatgactgaaaactgtttctggataaaagtaaatgaaaataagtatgaaaacgtggatttgctttgtaaacttgagaatacattttgttgccaacaaaaagagagaagagaagaggaagatattgaagagaagaaatcgattaagaaaaaaattaaagaacttaagtttttagattctaaaattgcccagaacctttcaatcttcctgagctcttttcgggtgccatatgaggaaatcagaatgatgatattggaagtagatgaaacacggttggcagagtctatgattcagaacttaataaagcatcttcctgatcaagagcaattaaattcattgtctcagttcaagagtgaatatagcaacttatgtgaacctgagcagtttgtggttgtgatgagcaatgtgaagagactacggccacggctcagtgctattctctttaagcttcagtttgaagagcaggtgaacaacatcaaacctgacatcatggctgtcagtactgcctgcgaagagataaagaagagcaaaagctttagcaagttgctggaacttgtattgctaatgggaaactacatgaatgctggctcccggaatgctcaaaccttcggatttaaccttagctctctctgtaaactaaaggacacaaaatcagcagatcagaaaacaacgctacttcatttcctggtagaaatatgtgaagagaagtaccctgatatactgaattttgtggatgatttggaacctttagacaaagctagtaaagtctctgtagaaacgctggaaaagaatttgaggcagatgggaaggcagcttcaacagcttgagaaggaattggaaacctttccccctcctgaggacttgcatgacaagtttgtgacaaagatgtccatatttgttatcagtgcaaaagaacaatatgagacactttcgaagttacacgaaaacatggaaaagttataccagagtataataggatactatgccattgatgtgaagaaggtgtctgtggaagactttcttactgacctgaataacttcagaaccacattcatgcaagcaataaaggagaatatcaaaaaaagagaagcagaggaaaaagaaaaacgtgtcagaatagctaaagaattagcagagcgagaaagactcgaacgccaacaaaagaaaaagcgtttattagaaatgaagactgagggtgatgagacaggagtgatggataatctgctggaggccttgcagtccggggctgccttccgcgacagaagaaaaaggacaccgatgccaaaagatgttcggcagagtctcagtccaatgtctcagaggcctgttctgaaagtttgtaaccatgaaaatcagaaagtgcagttgacagaagggtcacgttcacactacaatatcaattgcaactcaacaaggactccagtcgccaaggagcttaattataatctagacactcatacgtctactgggaggatcaaggcagctgagaagaaggaagcgtgtaatgtagaaagcaacagaaaaaaggaaacggaacttcttggctctttttctaaaaatgaatcagttcccgaagttgaagccctgctggcaagattacgagctttataagttaaactggtttttaaaaaaaatgattaagccaaatataaagccatgctctaaactataacacttgaaaaaattgcttttatgtaagtgactttatatagttttaaattatgatatatattagaaaaataaagctaaatatatgattgcaatgctttttctatgtactggaggttttggtttattcaagattgtaccgggctttaatccttttttttttttttttgtctcctggtattcctcagttctttatttggtggttaaattatacatattgctttagagagcaggtaggtggccatgtgttcagcagtgtgtccttaagaaaataccatctttctaagccactggaatttttactttactatttttaacattaatggatgtcaggtcatcaacctcaagtctttacatatccatgtatattccatatatattgtttatataggcccaagtttctccttaattgggatctatatactaccagcacaacatcaaaaacatgtaattgaatacatcagagctatatatgtaaggaaatgactggtgaccccattatcatcattgttgaattcatgttaagtagaccctctaggggaccataaggcaattgagcacataacgaaaaatgatgcaataagaatgtatgcactctctttgccaaatgcatgtgcttttgtgtaacgtggatgtaaacagaattgcagtgctgccgaaattcttgatcttggctaagagagtatttttccccttgtaattatgactctgagataaaattgccattttgaaatttccaaagtaacaactttttttattttatgaataaacttgggattgcaatttctctgatctgacaatcaataactttaacaaagatctaaataagtgtttcaaggaaagttttcctaagcaaatgtaatattacctcatttgggcatcattactctgttaattctatatcaaaggaaataaacttgctacttgcactaaatg

SEQ ID NO: 92995 - DNA, 3549 bp, Artificial Sequence
  derived and/or modified sequence
atggagcggcaccagccccggctgcaccacccagcccagggcagcgctgctggcaccccctaccccagcagcgccagcctgcggggctgccgggagagcaagatgcccaggaggaagggcccccagcaccccccaccacccagcggccctgaggagcctggagagaagaggcccaagttcctggacaagtttgccagcatccgcatccctggcagcaagaaggagaggcctcccctgcccaacctgaagacagcctttgccagcagtgactgcagcgctgcccccctggagatgatggagaacttccccaagcccctgtctgaaaatgagctgctggagctgtttgagaagatgatggaggacatgaacctgaatgaagacaagaaggcccccctgcgggagaaggacttcagcatcaagaaggagatggtgatgcagtacatcaacacagccagcaagacaggcagcctgaagaggagccggcagatcagcccccaggagttcatccacgagctgaagatgggcagcgcagatgagcggctggtgacctgcctggagagcctgcgggtgtccctgaccagcaaccctgtgtcctgggtggagagctttggacatgagggcctgggcctgctgctggacatcctggagaagctgatcagcggcaagatccaggagaaggtggtgaagaagaaccagcacaaggtgatccagtgcctgaaggccctgatgaacacccagtatggcctggagcgcatcatgtctgaggagaggagcctgagcctgctggccaaggctgtggaccccaggcaccccaacatgatgacagatgtggtgaagctgctgtctgctgtgtgcatcgtgggggaggagagcatcctggaggaggtgctggaggccctgaccagcgctggggaggagaagaagattgaccgcttcttctgcatcgtggagggcctgcggcacaacagcgtgcagctgcaggtggcctgcatgcagctgatcaatgccctggtgaccagcccagatgacctggacttccggctgcacatcagaaatgagttcatgagatgtggcctgaaggagatcctgcccaacctgaagtgcatcaagaatgatggcctggacatccagctgaaggtgtttgatgagcacaaggaggaggacctgtttgagctgagccaccggctggaggacatccgggcagagctggatgaggcctatgatgtgtacaacatggtgtggagcacagtgaaggagaccagggctgagggctacttcatcagcatcctgcagcacctgctgctgatcagaaatgactacttcatccggcagcagtacttcaagctgattgatgaatgtgtgtcccagatcgtgctgcacagagatggcatggaccctgacttcacctacaggaagaggctggacctggacctgacccagtttgtggacatctgcatcgaccaggccaagctggaggagtttgaggagaaggccagcgagctgtacaagaagtttgagaaggagttcacagaccaccaggagacccaggccgagctgcagaagaaggaggccaagatcaatgagctgcaggccgagctgcaggccttcaagagccagtttggagccctgcctgctgactgcaacatccccctgccccccagcaaggagggcggcaccggccacagcgccctgcccccacctccacccctgcccagcggcggcggcgtgcccccacctcctcctcctcctcctcctccacccctgcccggcatgaggatgcccttcagcggccctgtgcccccacctccacccctgggcttcctgggcggccagaacagcccccccctgcccatcctgcccttcggcctgaagcccaagaaggagttcaagccagagatctccatgaggcggctgaactggctgaagatccggccccatgagatgacagagaactgcttctggatcaaggtgaatgaaaacaagtatgaaaatgtggacctgctgtgcaagctggagaacaccttctgctgccagcagaaggagcggcgggaggaggaggacatcgaggagaagaagagcatcaagaagaagatcaaggagctgaagttcctggacagcaagatcgcccagaacctgagcatcttcctgagcagcttccgggtgccctatgaggagatccgcatgatgatcctggaggtggatgagacccggctggccgagagcatgatccagaacctgatcaagcacctgcctgaccaggagcagctgaacagcctgagccagttcaagtctgagtacagcaacctgtgtgagcctgagcagtttgtggtggtgatgagcaatgtgaagaggctgcggccccggctgagcgccatcctcttcaagctgcagtttgaggagcaggtgaacaacatcaagccagacatcatggctgtgtccacagcctgtgaggagatcaagaagagcaagagcttcagcaagctgctggagctggtgctgctgatgggcaactacatgaatgccggcagcagaaatgcccagaccttcggcttcaacctgagcagcctgtgcaagctgaaggacaccaagtctgctgaccagaagaccaccctgctgcacttcctggtggagatctgtgaggagaagtacccagacatcctgaactttgtggatgacctggagcccctggacaaggccagcaaggtgtctgtggagaccctggagaagaacctgcggcagatgggccggcagctgcagcagctggagaaggagctggagaccttccccccacctgaggacctgcatgacaagtttgtgaccaagatgagcatctttgtgatcagcgccaaggagcagtatgagaccctgagcaagctgcacgagaacatggagaagctgtaccagagcatcatcggctactatgccattgatgtgaagaaggtgtctgtggaggacttcctgacagacctgaacaacttccgcaccaccttcatgcaggccatcaaggagaacatcaagaagcgggaggccgaggagaaggagaagagggtgagaattgccaaggagctggccgagcgggagcggctggagcggcagcagaagaagaagaggctgctggagatgaagacagaaggagatgagaccggggtgatggacaacctgctggaggccctgcagagcggggccgccttccgggacaggaggaagaggacccccatgcccaaggatgtgcggcagagcctgagccccatgagccagaggcctgtgctgaaggtgtgcaaccacgagaaccagaaggtgcagctgacagagggcagccgcagccactacaacatcaactgcaacagcaccaggacccctgtggccaaggagctgaactacaacctggacacccacaccagcacaggccgcatcaaggctgctgagaagaaggaggcctgcaatgtggagagcaacaggaagaaggagacagagctgctgggcagcttcagcaagaatgaatctgtgcctgaggtggaggccctgctggcccggctgcgggccctgtag

SEQ ID NO: 92996 - DNA, 3549 bp, Artificial Sequence
  derived and/or modified sequence
atggagcggcaccagccccggctgcaccaccccgcccagggcagcgccgccggaactccctatcccagcagcgcttcattgaggggttgtagagagtctaaaatgcccaggaggaagggcccccagcaccctcccccaccaagcgggcccgaggaaccaggcgaaaagcgccccaagttcctcgacaaattcgcaagcatacgcatacctgggtctaagaaggagaggcctccactgccaaatctcaaaactgctttcgcatcctctgattgctccgccgcaccactcgagatgatggagaattttccaaaacccctgagcgaaaatgaactgctggagctgttcgaaaaaatgatggaggatatgaatcttaacgaggacaaaaaggcccctctgagagaaaaagatttctccattaagaaggagatggtgatgcagtacataaacactgccagcaagacaggctctctcaagcgttcaagacagatttctcctcaggaatttatccatgagttgaagatgggcagcgctgacgagcgactagtaacttgcttggaaagtttaagggtcagcctaacttctaaccctgtgtcttgggtagagtcattcggacacgaaggactgggtcttctgctggatatattggagaaacttatttctgggaagattcaggagaaagtcgtaaagaagaaccagcataaagttattcagtgtctgaaggccttgatgaatacacagtatgggctggaaagaatcatgagtgaggagcggtccctgtccctgcttgccaaagccgtggatccccggcacccaaatatgatgaccgacgtggttaaactgctgtcagcagtgtgtatcgtcggtgaggagtcgatcctggaggaggtgctggaggccctaacttctgccggggaagaaaagaaaatagacaggttcttttgtatagtagaaggactgagacataattctgttcagctgcaggtggcctgtatgcagctgattaacgcactggtgacctcacccgacgacctggattttagactgcacattagaaacgagtttatgcggtgcggactgaaagagatcctgcctaatctgaaatgcatcaagaatgacggactagatatacaattaaaggtttttgatgaacacaaggaagaggatctgttcgaacttagccatcgattagaggacatccgcgccgagctggatgaggcttacgacgtgtataatatggtttggagcacggtgaaggagactcgtgccgaggggtacttcattagcatcttgcagcatttgctgctgatcaggaacgactatttcatcaggcagcagtattttaaactgattgacgaatgtgtgtctcagatcgtgctccaccgggatggcatggacccggacttcacatacagaaagagactcgacttggacctgactcaatttgtggatatctgtattgaccaggccaagctggaagagtttgaggaaaaggcgtcggagctttacaagaagttcgagaaggaattcactgatcatcaggagactcaggcggagctgcagaaaaaggaggccaagattaatgaactgcaggcagagcttcaggcctttaaatcccagtttggggcccttcctgccgactgtaatattccacttcctcctagcaaggaggggggcaccggccacagcgccctccctcctcccccacccctgcccagtgggggcggtgttcctcctcccccaccacctcctcctcccccaccattaccaggtatgcgcatgcctttttcagggccagtccctccacccccccccctggggtttctgggcggtcagaatagtccaccccttccaattctcccttttggactcaagcctaagaaggagtttaagcctgaaatctccatgcgccgactcaactggctgaagattcggccgcacgaaatgacagagaactgtttctggatcaaggtcaatgaaaataagtatgagaatgttgacctcttatgtaagctggaaaatactttctgctgccagcaaaaagagcgaagagaagaggaggacattgaagagaaaaagagcatcaaaaaaaaaattaaggaactgaagttcctggatagtaaaatcgcacaaaatctgagtatatttctctctagttttcgtgtcccgtatgaggaaattcgcatgatgatactggaggtggatgagacgcgtcttgccgaatccatgattcagaatctcattaaacacctaccggaccaggaacagctgaatagcctcagtcaattcaaaagcgagtactctaacctatgcgagcctgagcagttcgtggtggtcatgtccaatgtcaaacggctaaggcctagactgtcagccatcttgttcaagctccagtttgaggaacaggtcaataacataaagcccgatattatggccgtgtccactgcatgcgaagaaataaaaaaatctaagtccttctcgaaacttctggagctcgtgttattgatgggaaactatatgaatgccggcagcaggaatgcccaaactttcggcttcaatttaagctctttatgcaaattgaaagacacgaagtctgctgaccagaaaaccacgctactgcacttccttgtggagatttgtgaagagaagtatcctgatattttgaatttcgtggacgatctcgaacctttagataaggcttccaaggtcagtgtcgagaccctggaaaagaatttgcggcagatgggccgtcagctgcagcagctcgaaaaggagctcgagactttcccacccccagaagatctgcatgataagttcgtcacaaagatgtccatttttgtgatctctgccaaggagcaatatgaaacgcttagtaaactgcatgaaaacatggaaaaactctaccagtcaatcataggatactacgccatcgatgttaagaaggtcagtgtggaggacttcctgacagacctcaacaatttccggaccacgttcatgcaagccatcaaagagaatattaaaaagcgggaggccgaggagaaagaaaagcgcgtgaggatagctaaggaactagccgaaagggagagattggaacggcagcagaaaaaaaaaaggctgctggaaatgaagacagaaggcgatgagacaggagtcatggataacctgctagaggcactccagagtggcgccgctttcagagacaggagaaagagaacccccatgcctaaagatgtccgccaaagcctatcccctatgtctcagagaccagtgctaaaggtttgcaatcacgaaaatcagaaggtccagttgacagagggaagccggtcacattacaacatcaactgtaacagcacacgcacccctgtcgcaaaggaattgaattacaaccttgacacacatacatccacagggaggatcaaggcggccgagaagaaggaggcttgtaacgtggagagcaacaggaagaaagagacggaacttctgggatccttctccaaaaacgaatcggtgccagaggtggaggccttgctcgcccgcctgcgcgctctgtag

SEQ ID NO: 92997 - DNA, 3549 bp, Artificial Sequence
  derived and/or modified sequence
atggaaaggcaccagcccaggttgcaccatcctgcccaagggagtgcagcgggtaccccatatcctagcagcgcctctctcagggggtgtagggagagtaagatgccgagacggaagggccctcagcatccacctcccccaagcggtcccgaggaacccggagaaaagaggcccaagttccttgacaagttcgcttcgatccggattccgggatctaaaaaggagcgccctccactgccaaacctgaaaactgcgttcgccagcagtgattgctctgccgctcctctcgaaatgatggaaaatttccccaagccactgtccgaaaatgaactgctagagttgttcgagaaaatgatggaggatatgaacttaaatgaagacaaaaaggcccctctgcgagagaaagacttctccattaagaaagagatggttatgcagtatattaataccgcaagcaaaaccggctccttgaaacggagcagacaaatttcccctcaggagtttattcacgagctgaaaatgggcagcgccgatgaaagattagtgacttgcctggagagcctgcgagtatctctgacaagcaaccccgtgagctgggtggaaagtttcgggcacgaaggcctcggactgctgttagacattcttgaaaaactcatatcaggaaaaatccaggaaaaggtggttaagaagaaccagcacaaggtgatccaatgtctgaaggctctgatgaacacccaatatgggctggagagaattatgagcgaggagcggtctttgtcactcctcgcgaaagcggtggatcccaggcatcctaacatgatgaccgatgtggtcaaactactgtcagcggtttgcatcgtgggcgaggaatccattttagaggaagtactggaggcccttacctcagctggtgaggaaaaaaaaattgaccgatttttttgtatcgtggagggactgagacacaacagcgtccagctgcaggtcgcatgtatgcagctaatcaacgcccttgtgaccagccccgacgatctggactttaggctgcatatcagaaacgaattcatgaggtgtggcctcaaggagattctgccgaacctgaaatgcatcaagaatgatggacttgacatccagcttaaggtttttgacgaacataaggaggaagacctgtttgagttgagccaccgccttgaagatattcgtgctgaactggatgaggcctacgacgtgtacaacatggtatggtcgacggtgaaggagacccgcgcagaagggtactttatcagtattctgcagcatttgttgttaatccgaaacgactactttataaggcagcaatattttaaacttattgatgagtgcgtgagtcagatcgtgctgcaccgggacgggatggaccctgatttcacatataggaaaagacttgatctggacctgactcaattcgtcgatatttgtattgaccaggcgaagttagaggaattcgaggagaaggcatctgaactgtacaaaaagttcgagaaagagttcaccgatcaccaggagacccaggccgagctgcaaaaaaaggaggctaaaattaacgaattgcaggctgagttacaggcgttcaaatctcagttcggagcgctgccggcagattgtaacattccactgccccctagtaaagaggggggaacggggcactctgcactgccacctccccctccactgccctcaggtggcggtgtgccaccccctcctcctccccctcccccacccccactccccggtatgcggatgccattctcgggcccagtgcctcctcctccacctttggggtttctaggagggcaaaacagccctccccttcccatcctgccatttgggctgaagccaaagaaggagtttaaaccagaaattagcatgaggagattgaactggctcaaaatcagaccgcatgagatgacagagaactgcttctggatcaaagtgaatgagaacaaatacgaaaacgtagatctcttgtgtaagctggagaatactttttgctgccagcagaaggagcggagagaggaagaggacatcgaagagaagaagtctatcaagaagaaaattaaggaattgaagtttttagattccaagatcgcccagaacctaagcatctttttgtcctcattcagagttccctacgaagaaatcagaatgatgatcctggaggtggacgagaccagactcgcggaatctatgattcagaatctgattaaacacctgcctgaccaggagcagctgaacagcctctctcagtttaagtctgaatactcaaacctatgcgaacccgaacagtttgtggtggtcatgtctaatgtcaagcgattacgcccaaggttgtcggcaatacttttcaagctccagttcgaagagcaggtcaataacataaagccagacattatggctgtctcaaccgcttgtgaggagatcaagaaatctaagagctttagcaaactgctcgagttagtgttgttgatggggaactacatgaatgccggttctcgcaacgcccagacattcggttttaatttaagtagcctttgcaagttaaaagacaccaaatctgctgaccagaagaccacgttgctccattttcttgtcgaaatctgcgaggagaaatacccggacatactaaacttcgtggacgacctcgagcccttggataaagcctccaaagtgagcgtcgaaactctagaaaagaacttgaggcaaatgggtcgacagctgcagcagttggaaaaggaactcgagaccttcccaccgcctgaggatctgcacgacaaattcgtgaccaaaatgtccatttttgttatttcagcaaaagaacaatatgaaactctgagtaagttgcacgagaatatggagaaactctatcagagtataatcgggtactatgctatcgacgtcaagaaggtcagcgtggaagattttctgactgatctcaataatttccgtaccacctttatgcaggctataaaagagaatatcaaaaagagagaggctgaggagaaggagaagcgtgtgcgcatcgcaaaagagctggccgagcgggaacggctcgaacgacagcagaagaagaaaagactcctcgaaatgaaaaccgagggcgatgagactggtgtcatggataatctcttggaagcactgcagtccggtgctgccttccgcgacaggcggaaaaggacaccgatgcccaaagacgtccgccaaagtctatcaccgatgtctcagagacctgtactgaaagtttgcaaccatgaaaaccagaaagtgcagctgaccgaagggtctagaagccactataacatcaattgcaactctacaaggactcccgtcgccaaggaactgaactataacctggacactcacaccagcaccggcaggatcaaggcagccgaaaaaaaggaggcatgcaacgtggaatctaacaggaaaaaggagacagagctgctgggatcattttccaaaaatgagtctgtgcccgaagtcgaagccttgctggccagactgagggcgctctag

SEQ ID NO: 92998 - protein, 1147 aa, Artificial Sequence
  derived and/or modified sequence
MERHQPRLHHPAQGSAAGTPYPSSASLRGCRESKMPRRKGPQHPPPPSGPEEPGEKRPKFLDKFASIRIPGSKKERPPLPNLKTAFASSDCSAAPLEMMENFPKPLSENELLELFEKMMGSLKRSRQISPQEFIHELKMGSADERLVTCLESLRVSLTSNPVSWVESFGHEGLGLLLDILEKLISGKIQEKVVKKNQHKVIQCLKALMNTQYGLERIMSEERSLSLLAKAVDPRHPNMMTDVVKLLSAVCIVGEESILEEVLEALTSAGEEKKIDRFFCIVEGLRHNSVQLQVACMQLINALVTSPDDLDFRLHIRNEFMRCGLKEILPNLKCIKNDGLDIQLKVFDEHKEEDLFELSHRLEDIRAELDEAYDVYNMVWSTVKETRAEGYFISILQHLLLIRNDYFIRQQYFKLIDECVSQIVLHRDGMDPDFTYRKRLDLDLTQFVDICIDQAKLEEFEEKASELYKKFEKEFTDHQETQAELQKKEAKINELQAELQAFKSQFGALPADCNIPLPPSKEGGTGHSALPPPPPLPSGGGVPPPPPPPPPPPLPGMRMPFSGPVPPPPPLGFLGGQNSPPLPILPFGLKPKKEFKPEISMRRLNWLKIRPHEMTENCFWIKVNENKYENVDLLCKLENTFCCQQKERREEEDIEEKKSIKKKIKELKFLDSKIAQNLSIFLSSFRVPYEEIRMMILEVDETRLAESMIQNLIKHLPDQEQLNSLSQFKSEYSNLCEPEQFVVVMSNVKRLRPRLSAILFKLQFEEQVNNIKPDIMAVSTACEEIKKSKSFSKLLELVLLMGNYMNAGSRNAQTFGFNLSSLCKLKDTKSADQKTTLLHFLVEICEEKYPDILNFVDDLEPLDKASKVSVETLEKNLRQMGRQLQQLEKELETFPPPEDLHDKFVTKMSIFVISAKEQYETLSKLHENMEKLYQSIIGYYAIDVKKVSVEDFLTDLNNFRTTFMQAIKENIKKREAEEKEKRVRIAKELAERERLERQQKKKRLLEMKTEGDETGVMDNLLEALQSGAAFRDRRKRTPMPKDVRQSLSPMSQRPVLKVCNHENQKVQLTEGSRSHYNINCNSTRTPVAKELNYNLDTHTSTGRIKAAEKKEACNVESNRKKETELLGSFSKNESVPEVEALLARLRAL

SEQ ID NO: 92999 - DNA, 3444 bp, Artificial Sequence
  derived and/or modified sequence
atggagagacaccagcccagactgcaccaccccgcccagggcagcgccgccggcaccccctaccccagcagcgccagcctgagaggctgcagagagagcaagatgcccagaagaaagggcccccagcacccccccccccccagcggccccgaggagcccggcgagaagagacccaagttcctggacaagttcgccagcatcagaatccccggcagcaagaaggagagaccccccctgcccaacctgaagaccgccttcgccagcagcgactgcagcgccgcccccctggagatgatggagaacttccccaagcccctgagcgagaacgagctgctggagctgttcgagaagatgatgggcagcctgaagagaagcagacagatcagcccccaggagttcatccacgagctgaagatgggcagcgccgacgagagactggtgacctgcctggagagcctgagagtgagcctgaccagcaaccccgtgagctgggtggagagcttcggccacgagggcctgggcctgctgctggacatcctggagaagctgatcagcggcaagatccaggagaaggtggtgaagaagaaccagcacaaggtgatccagtgcctgaaggccctgatgaacacccagtacggcctggagagaatcatgagcgaggagagaagcctgagcctgctggccaaggccgtggaccccagacaccccaacatgatgaccgacgtggtgaagctgctgagcgccgtgtgcatcgtgggcgaggagagcatcctggaggaggtgctggaggccctgaccagcgccggcgaggagaagaagatcgacagattcttctgcatcgtggagggcctgagacacaacagcgtgcagctgcaggtggcctgcatgcagctgatcaacgccctggtgaccagccccgacgacctggacttcagactgcacatcagaaacgagttcatgagatgcggcctgaaggagatcctgcccaacctgaagtgcatcaagaacgacggcctggacatccagctgaaggtgttcgacgagcacaaggaggaggacctgttcgagctgagccacagactggaggacatcagagccgagctggacgaggcctacgacgtgtacaacatggtgtggagcaccgtgaaggagaccagagccgagggctacttcatcagcatcctgcagcacctgctgctgatcagaaacgactacttcatcagacagcagtacttcaagctgatcgacgagtgcgtgagccagatcgtgctgcacagagacggcatggaccccgacttcacctacagaaagagactggacctggacctgacccagttcgtggacatctgcatcgaccaggccaagctggaggagttcgaggagaaggccagcgagctgtacaagaagttcgagaaggagttcaccgaccaccaggagacccaggccgagctgcagaagaaggaggccaagatcaacgagctgcaggccgagctgcaggccttcaagagccagttcggcgccctgcccgccgactgcaacatccccctgccccccagcaaggagggcggcaccggccacagcgccctgcccccccccccccccctgcccagcggcggcggcgtgcccccccccccccccccccccccccccccccccctgcccggcatgagaatgcccttcagcggccccgtgcccccccccccccccctgggcttcctgggcggccagaacagcccccccctgcccatcctgcccttcggcctgaagcccaagaaggagttcaagcccgagatcagcatgagaagactgaactggctgaagatcagaccccacgagatgaccgagaactgcttctggatcaaggtgaacgagaacaagtacgagaacgtggacctgctgtgcaagctggagaacaccttctgctgccagcagaaggagagaagagaggaggaggacatcgaggagaagaagagcatcaagaagaagatcaaggagctgaagttcctggacagcaagatcgcccagaacctgagcatcttcctgagcagcttcagagtgccctacgaggagatcagaatgatgatcctggaggtggacgagaccagactggccgagagcatgatccagaacctgatcaagcacctgcccgaccaggagcagctgaacagcctgagccagttcaagagcgagtacagcaacctgtgcgagcccgagcagttcgtggtggtgatgagcaacgtgaagagactgagacccagactgagcgccatcctgttcaagctgcagttcgaggagcaggtgaacaacatcaagcccgacatcatggccgtgagcaccgcctgcgaggagatcaagaagagcaagagcttcagcaagctgctggagctggtgctgctgatgggcaactacatgaacgccggcagcagaaacgcccagaccttcggcttcaacctgagcagcctgtgcaagctgaaggacaccaagagcgccgaccagaagaccaccctgctgcacttcctggtggagatctgcgaggagaagtaccccgacatcctgaacttcgtggacgacctggagcccctggacaaggccagcaaggtgagcgtggagaccctggagaagaacctgagacagatgggcagacagctgcagcagctggagaaggagctggagaccttccccccccccgaggacctgcacgacaagttcgtgaccaagatgagcatcttcgtgatcagcgccaaggagcagtacgagaccctgagcaagctgcacgagaacatggagaagctgtaccagagcatcatcggctactacgccatcgacgtgaagaaggtgagcgtggaggacttcctgaccgacctgaacaacttcagaaccaccttcatgcaggccatcaaggagaacatcaagaagagagaggccgaggagaaggagaagagagtgagaatcgccaaggagctggccgagagagagagactggagagacagcagaagaagaagagactgctggagatgaagaccgagggcgacgagaccggcgtgatggacaacctgctggaggccctgcagagcggcgccgccttcagagacagaagaaagagaacccccatgcccaaggacgtgagacagagcctgagccccatgagccagagacccgtgctgaaggtgtgcaaccacgagaaccagaaggtgcagctgaccgagggcagcagaagccactacaacatcaactgcaacagcaccagaacccccgtggccaaggagctgaactacaacctggacacccacaccagcaccggcagaatcaaggccgccgagaagaaggaggcctgcaacgtggagagcaacagaaagaaggagaccgagctgctgggcagcttcagcaagaacgagagcgtgcccgaggtggaggccctgctggccagactgagagccctgtag

SEQ ID NO: 93000 - DNA, 3444 bp, Artificial Sequence
  derived and/or modified sequence
atggaacgccaccaaccccgcttacaccatccagcccagggctctgccgccggaaccccttacccatcaagtgcctctcttcggggatgcagagaaagtaagatgcctcggcggaaaggtccacagcatcccccaccccctagcgggcctgaggagccgggagaaaaacggccaaaatttcttgataagtttgcgtctattcgcatccccgggagtaagaaggagcggccccctctgccaaacctgaagactgcttttgctagctcagactgctcagccgccccactggagatgatggaaaatttcccgaaacctctcagcgaaaatgaactcctggagctgtttgaaaaaatgatgggctcactcaagcggagcagacagatatccccacaagagttcattcacgagttgaagatgggaagtgccgacgagagactcgtaacttgcctggagtcgctcagagtcagcttaacctcaaacccggtgtcttgggttgaaagttttggtcatgagggtttgggtctgcttctggacatactggagaagctcatcagtggcaaaatccaggagaaagtggtgaaaaaaaatcaacataaagtcatacagtgtttaaaggcacttatgaacacccagtacgggctggagcgcatcatgagcgaggagagatctctctctctgctggctaaggcggttgatcccaggcaccctaacatgatgactgatgtagtaaagttactgtctgctgtgtgtatagtgggggaagagtccattttggaggaggtactggaggcgcttacttcggctggagaggagaaaaagatcgaccgttttttctgcatagtagagggactacggcataactcagtgcagctgcaagtcgcgtgcatgcaactaatcaacgccctcgtcacatctccagatgatctggattttcgactacatatccgaaatgagttcatgcgatgcggtcttaaagagatcctgcccaacctgaaatgcatcaagaatgacggcttggatattcagttgaaggtcttcgatgagcataaagaggaagacttattcgagctgagtcacagattggaagacatccgagcggaactagatgaggcgtatgacgtgtataacatggtgtggagcacggttaaagagaccagggctgagggctactttatttcaattttgcagcacctacttctcatcaggaacgactacttcatccgtcagcagtacttcaaacttatcgacgaatgtgtttcccaaatcgtgttgcaccgcgatggcatggatccagacttcacctacaggaagcgcctggatctagatctgactcagtttgtcgatatttgtattgaccaggcgaaactagaagaattcgaggaaaaggctagcgaactctataagaagtttgagaaggagtttactgaccatcaggagacccaggccgaattgcagaagaaggaggccaagatcaacgagctccaggccgagttgcaggcctttaaaagtcagttcggggcattgccagcagattgtaacattccactcccaccctcaaaagaggggggtacagggcacagcgcgttgccaccaccacctcccttgccatccgggggaggggtgcccccgccgcccccaccgccgccccccccacctctcccaggcatgcgcatgcctttcagcggaccagtccctcctccccctccactgggattcctcggtggacagaatagtccgcctctgccgattctgccatttggcctaaagccaaagaaagagttcaagcctgagatttctatgagaagactcaattggctgaaaattcgccctcacgagatgacagaaaactgtttctggattaaagtgaacgagaacaagtatgaaaacgttgacctgctgtgcaaactggaaaacaccttttgctgtcagcagaaggagaggcgcgaggaggaagatatcgaagagaaaaagagcatcaagaagaagattaaagaactgaagtttctagacagcaagatcgcacagaacctttctatttttcttagctcatttcgcgtgccttacgaagagatacgcatgatgattctggaggtggacgaaacccgacttgcagagtctatgattcaaaaccttattaaacacctcccagaccaagaacagttgaatagcctgagccagtttaagtcagagtactcaaatttgtgtgagcccgagcagttcgtcgttgtgatgagcaacgtgaagcgactgagacctcgactgagcgccatcctctttaaattgcagtttgaagagcaagttaacaatatcaaaccagacatcatggctgtgagcactgcatgcgaggagataaaaaagtcgaagtcattttccaaactactggagttggtgcttttaatgggaaattacatgaatgcggggtcgcgaaatgcccaaacttttggcttcaatctgagcagcttatgtaagctgaaagacaccaaatccgcggaccagaagaccaccctcctccattttttggtggaaatttgcgaggagaaatacccagatattcttaattttgtcgacgacctcgagccactggataaggcctccaaagtcagcgtggagacgctcgaaaaaaacttgcgccaaatggggcggcaattgcagcaacttgagaaagaattagagaccttcccaccccctgaagatcttcacgacaagttcgtcactaagatgtccatattcgttattagcgccaaggagcagtatgagactctgagcaagttacacgaaaatatggaaaagctctaccagtcaatcattggatattacgccatagacgtgaaaaaggtctcggtggaggatttcctcactgacttgaataactttcggacaacgttcatgcaggcaatcaaggagaatatcaagaagcgcgaggctgaagagaaggagaaaagggttaggattgctaaagagctggccgagagagagcgccttgagaggcagcagaaaaagaagcggctcctagagatgaagaccgaaggggatgagaccggggttatggataacctgctcgaagcactgcagagtggggctgcttttcgcgacaggcgcaagcgcactccaatgccgaaggatgtaaggcaaagcttgtcacctatgtctcaaagacctgtcttgaaagtgtgtaaccacgaaaaccagaaagtgcagctcaccgagggcagccgaagccattacaacattaactgcaacagcacacgaacccccgtggcaaaggagctgaattacaaccttgatacccacaccagcacagggcgtatcaaagctgcggagaaaaaagaagcatgtaacgtggaaagcaacaggaaaaaggaaactgaacttttgggatcattcagcaaaaatgagtctgtgccagaagtcgaagctctgttagccaggcttagagccctttag

SEQ ID NO: 93001 - DNA, 4656 bp, Artificial Sequence
  derived and/or modified sequence
tgatccggcggcgcgggattggccagtcccgggccaacacgggtggcgggagttttcagatgtgttggctgcggccccgacttcagcggttgggctaggctgtgctgactgtttgggtggcggaccccgggagtaaaacctgttgtcgatccctcagcttccagcttgcggcttgctgagtggccaccttctttccggtccccggagctgcggggaaagatggaacggcaccagccgcggctgcaccacccggcccaaggctcagccgctgggactccctacccttcctcagcctctctccgcggctgccgggaaagcaagatgccgcgcaggaagggcccccaacaccctccgccgcccagtggccccgaggagcctggggagaagcgccccaagtttctggacaaatttgccagcataagaattccagggagcaagaaagagagacctccacttcccaacctgaagactgcatttgcaagcagtgattgctcagcagcacctttagagatgatggagaactttccaaagccactgtcagagaatgaactcttagaactttttgaaaaaatgatgggaagtcttaagagaagccgacagatctcacctcaggaattcattcatgagctgaaaatggggtctgcagatgagagacttgtcacatgcctggagtctctccgagtgtctttgaccagcaatcctgtgagttgggtggaaagctttggacatgaagggcttggattattattagacattttggaaaaactgattagtggaaaaatccaagaaaaagttgtaaagaaaaatcaacataaagtcatacagtgtctaaaagccctgatgaatacgcagtatggcttggaaagaattatgagtgaggagaggagcctttccttattggccaaagccgtggatcccagacaccccaatatgatgacagatgtggttaaacttctctctgcggtatgcattgtaggggaagaaagcatccttgaagaagttttagaagctttaacttcagctggtgaagaaaaaaaaattgacagatttttttgtattgtggaaggcctccggcacaattcagttcaactgcaagtagcttgtatgcagctcatcaatgccctggttacatctcctgatgatttggatttcaggcttcacatcagaaatgaatttatgcgttgtggattgaaagagatattgccaaatttaaaatgcattaagaatgatggcctggatatccaacttaaagtctttgatgagcataaagaagaagatttgtttgagttatcccatcgccttgaagatattagagctgaacttgatgaagcatatgatgtttacaacatggtgtggagcacagttaaagaaactagagcagagggatattttatttctattcttcagcatcttttgctgattcgaaatgattattttataaggcaacaatacttcaaattaattgatgagtgtgtatcccagattgtattgcatagagatggaatggatccagacttcacatatcgaaaaagactagatttagatttaacccagtttgtagacatttgcatagatcaagcaaaactagaagagtttgaagagaaagcatcagaactttacaagaaatttgaaaaagagtttaccgaccaccaagaaactcaggctgaattgcagaaaaaagaggcaaagattaatgagcttcaagcagagctacaagcttttaagtctcagtttggtgccttgccagctgattgtaatattcctttgcctccctctaaagaaggtggaactggccactcagcacttcctcctccgcctccactgccttctggtggaggggtgccgcctccacctcctcccccaccacctcctccacttccaggaatgcggatgccattcagtggtcctgtgcctccaccacctcccctgggattccttggaggacaaaattctcctcctctaccaatcctgccatttgggttgaaaccaaagaaagaatttaaacctgaaatcagcatgagaagattgaattggttaaagatcagacctcatgaaatgactgaaaactgtttctggataaaagtaaatgaaaataagtatgaaaacgtggatttgctttgtaaacttgagaatacattttgttgccaacaaaaagagagaagagaagaggaagatattgaagagaagaaatcgattaagaaaaaaattaaagaacttaagtttttagattctaaaattgcccagaacctttcaatcttcctgagctcttttcgggtgccatatgaggaaatcagaatgatgatattggaagtagatgaaacacggttggcagagtctatgattcagaacttaataaagcatcttcctgatcaagagcaattaaattcattgtctcagttcaagagtgaatatagcaacttatgtgaacctgagcagtttgtggttgtgatgagcaatgtgaagagactacggccacggctcagtgctattctctttaagcttcagtttgaagagcaggtgaacaacatcaaacctgacatcatggctgtcagtactgcctgcgaagagataaagaagagcaaaagctttagcaagttgctggaacttgtattgctaatgggaaactacatgaatgctggctcccggaatgctcaaaccttcggatttaaccttagctctctctgtaaactaaaggacacaaaatcagcagatcagaaaacaacgctacttcatttcctggtagaaatatgtgaagagaagtaccctgatatactgaattttgtggatgatttggaacctttagacaaagctagtaaagtctctgtagaaacgctggaaaagaatttgaggcagatgggaaggcagcttcaacagcttgagaaggaattggaaacctttccccctcctgaggacttgcatgacaagtttgtgacaaagatgtccatatttgttatcagtgcaaaagaacaatatgagacactttcgaagttacacgaaaacatggaaaagttataccagagtataataggatactatgccattgatgtgaagaaggtgtctgtggaagactttcttactgacctgaataacttcagaaccacattcatgcaagcaataaaggagaatatcaaaaaaagagaagcagaggaaaaagaaaaacgtgtcagaatagctaaagaattagcagagcgagaaagactcgaacgccaacaaaagaaaaagcgtttattagaaatgaagactgagggtgatgagacaggagtgatggataatctgctggaggccttgcagtccggggctgccttccgcgacagaagaaaaaggacaccgatgccaaaagatgttcggcagagtctcagtccaatgtctcagaggcctgttctgaaagtttgtaaccatgaaaatcagaaagtgcagttgacagaagggtcacgttcacactacaatatcaattgcaactcaacaaggactccagtcgccaaggagcttaattataatctagacactcatacgtctactgggaggatcaaggcagctgagaagaaggaagcgtgtaatgtagaaagcaacagaaaaaaggaaacggaacttcttggctctttttctaaaaatgaatcagttcccgaagttgaagccctgctggcaagattacgagctttataagttaaactggtttttaaaaaaaatgattaagccaaatataaagccatgctctaaactataacacttgaaaaaattgcttttatgtaagtgactttatatagttttaaattatgatatatattagaaaaataaagctaaatatatgattgcaatgctttttctatgtactggaggttttggtttattcaagattgtaccgggctttaatccttttttttttttttttgtctcctggtattcctcagttctttatttggtggttaaattatacatattgctttagagagcaggtaggtggccatgtgttcagcagtgtgtccttaagaaaataccatctttctaagccactggaatttttactttactatttttaacattaatggatgtcaggtcatcaacctcaagtctttacatatccatgtatattccatatatattgtttatataggcccaagtttctccttaattgggatctatatactaccagcacaacatcaaaaacatgtaattgaatacatcagagctatatatgtaaggaaatgactggtgaccccattatcatcattgttgaattcatgttaagtagaccctctaggggaccataaggcaattgagcacataacgaaaaatgatgcaataagaatgtatgcactctctttgccaaatgcatgtgcttttgtgtaacgtggatgtaaacagaattgcagtgctgccgaaattcttgatcttggctaagagagtatttttccccttgtaattatgactctgagataaaattgccattttgaaatttccaaagtaacaactttttttattttatgaataaacttgggattgcaatttctctgatctgacaatcaataactttaacaaagatctaaataagtgtttcaaggaaagttttcctaagcaaatgtaatattacctcatttgggcatcattactctgttaattctatatcaaaggaaataaacttgctacttgcactaaatg

SEQ ID NO: 93002 - DNA, 3444 bp, Artificial Sequence
  derived and/or modified sequence
atggagcggcaccagccccggctgcaccacccagcccagggcagcgctgctggcaccccctaccccagcagcgccagcctgcggggctgccgggagagcaagatgcccaggaggaagggcccccagcaccccccaccacccagcggccctgaggagcctggagagaagaggcccaagttcctggacaagtttgccagcatccgcatccctggcagcaagaaggagaggcctcccctgcccaacctgaagacagcctttgccagcagtgactgcagcgctgcccccctggagatgatggagaacttccccaagcccctgtctgaaaatgagctgctggagctgtttgagaagatgatgggcagcctgaagaggagccggcagatcagcccccaggagttcatccacgagctgaagatgggcagcgcagatgagcggctggtgacctgcctggagagcctgcgggtgtccctgaccagcaaccctgtgtcctgggtggagagctttggccacgagggcctgggcctgctgctggacatcctggagaagctgatcagcggcaagatccaggagaaggtggtgaagaagaaccagcacaaggtgatccagtgcctgaaggccctgatgaacacccagtatggcctggagcgcatcatgtctgaggagaggagcctgagcctgctggccaaggctgtggaccccaggcaccccaacatgatgacagatgtggtgaagctgctgtctgctgtgtgcatcgtgggggaggagagcatcctggaggaggtgctggaggccctgaccagcgctggggaggagaagaagattgaccgcttcttctgcatcgtggagggcctgcggcacaacagcgtgcagctgcaggtggcctgcatgcagctgatcaatgccctggtgaccagcccagatgacctggacttccggctgcacatcagaaatgagttcatgagatgtggcctgaaggagatcctgcccaacctgaagtgcatcaagaatgatggcctggacatccagctgaaggtgtttgatgagcacaaggaggaggacctgtttgagctgagccaccggctggaggacatccgggcagagctggatgaggcctatgatgtgtacaacatggtgtggagcacagtgaaggagaccagggctgagggctacttcatcagcatcctgcagcacctgctgctgatcagaaatgactacttcatccggcagcagtacttcaagctgattgatgaatgtgtgtcccagatcgtgctgcacagagatggcatggaccctgacttcacctacaggaagaggctggacctggacctgacccagtttgtggacatctgcatcgaccaggccaagctggaggagtttgaggagaaggccagcgagctgtacaagaagtttgagaaggagttcacagaccaccaggagacccaggccgagctgcagaagaaggaggccaagatcaatgagctgcaggccgagctgcaggccttcaagagccagtttggagccctgcctgctgactgcaacatccccctgccccccagcaaggagggcggcaccggccacagcgccctgcccccacctccacccctgcccagcggcggcggcgtgcccccacctcctcctcctcctcctcctccacccctgcccggcatgaggatgcccttcagcggccctgtgcccccacctccacccctgggcttcctgggcggccagaacagcccccccctgcccatcctgcccttcggcctgaagcccaagaaggagttcaagccagagatctccatgaggcggctgaactggctgaagatccggccccatgagatgacagagaactgcttctggatcaaggtgaatgaaaacaagtatgaaaatgtggacctgctgtgcaagctggagaacaccttctgctgccagcagaaggagcggcgggaggaggaggacatcgaggagaagaagagcatcaagaagaagatcaaggagctgaagttcctggacagcaagatcgcccagaacctgagcatcttcctgagcagcttccgggtgccctatgaggagatccgcatgatgatcctggaggtggatgagacccggctggccgagagcatgatccagaacctgatcaagcacctgcctgaccaggagcagctgaacagcctgagccagttcaagtctgagtacagcaacctgtgtgagcctgagcagtttgtggtggtgatgagcaatgtgaagaggctgcggccccggctgagcgccatcctcttcaagctgcagtttgaggagcaggtgaacaacatcaagccagacatcatggctgtgtccacagcctgtgaggagatcaagaagagcaagagcttcagcaagctgctggagctggtgctgctgatgggcaactacatgaatgccggcagcagaaatgcccagaccttcggcttcaacctgagcagcctgtgcaagctgaaggacaccaagtctgctgaccagaagaccaccctgctgcacttcctggtggagatctgtgaggagaagtacccagacatcctgaactttgtggatgacctggagcccctggacaaggccagcaaggtgtctgtggagaccctggagaagaacctgcggcagatgggccggcagctgcagcagctggagaaggagctggagaccttccccccacctgaggacctgcatgacaagtttgtgaccaagatgagcatcttcgtcatcagcgccaaggagcagtatgagaccctgagcaagctgcacgagaacatggagaagctgtaccagagcatcatcggctactatgccattgatgtgaagaaggtgtctgtggaggacttcctgacagacctgaacaacttccgcaccaccttcatgcaggccatcaaggagaacatcaagaagcgggaggccgaggagaaggagaagagggtgcgcatcgccaaggagctggccgagcgggagcggctggagcggcagcagaagaagaagaggctgctggagatgaagacagaaggagatgaaacaggagtgatggacaacctgctggaggccctgcagagcggggccgccttccgggacaggaggaagaggacccccatgcccaaggatgtgcggcagagcctgagccccatgagccagaggcctgtgctgaaggtgtgcaaccacgagaaccagaaggtgcagctgacagagggcagccgcagccactacaacatcaactgcaacagcaccaggacccctgtggccaaggagctgaactacaacctggacacccacaccagcacaggccgcatcaaggctgctgagaagaaggaggcctgcaatgtggagagcaacaggaagaaggagacagagctgctgggcagcttcagcaagaatgaatctgtgcctgaggtggaggccctgctggcccggctgcgggccctgtag

SEQ ID NO: 93003 - DNA, 3444 bp, Artificial Sequence
  derived and/or modified sequence
atggagcggcaccagccccggctgcaccaccccgcccagggcagcgctgcgggcacaccctatccctcctcggcatctctccgcggctgccgagagtctaagatgccccgtagaaagggccctcagcacccaccaccgccatccggcccagaagagccaggggagaagagacccaagttccttgataagtttgcttctattaggatacccggttccaaaaaggagcgacctcccctaccaaatttgaagacggcattcgcctcctctgattgttcagcggctccattggaaatgatggaaaatttccctaaacctctgtctgaaaatgagttgcttgaactgtttgaaaagatgatggggtcactgaagcggagccggcagatcagtccccaagagttcatccacgagttgaagatggggtctgctgatgaaagactggtgacatgcctggagtcccttcgggttagcttgacatctaatcccgtgtcttgggttgagtccttcggtcacgaaggtctaggcctgctcctggatatcctggagaagctgatctctggcaagatccaagagaaagtggtaaagaagaaccagcacaaagtgatccaatgtctgaaggctctgatgaatacccaatacggattggaacgtattatgtcagaggaacgttcattgtctctgctcgccaaagcagtcgacccaagacatccaaatatgatgaccgatgttgtgaagctgctgtctgcagtgtgtattgtcggagaggagagcattctagaagaggtcctcgaggctcttaccagtgctggggaagagaaaaagatcgacaggttcttctgcatcgtagaaggccttcgccataactccgtgcaactgcaggttgcttgcatgcaactgattaacgctctggtaacttccccagacgaccttgacttcaggctgcatatcaggaacgaatttatgcggtgtggtcttaaagagattcttccgaatttaaagtgcattaagaacgatggtctggacatccagttgaaagtgtttgatgagcataaggaggaagatctgttcgagctgtcccacagattggaagacattcgggccgaactcgatgaagcctatgacgtctacaatatggtatggtccaccgtgaaagaaaccagggccgaaggctattttatttccattctacagcacctgcttttaatccgcaacgactacttcatcaggcagcagtacttcaagctcattgacgaatgtgtatcacagatcgttcttcatagagacggcatggaccctgacttcacctaccggaaaaggctggacctcgacctgacccagtttgtggatatctgtatcgaccaggctaaactggaggaatttgaggaaaaagctagcgaactttacaagaagttcgagaaggagtttacagaccaccaagagacccaggccgagcttcagaagaaagaggccaaaataaatgaattgcaagcagaattgcaggccttcaagtctcaatttggagcattgcctgcagactgtaacattcctttacccccttccaaggagggagggaccggccattccgcactgcctcctccgcctcccctgcccagcgggggaggtgtcccaccccctccgcctccccctcctcctccccctctcccaggcatgcggatgccattctccggcccagtgccaccccctcctcctttaggcttcctcggcgggcagaatagccctccattgcctatcctgccctttggattgaagcccaagaaggagttcaagccggaaatctcaatgcgccggctgaattggctaaagattagaccacacgaaatgacagaaaattgtttttggatcaaagttaatgaaaacaagtatgaaaacgtcgatcttctatgcaagctcgaaaataccttctgctgtcagcaaaaggagcggagagaggaggaggacattgaggagaaaaaatctatcaagaagaagattaaggagttgaagttccttgattccaagattgcgcaaaacttatcaatattcctgagctcctttcgggttccgtatgaagagataaggatgatgattttggaggtagatgaaacccggctcgccgagagtatgattcagaatcttatcaagcatttgcccgatcaagagcagcttaattctttatctcagtttaaatctgaatattcaaacctgtgtgagcctgaacaatttgtagtggtgatgtccaacgtgaagcgcctgcgacccagactaagcgccattcttttcaaattgcagttcgaggaacaggtgaataacatcaaaccagatatcatggcagtttccacagcgtgcgaagagattaaaaagtctaagtccttctctaagcttctcgagctcgtgctattgatgggcaactatatgaacgccgggagccgtaatgcacagacgtttggcttcaatctgagttcactttgcaagctcaaggacacaaaaagcgccgatcagaagacaacgcttttgcattttctggtggaaatctgtgaggagaaatacccagacatactcaacttcgtagacgacctggaaccccttgacaaggcatccaaagtgtctgtggagacattggagaagaatctgagacaaatggggcgccagctgcagcagcttgaaaaggagctcgagacattccccccccccgaggacttacacgacaaattcgttacaaaaatgtcaatcttcgtcatttccgcgaaggagcagtacgaaaccctgtcaaagctgcacgaaaacatggagaaactttaccagtcaattattgggtattatgctatcgacgttaaaaaagtttctgtcgaggacttcctgaccgacttgaataattttagaaccacgttcatgcaggcaattaaggagaacatcaagaagcgcgaggccgaagagaaggaaaaaagagtgagaatcgctaaagaactggctgagcgggaacggctggagcggcagcagaagaagaaacgattgctggagatgaagaccgaaggagatgagacaggagtgatggataacctcctggaagcactgcaatcaggcgcagcttttagggatcgaagaaaaagaacgccgatgcccaaagacgtgagacagtcactgtctcctatgtctcagagacccgttttgaaggtctgcaaccatgagaaccaaaaagttcagctgacggagggctcaaggtctcactacaacattaactgcaatagcactcgaaccccagttgctaaagaactcaactataatctagacactcacacctctactggtagaatcaaggctgcagaaaaaaaggaagcttgtaatgtggagtccaatcgaaagaaagagactgagctgctaggatccttctctaagaatgaaagcgtaccggaagtggaagctctgctggcaaggctgcgagctctgtag

SEQ ID NO: 93004 - DNA, 3444 bp, Artificial Sequence
  derived and/or modified sequence
atggagcgccaccaaccccgattgcaccatcccgctcaggggagtgccgcaggtactccatatccttcatccgccagcctgcgcggatgtcgggagagcaaaatgccgcgtagaaaagggccacagcacccccctcccccatcaggtccagaagagcccggagagaaaagacctaagtttctggataaattcgcttcaattaggattcctggctcaaagaaagagcgcccacctctgcctaacctgaaaacggcttttgcctccagcgactgtagcgccgcacctctggagatgatggagaactttcctaagcctcttagcgaaaatgagttactggagctcttcgagaagatgatgggcagcctgaagagatcccgccagattagccctcaagagtttatacacgagctcaagatggggtcagctgacgaaaggctcgtgacatgtctagagagtctgagggtgtccctgaccagcaaccctgtatcctgggtggagtcattcggccatgaaggcctgggcctcttgctcgacatcttagagaaacttatatcaggcaagattcaagagaaagttgtgaagaagaatcagcataaagtgattcagtgcctgaaggctttaatgaatacccagtacggccttgagagaatcatgtccgaggaacgtagcctgtctctgttggcaaaagcagtggaccctcgccacccaaacatgatgacagacgtcgtgaaattattgtccgcagtgtgcatcgtcggcgaggagtcaatcctcgaggaggtcctggaagctctgacttcagcaggcgaggagaaaaagatagaccggttcttttgcatagtggagggcttgcggcacaactctgtgcagttgcaggtggcatgtatgcagcttattaacgctctggttacatcacccgacgaccttgactttcgcttgcatattcggaacgaatttatgcggtgtggcctaaaagagatcctgcctaatttgaagtgtataaaaaacgatggtctcgacatccaattgaaggtctttgacgagcataaagaagaggatctgttcgagctgagtcatagactggaagatattagagcggaactggatgaggcttatgacgtatataatatggtgtggtctaccgttaaagaaactagggcggaagggtacttcatttctatcctgcagcacctgttactcattcggaacgactatttcatcagacagcagtattttaagctgattgacgagtgtgttagccagatcgtgcttcatcgagacggtatggaccctgactttacttatcgcaagcgtctggatctagacctgacccagtttgtggatatctgcattgaccaggctaaactcgaagagttcgaggaaaaagccagtgaactgtacaagaaattcgagaaagaattcacggatcaccaggagactcaagccgagcttcaaaagaaagaggccaagattaacgagctccaagccgagctgcaggctttcaaaagccaattcggggctctgcccgcagactgcaacattcccttgcctccctccaaggagggcggtaccgggcactctgctctgccaccacctccacccctgccctcaggtggaggagtcccccctcccccacctccccctccacctcctccacttcctggtatgcgcatgccattctctgggcctgtgcctccgcctcctcccctgggattcctgggcggacagaatagcccgccactccccatcctgccatttgggttgaaacctaagaaggagtttaaacccgagatatccatgcgtagactcaactggctgaaaatcaggccccacgagatgacagaaaattgtttctggatcaaggtgaatgaaaacaaatacgagaatgtggatctcctgtgtaaattggaaaatactttttgctgccagcagaaagaacgccgtgaggaggaggatatagaagagaaaaagagtatcaagaagaagattaaagagctaaagtttttggatagcaagatcgctcagaatctttctatctttctctccagtttcagggtgccatatgaagaaattagaatgatgatcctggaggtagacgagacaaggctggccgagtctatgatccagaatctgatcaagcacctgcctgaccaggagcagttgaactcactgtcacagttcaagtcagaatattccaatttgtgcgagccggaacaattcgtggttgtcatgtcaaatgtgaaacgcctgaggccacgccttagcgcaattctctttaagctacagttcgaggaacaagtgaataatattaagcctgacataatggccgtgtctactgcttgcgaagaaatcaagaagagtaagagttttagcaagctgctggaacttgtcctcttgatgggcaactatatgaatgcgggttcaagaaatgcccagacatttggattcaatctctcaagtctttgtaaactaaaagacacgaagagcgcggaccagaaaaccacactactccactttctagtggaaatctgcgaagaaaagtaccccgacatcctcaactttgttgatgacctagaaccactcgacaaagcctctaaagtgtctgtagagactctggagaaaaatctgcgccaaatggggaggcagctgcagcagcttgaaaaagagttagaaacctttcctccacctgaggatctacacgacaaattcgtgaccaaaatgtccatctttgttatttctgccaaagagcagtatgagacactctccaagcttcacgaaaatatggagaaattgtatcagtccatcatcggctactacgctatcgatgtcaaaaaagtttctgttgaagattttctgacagacttgaacaattttcggacaacttttatgcaggctattaaggagaatatcaagaaaagggaggcagaggagaaagagaagcgcgttcggatagccaaggaattggccgaaagggaacgccttgagcgccagcagaaaaagaaaaggctgctcgagatgaagactgaaggagatgaaactggtgtgatggataatctgttggaggctttgcagtcaggcgcagcgttccgtgacaggcggaaaaggacgcctatgcccaaggacgtgcgccagtccctgagccccatgtctcagcgacccgtgctcaaggtgtgtaaccacgaaaaccagaaggtgcagctaactgaaggctccaggagtcactacaacattaactgcaacagtacccggacacctgtcgctaaagaacttaattacaatctggatactcacacatctaccggtcgcatcaaagccgctgagaagaaggaggcctgtaatgtagagtctaacaggaagaaagaaacagagctgctcggatccttttcaaaaaacgaaagtgttcctgaggtcgaagctctgttggccagacttagagcattgtag

SEQ ID NO: 93005 - protein, 1123 aa, Artificial Sequence
  derived and/or modified sequence
MERHQPRLHHPAQGSAAGTPYPSSASLRGCRESKMPRRKGPQHPPPPSGPEEPGEKRPKFEDMNLNEDKKAPLREKDFSIKKEMVMQYINTASKTGSLKRSRQISPQEFIHELKMGSADERLVTCLESLRVSLTSNPVSWVESFGHEGLGLLLDILEKLISGKIQEKVVKKNQHKVIQCLKALMNTQYGLERIMSEERSLSLLAKAVDPRHPNMMTDVVKLLSAVCIVGEESILEEVLEALTSAGEEKKIDRFFCIVEGLRHNSVQLQVACMQLINALVTSPDDLDFRLHIRNEFMRCGLKEILPNLKCIKNDGLDIQLKVFDEHKEEDLFELSHRLEDIRAELDEAYDVYNMVWSTVKETRAEGYFISILQHLLLIRNDYFIRQQYFKLIDECVSQIVLHRDGMDPDFTYRKRLDLDLTQFVDICIDQAKLEEFEEKASELYKKFEKEFTDHQETQAELQKKEAKINELQAELQAFKSQFGALPADCNIPLPPSKEGGTGHSALPPPPPLPSGGGVPPPPPPPPPPPLPGMRMPFSGPVPPPPPLGFLGGQNSPPLPILPFGLKPKKEFKPEISMRRLNWLKIRPHEMTENCFWIKVNENKYENVDLLCKLENTFCCQQKERREEEDIEEKKSIKKKIKELKFLDSKIAQNLSIFLSSFRVPYEEIRMMILEVDETRLAESMIQNLIKHLPDQEQLNSLSQFKSEYSNLCEPEQFVVVMSNVKRLRPRLSAILFKLQFEEQVNNIKPDIMAVSTACEEIKKSKSFSKLLELVLLMGNYMNAGSRNAQTFGFNLSSLCKLKDTKSADQKTTLLHFLVEICEEKYPDILNFVDDLEPLDKASKVSVETLEKNLRQMGRQLQQLEKELETFPPPEDLHDKFVTKMSIFVISAKEQYETLSKLHENMEKLYQSIIGYYAIDVKKVSVEDFLTDLNNFRTTFMQAIKENIKKREAEEKEKRVRIAKELAERERLERQQKKKRLLEMKTEGDETGVMDNLLEALQSGAAFRDRRKRTPMPKDVRQSLSPMSQRPVLKVCNHENQKVQLTEGSRSHYNINCNSTRTPVAKELNYNLDTHTSTGRIKAAEKKEACNVESNRKKETELLGSFSKNESVPEVEALLARLRAL

SEQ ID NO: 93006 - DNA, 3372 bp, Artificial Sequence
  derived and/or modified sequence
atggagagacaccagcccagactgcaccaccccgcccagggcagcgccgccggcaccccctaccccagcagcgccagcctgagaggctgcagagagagcaagatgcccagaagaaagggcccccagcacccccccccccccagcggccccgaggagcccggcgagaagagacccaagttcgaggacatgaacctgaacgaggacaagaaggcccccctgagagagaaggacttcagcatcaagaaggagatggtgatgcagtacatcaacaccgccagcaagaccggcagcctgaagagaagcagacagatcagcccccaggagttcatccacgagctgaagatgggcagcgccgacgagagactggtgacctgcctggagagcctgagagtgagcctgaccagcaaccccgtgagctgggtggagagcttcggccacgagggcctgggcctgctgctggacatcctggagaagctgatcagcggcaagatccaggagaaggtggtgaagaagaaccagcacaaggtgatccagtgcctgaaggccctgatgaacacccagtacggcctggagagaatcatgagcgaggagagaagcctgagcctgctggccaaggccgtggaccccagacaccccaacatgatgaccgacgtggtgaagctgctgagcgccgtgtgcatcgtgggcgaggagagcatcctggaggaggtgctggaggccctgaccagcgccggcgaggagaagaagatcgacagattcttctgcatcgtggagggcctgagacacaacagcgtgcagctgcaggtggcctgcatgcagctgatcaacgccctggtgaccagccccgacgacctggacttcagactgcacatcagaaacgagttcatgagatgcggcctgaaggagatcctgcccaacctgaagtgcatcaagaacgacggcctggacatccagctgaaggtgttcgacgagcacaaggaggaggacctgttcgagctgagccacagactggaggacatcagagccgagctggacgaggcctacgacgtgtacaacatggtgtggagcaccgtgaaggagaccagagccgagggctacttcatcagcatcctgcagcacctgctgctgatcagaaacgactacttcatcagacagcagtacttcaagctgatcgacgagtgcgtgagccagatcgtgctgcacagagacggcatggaccccgacttcacctacagaaagagactggacctggacctgacccagttcgtggacatctgcatcgaccaggccaagctggaggagttcgaggagaaggccagcgagctgtacaagaagttcgagaaggagttcaccgaccaccaggagacccaggccgagctgcagaagaaggaggccaagatcaacgagctgcaggccgagctgcaggccttcaagagccagttcggcgccctgcccgccgactgcaacatccccctgccccccagcaaggagggcggcaccggccacagcgccctgcccccccccccccccctgcccagcggcggcggcgtgcccccccccccccccccccccccccccccccccctgcccggcatgagaatgcccttcagcggccccgtgcccccccccccccccctgggcttcctgggcggccagaacagcccccccctgcccatcctgcccttcggcctgaagcccaagaaggagttcaagcccgagatcagcatgagaagactgaactggctgaagatcagaccccacgagatgaccgagaactgcttctggatcaaggtgaacgagaacaagtacgagaacgtggacctgctgtgcaagctggagaacaccttctgctgccagcagaaggagagaagagaggaggaggacatcgaggagaagaagagcatcaagaagaagatcaaggagctgaagttcctggacagcaagatcgcccagaacctgagcatcttcctgagcagcttcagagtgccctacgaggagatcagaatgatgatcctggaggtggacgagaccagactggccgagagcatgatccagaacctgatcaagcacctgcccgaccaggagcagctgaacagcctgagccagttcaagagcgagtacagcaacctgtgcgagcccgagcagttcgtggtggtgatgagcaacgtgaagagactgagacccagactgagcgccatcctgttcaagctgcagttcgaggagcaggtgaacaacatcaagcccgacatcatggccgtgagcaccgcctgcgaggagatcaagaagagcaagagcttcagcaagctgctggagctggtgctgctgatgggcaactacatgaacgccggcagcagaaacgcccagaccttcggcttcaacctgagcagcctgtgcaagctgaaggacaccaagagcgccgaccagaagaccaccctgctgcacttcctggtggagatctgcgaggagaagtaccccgacatcctgaacttcgtggacgacctggagcccctggacaaggccagcaaggtgagcgtggagaccctggagaagaacctgagacagatgggcagacagctgcagcagctggagaaggagctggagaccttccccccccccgaggacctgcacgacaagttcgtgaccaagatgagcatcttcgtgatcagcgccaaggagcagtacgagaccctgagcaagctgcacgagaacatggagaagctgtaccagagcatcatcggctactacgccatcgacgtgaagaaggtgagcgtggaggacttcctgaccgacctgaacaacttcagaaccaccttcatgcaggccatcaaggagaacatcaagaagagagaggccgaggagaaggagaagagagtgagaatcgccaaggagctggccgagagagagagactggagagacagcagaagaagaagagactgctggagatgaagaccgagggcgacgagaccggcgtgatggacaacctgctggaggccctgcagagcggcgccgccttcagagacagaagaaagagaacccccatgcccaaggacgtgagacagagcctgagccccatgagccagagacccgtgctgaaggtgtgcaaccacgagaaccagaaggtgcagctgaccgagggcagcagaagccactacaacatcaactgcaacagcaccagaacccccgtggccaaggagctgaactacaacctggacacccacaccagcaccggcagaatcaaggccgccgagaagaaggaggcctgcaacgtggagagcaacagaaagaaggagaccgagctgctgggcagcttcagcaagaacgagagcgtgcccgaggtggaggccctgctggccagactgagagccctgtag

SEQ ID NO: 93007 - DNA, 3372 bp, Artificial Sequence
  derived and/or modified sequence
atggagagacatcaacctcgtctgcaccatcctgcccagggatcggccgctggcactccataccctagcagcgcaagcttgcgtgggtgtcgtgaaagcaagatgcccaggcggaaggggcctcagcacccccctcctccatctggccctgaggagccaggtgaaaaacggccaaagtttgaagatatgaatcttaatgaggataagaaagcccctctgagagaaaaagactttagtataaagaaggagatggtgatgcaatatatcaacactgctagcaagactggcagtctcaaacggtcacgacagatctctcctcaggaatttatacacgaactgaagatgggcagcgccgacgagagactcgtgacatgtctggaatcccttagagttagcctgaccagcaacccagtgtcatgggtggagagctttggacacgaaggcctagggctgctcttggacattctagagaagctgatcagcggcaagatccaggaaaaggtggttaaaaagaatcaacataaagttatacagtgcctgaaagctctgatgaatacacagtacggcctggaaaggataatgagcgaagagcgaagcttatcacttctcgctaaggcggttgacccccggcacccaaacatgatgaccgatgtggtaaagctgctgagtgccgtgtgcatagtcggagaggagtccatcctcgaggaagtgttggaggccctgacgagcgctggcgaggaaaaaaagatcgacaggtttttttgtatcgttgaaggactgagacacaactctgtgcagctccaagttgcctgcatgcagctaataaacgccctggtgacttcgcccgacgaccttgacttccggttgcatattcggaacgagtttatgcgctgtgggctgaaggagattttaccaaatcttaaatgcattaagaacgatggcctggacatccagctaaaagtttttgacgaacataaggaggaggacctgtttgaactgtcacaccggctcgaggatattcgagccgaacttgacgaggcctatgacgtgtacaacatggtctggtcaaccgttaaggaaacgagggcagaaggctactttatatcgattctgcagcacctcttgctaattcgcaatgactatttcatccgacagcagtattttaagttaatcgatgaatgtgtgagtcaaattgtgctgcatcgtgatggcatggacccagattttacgtatagaaagcggcttgatctggacctcactcaattcgtagatatatgtatcgatcaggcaaaattggaagagttcgaggaaaaggctagcgagctctataagaaatttgagaaggaatttacggatcaccaggagacacaggcggagctccagaaaaaagaggcaaaaattaacgagctacaggcagagctccaggcttttaaaagtcaattcggagccctgccggcagactgtaatatccccctgccaccttctaaggagggaggtacaggacattccgcgctgccccctcccccccctttaccgagcggcggtggcgtacctcctccacccccaccgcctccccctccccccctgcccgggatgcgtatgccattctctggacctgtgcccccgccaccccccctgggattcttaggcggacagaactctcctccactgcctatccttcccttcggacttaagccaaaaaaggagtttaagcctgaaatctccatgcggcggctaaactggctgaagattagaccccatgagatgacagaaaattgtttttggatcaaggtgaacgaaaacaagtacgagaatgtagacctgttgtgcaagttggaaaacactttctgttgtcaacagaaggaacgcagggaggaagaggacatagaagagaaaaaatcaatcaaaaagaagatcaaagaactgaagtttctagactctaaaatcgcgcagaacttaagcatttttctgtcctcattccgcgtaccttatgaagagatcaggatgatgatccttgaagtggacgagactaggcttgcagagtcaatgatccagaacctgattaagcatcttccagaccaggaacagctgaactccctatctcagttcaagtccgaatactctaacctgtgtgagccagaacagttcgtcgtggttatgagcaacgtaaagcgactcagacctaggttgtctgccatattattcaaactccagttcgaggaacaggttaacaacataaagccagatatcatggcagtgagcacagcttgcgaggaaatcaagaagtccaagtctttttccaagctgctggagctggtgttgttgatgggcaattacatgaatgccggcagccggaacgctcagaccttcggattcaatctttcgagtctgtgcaagctaaaagacacaaagtctgctgaccagaagaccaccctgctgcattttctggtcgagatttgcgaggaaaagtatcccgatattcttaatttcgtggacgacctggaacctttggataaggccagcaaggttagcgttgaaacactggaaaaaaaccttcgacagatggggcgccagctccagcagttggagaaagagttggagacattcccaccaccggaagatctccatgacaaatttgtaaccaaaatgtcgatctttgttatttcggcgaaagaacaatatgagaccctgagtaagctccacgaaaatatggaaaaactgtaccaatcaatcataggttattacgctatcgatgtgaagaaagtctctgttgaggactttctcaccgacttgaacaactttagaacaaccttcatgcaagctatcaaggagaatatcaaaaagcgagaggcagaggagaaagaaaagagagttcggattgctaaagagctggccgagagggaacggctcgagagacagcaaaaaaaaaaacgcttgctcgaaatgaagacggaaggggatgagacgggcgtgatggataacctactcgaagccctgcaatccggagccgcgtttcgcgatagacgcaagcgaacaccaatgcctaaggacgtgcgtcagtccctgtcgcctatgagtcagaggcctgtgctgaaggtctgtaatcacgaaaatcaaaaagtccaattgactgagggcagtcgcagtcactacaacatcaactgcaacagcacccgtacaccagtggccaaagagcttaactacaacttggacactcatacaagcaccgggaggatcaaggctgctgaaaagaaagaggcatgtaacgtggagtccaatcggaagaaggagacagagctcctgggatcattctctaagaatgagagcgtgccagaggtggaggcactcctcgcacgactgcgggcactgtag

SEQ ID NO: 93008 - DNA, 4584 bp, Artificial Sequence
  derived and/or modified sequence
tgatccggcggcgcgggattggccagtcccgggccaacacgggtggcgggagttttcagatgtgttggctgcggccccgacttcagcggttgggctaggctgtgctgactgtttgggtggcggaccccgggagtaaaacctgttgtcgatccctcagcttccagcttgcggcttgctgagtggccaccttctttccggtccccggagctgcggggaaagatggaacggcaccagccgcggctgcaccacccggcccaaggctcagccgctgggactccctacccttcctcagcctctctccgcggctgccgggaaagcaagatgccgcgcaggaagggcccccaacaccctccgccgcccagtggccccgaggagcctggggagaagcgccccaagtttgaagatatgaatttaaatgaagataaaaaggcaccattgcgggaaaaggacttcagtatcaaaaaagaaatggtgatgcagtacattaatactgcttctaagacaggaagtcttaagagaagccgacagatctcacctcaggaattcattcatgagctgaaaatggggtctgcagatgagagacttgtcacatgcctggagtctctccgagtgtctttgaccagcaatcctgtgagttgggtggaaagctttggacatgaagggcttggattattattagacattttggaaaaactgattagtggaaaaatccaagaaaaagttgtaaagaaaaatcaacataaagtcatacagtgtctaaaagccctgatgaatacgcagtatggcttggaaagaattatgagtgaggagaggagcctttccttattggccaaagccgtggatcccagacaccccaatatgatgacagatgtggttaaacttctctctgcggtatgcattgtaggggaagaaagcatccttgaagaagttttagaagctttaacttcagctggtgaagaaaaaaaaattgacagatttttttgtattgtggaaggcctccggcacaattcagttcaactgcaagtagcttgtatgcagctcatcaatgccctggttacatctcctgatgatttggatttcaggcttcacatcagaaatgaatttatgcgttgtggattgaaagagatattgccaaatttaaaatgcattaagaatgatggcctggatatccaacttaaagtctttgatgagcataaagaagaagatttgtttgagttatcccatcgccttgaagatattagagctgaacttgatgaagcatatgatgtttacaacatggtgtggagcacagttaaagaaactagagcagagggatattttatttctattcttcagcatcttttgctgattcgaaatgattattttataaggcaacaatacttcaaattaattgatgagtgtgtatcccagattgtattgcatagagatggaatggatccagacttcacatatcgaaaaagactagatttagatttaacccagtttgtagacatttgcatagatcaagcaaaactagaagagtttgaagagaaagcatcagaactttacaagaaatttgaaaaagagtttaccgaccaccaagaaactcaggctgaattgcagaaaaaagaggcaaagattaatgagcttcaagcagagctacaagcttttaagtctcagtttggtgccttgccagctgattgtaatattcctttgcctccctctaaagaaggtggaactggccactcagcacttcctcctccgcctccactgccttctggtggaggggtgccgcctccacctcctcccccaccacctcctccacttccaggaatgcggatgccattcagtggtcctgtgcctccaccacctcccctgggattccttggaggacaaaattctcctcctctaccaatcctgccatttgggttgaaaccaaagaaagaatttaaacctgaaatcagcatgagaagattgaattggttaaagatcagacctcatgaaatgactgaaaactgtttctggataaaagtaaatgaaaataagtatgaaaacgtggatttgctttgtaaacttgagaatacattttgttgccaacaaaaagagagaagagaagaggaagatattgaagagaagaaatcgattaagaaaaaaattaaagaacttaagtttttagattctaaaattgcccagaacctttcaatcttcctgagctcttttcgggtgccatatgaggaaatcagaatgatgatattggaagtagatgaaacacggttggcagagtctatgattcagaacttaataaagcatcttcctgatcaagagcaattaaattcattgtctcagttcaagagtgaatatagcaacttatgtgaacctgagcagtttgtggttgtgatgagcaatgtgaagagactacggccacggctcagtgctattctctttaagcttcagtttgaagagcaggtgaacaacatcaaacctgacatcatggctgtcagtactgcctgcgaagagataaagaagagcaaaagctttagcaagttgctggaacttgtattgctaatgggaaactacatgaatgctggctcccggaatgctcaaaccttcggatttaaccttagctctctctgtaaactaaaggacacaaaatcagcagatcagaaaacaacgctacttcatttcctggtagaaatatgtgaagagaagtaccctgatatactgaattttgtggatgatttggaacctttagacaaagctagtaaagtctctgtagaaacgctggaaaagaatttgaggcagatgggaaggcagcttcaacagcttgagaaggaattggaaacctttccccctcctgaggacttgcatgacaagtttgtgacaaagatgtccatatttgttatcagtgcaaaagaacaatatgagacactttcgaagttacacgaaaacatggaaaagttataccagagtataataggatactatgccattgatgtgaagaaggtgtctgtggaagactttcttactgacctgaataacttcagaaccacattcatgcaagcaataaaggagaatatcaaaaaaagagaagcagaggaaaaagaaaaacgtgtcagaatagctaaagaattagcagagcgagaaagactcgaacgccaacaaaagaaaaagcgtttattagaaatgaagactgagggtgatgagacaggagtgatggataatctgctggaggccttgcagtccggggctgccttccgcgacagaagaaaaaggacaccgatgccaaaagatgttcggcagagtctcagtccaatgtctcagaggcctgttctgaaagtttgtaaccatgaaaatcagaaagtgcagttgacagaagggtcacgttcacactacaatatcaattgcaactcaacaaggactccagtcgccaaggagcttaattataatctagacactcatacgtctactgggaggatcaaggcagctgagaagaaggaagcgtgtaatgtagaaagcaacagaaaaaaggaaacggaacttcttggctctttttctaaaaatgaatcagttcccgaagttgaagccctgctggcaagattacgagctttataagttaaactggtttttaaaaaaaatgattaagccaaatataaagccatgctctaaactataacacttgaaaaaattgcttttatgtaagtgactttatatagttttaaattatgatatatattagaaaaataaagctaaatatatgattgcaatgctttttctatgtactggaggttttggtttattcaagattgtaccgggctttaatccttttttttttttttttgtctcctggtattcctcagttctttatttggtggttaaattatacatattgctttagagagcaggtaggtggccatgtgttcagcagtgtgtccttaagaaaataccatctttctaagccactggaatttttactttactatttttaacattaatggatgtcaggtcatcaacctcaagtctttacatatccatgtatattccatatatattgtttatataggcccaagtttctccttaattgggatctatatactaccagcacaacatcaaaaacatgtaattgaatacatcagagctatatatgtaaggaaatgactggtgaccccattatcatcattgttgaattcatgttaagtagaccctctaggggaccataaggcaattgagcacataacgaaaaatgatgcaataagaatgtatgcactctctttgccaaatgcatgtgcttttgtgtaacgtggatgtaaacagaattgcagtgctgccgaaattcttgatcttggctaagagagtatttttccccttgtaattatgactctgagataaaattgccattttgaaatttccaaagtaacaactttttttattttatgaataaacttgggattgcaatttctctgatctgacaatcaataactttaacaaagatctaaataagtgtttcaaggaaagttttcctaagcaaatgtaatattacctcatttgggcatcattactctgttaattctatatcaaaggaaataaacttgctacttgcactaaatg

SEQ ID NO: 93009 - DNA, 3372 bp, Artificial Sequence
  derived and/or modified sequence
atggagcggcaccagccccggctgcaccacccagcccagggcagcgctgctggcaccccctaccccagcagcgccagcctgcggggctgccgggagagcaagatgcccaggaggaagggcccccagcaccccccaccacccagcggccctgaggagcctggagagaagaggcccaagtttgaggacatgaacctgaatgaagacaagaaggcccccctgcgggagaaggacttcagcatcaagaaggagatggtgatgcagtacatcaacacagccagcaagacaggcagcctgaagaggagccggcagatcagcccccaggagttcatccacgagctgaagatgggcagcgcagatgagcggctggtgacctgcctggagagcctgcgggtgtccctgaccagcaaccctgtgtcctgggtggagagctttggccacgagggcctgggcctgctgctggacatcctggagaagctgatcagcggcaagatccaggagaaggtggtgaagaagaaccagcacaaggtgatccagtgcctgaaggccctgatgaacacccagtatggcctggagcgcatcatgtctgaggagaggagcctgagcctgctggccaaggctgtggaccccaggcaccccaacatgatgacagatgtggtgaagctgctgtctgctgtgtgcatcgtgggggaggagagcatcctggaggaggtgctggaggccctgaccagcgctggggaggagaagaagattgaccgcttcttctgcatcgtggagggcctgcggcacaacagcgtgcagctgcaggtggcctgcatgcagctgatcaatgccctggtgaccagcccagatgacctggacttccggctgcacatcagaaatgagttcatgagatgtggcctgaaggagatcctgcccaacctgaagtgcatcaagaatgatggcctggacatccagctgaaggtgtttgatgagcacaaggaggaggacctgtttgagctgagccaccggctggaggacatccgggcagagctggatgaggcctatgatgtgtacaacatggtgtggagcacagtgaaggagaccagggctgagggctacttcatcagcatcctgcagcacctgctgctgatcagaaatgactacttcatccggcagcagtacttcaagctgattgatgaatgtgtgtcccagatcgtgctgcacagagatggcatggaccctgacttcacctacaggaagaggctggacctggacctgacccagtttgtggacatctgcatcgaccaggccaagctggaggagtttgaggagaaggccagcgagctgtacaagaagtttgagaaggagttcacagaccaccaggagacccaggccgagctgcagaagaaggaggccaagatcaatgagctgcaggccgagctgcaggccttcaagagccagtttggagccctgcctgctgactgcaacatccccctgccccccagcaaggagggcggcaccggccacagcgccctgcccccacctccacccctgcccagcggcggcggcgtgcccccacctcctcctcctcctcctcctccacccctgcccggcatgaggatgcccttcagcggccctgtgcccccacctccacccctgggcttcctgggcggccagaacagcccccccctgcccatcctgcccttcggcctgaagcccaagaaggagttcaagccagagatctccatgaggcggctgaactggctgaagatccggccccatgagatgacagagaactgcttctggatcaaggtgaatgaaaacaagtatgaaaatgtggacctgctgtgcaagctggagaacaccttctgctgccagcagaaggagcggcgggaggaggaggacatcgaggagaagaagagcatcaagaagaagatcaaggagctgaagttcctggacagcaagatcgcccagaacctgagcatcttcctgagcagcttccgggtgccctatgaggagatccgcatgatgatcctggaggtggatgagacccggctggccgagagcatgatccagaacctgatcaagcacctgcctgaccaggagcagctgaacagcctgagccagttcaagtctgagtacagcaacctgtgtgagcctgagcagtttgtggtggtgatgagcaatgtgaagaggctgcggccccggctgagcgccatcctcttcaagctgcagtttgaggagcaggtgaacaacatcaagccagacatcatggctgtgtccacagcctgtgaggagatcaagaagagcaagagcttcagcaagctgctggagctggtgctgctgatgggcaactacatgaatgccggcagcagaaatgcccagaccttcggcttcaacctgagcagcctgtgcaagctgaaggacaccaagtctgctgaccagaagaccaccctgctgcacttcctggtggagatctgtgaggagaagtacccagacatcctgaactttgtggatgacctggagcccctggacaaggccagcaaggtgtctgtggagaccctggagaagaacctgcggcagatgggccggcagctgcagcagctggagaaggagctggagaccttccccccacctgaggacctgcatgacaagtttgtgaccaagatgagcatcttcgtcatcagcgccaaggagcagtatgagaccctgagcaagctgcacgagaacatggagaagctgtaccagagcatcatcggctactatgccattgatgtgaagaaggtgtctgtggaggacttcctgacagacctgaacaacttccgcaccaccttcatgcaggccatcaaggagaacatcaagaagcgggaggccgaggagaaggagaagagggtgcgcatcgccaaggagctggccgagcgggagcggctggagcggcagcagaagaagaagaggctgctggagatgaagacagaaggagatgaaacaggagtgatggacaacctgctggaggccctgcagagcggggccgccttccgggacaggaggaagaggacccccatgcccaaggatgtgcggcagagcctgagccccatgagccagaggcctgtgctgaaggtgtgcaaccacgagaaccagaaggtgcagctgacagagggcagccgcagccactacaacatcaactgcaacagcaccaggacccctgtggccaaggagctgaactacaacctggacacccacaccagcacaggccgcatcaaggctgctgagaagaaggaggcctgcaatgtggagagcaacaggaagaaggagacagagctgctgggcagcttcagcaagaatgaatctgtgcctgaggtggaggccctgctggcccggctgcgggccctgtag

SEQ ID NO: 93010 - DNA, 3372 bp, Artificial Sequence
  derived and/or modified sequence
atggagcggcaccagccccggctgcaccaccccgcccagggcagcgcagcgggtactccatatcctagttcagcgtctctgcgcggatgtcgggagagcaagatgccacgcaggaaaggcccccagcacccccccccccctagcggccccgaagaacccggcgaaaagcggcccaagttcgaggacatgaacctgaacgaggataagaaggcaccacttcgggaaaaggacttttccataaaaaaggagatggtcatgcagtacataaatacagcctctaaaacggggtctttgaaaaggagccggcagatttcgccccaagagtttattcacgagttaaagatgggttctgcagatgaacggctggtgacgtgtctcgagtccctgagagttagccttacatcaaatcccgtcagctgggtggaaagcttcgggcacgaggggctgggcctgttgctagatatcctggagaaactcatttctggcaagatccaggagaaggtggtcaagaagaaccagcacaaagtaatccagtgcctgaaggctctgatgaatacccagtacggcctcgagcgcatcatgagcgaggaaaggtccctaagcctgctagccaaggctgtggatcctcgccaccccaacatgatgaccgatgtcgttaagctgctatccgccgtctgcattgtgggcgaggagagcatattggaggaagtgctggaagcgttaacgtctgcgggggaagagaaaaaaattgataggttcttttgtattgtggagggcctgagacacaattcagtgcagttgcaggtcgcatgtatgcagttaatcaacgccttagtcacctccccagacgacctggattttaggcttcatatacgcaatgagtttatgcggtgtggccttaaagaaatattgccaaacctgaagtgtatcaagaatgacggactggacatccagctcaaggtctttgacgagcacaaagaggaagatctctttgagcttagtcatagactggaagatatcagagctgaactagacgaagcatatgacgtctataacatggtgtggtcaactgttaaagagacacgagctgaaggttactttatctcgatcctccagcacctcttactgatcaggaacgactatttcatcaggcagcagtattttaaactgatcgacgagtgtgtgagtcagattgtgctgcaccgcgacggtatggatcctgatttcacataccgtaagcgcctggacctcgacctcacccagtttgtcgacatttgtattgatcaggctaagcttgaggagttcgaggaaaaggcttccgaactgtataagaaatttgaaaaggaattcaccgaccaccaagagacccaggctgagctgcagaagaaagaagctaaaatcaacgagctgcaggctgagctgcaggccttcaaaagtcagttcggtgcgctgcctgccgactgcaatatccctcttcccccttcaaaagagggcggcacaggccattcagcattgcccccacctccccccttgcccagcggagggggagtcccacccccccctcccccacctccaccgcctcccctcccagggatgagaatgcctttttcgggacccgtgccccctccccccccactgggttttcttggcgggcagaacagccctccactccctatactgccatttggacttaagcccaaaaaggaattcaaacctgagatctccatgcgccgtctaaattggctgaaaattagaccacatgagatgactgagaactgcttctggattaaggtgaacgagaataagtatgaaaatgtggacctcctttgcaagctcgaaaatactttctgctgccagcagaaagaacggagagaggaggaagatatcgaggagaaaaagagtatcaaaaagaaaattaaagagctcaagttcctggattctaagatcgcacagaacctctctatattcctaagcagtttcagggtgccttacgaggaaatccgcatgatgattctagaggtcgatgagacccggctggccgagagtatgatccaaaatctgatcaaacacttgcccgatcaggaacagctgaattccctcagccagtttaaaagcgaatatagcaatctttgtgaaccggagcaattcgtggtagtcatgtccaacgttaagagactgcgtccccgactttcagcaatactattcaaattacaattcgaggaacaagtcaataacatcaagccggacatcatggcagtcagtacagcatgtgaggagattaagaagtcaaaatctttctccaaactcctcgagctggtgctgttaatgggaaattatatgaacgctggatccaggaatgctcagacatttggctttaatctcagttccctttgcaaactcaaggacaccaaaagcgccgatcagaaaactaccctcttgcactttctcgtcgagatttgtgaagagaaataccccgatatcttaaactttgttgatgacctagagcctttagataaggcgtccaaggtgtctgtggaaacattagagaagaacctccgccagatgggacggcagcttcagcagctagagaaggagcttgagacttttccaccacccgaagacctgcacgacaagttcgtaacgaaaatgtcaatcttcgtgatttccgctaaagaacagtacgagactctgagcaagttgcacgagaacatggaaaagttgtatcagtcaattatcggatattacgccattgacgtcaaaaaagtcagtgtcgaagatttcctcaccgacctgaataattttcgcacaaccttcatgcaggcaatcaaggagaatattaaaaaacgggaagcggaagaaaaggaaaaaagggtacggatagcgaaggagctggccgaacgtgaacgattagagcggcaacagaaaaaaaagcggctgctcgagatgaaaactgaaggcgacgaaaccggggtgatggataacctgctcgaggcactgcaatcaggcgccgccttccgcgaccgccgtaaacggacccccatgccaaaggatgtgcgccagtctctgtccccaatgtcacagagacctgtgctgaaggtctgtaatcacgagaaccagaaggtccagctgaccgaggggtctcggtcccactacaacataaactgcaactccactcggactccggtggcaaaggaactgaactacaatttggacacgcacacgtctactggtagaatcaaggccgccgagaaaaaggaagcttgtaacgttgaatccaacagaaaaaaagaaaccgagctgctaggcagcttcagcaaaaacgagagtgtgcctgaagttgaagccctgctggctcgcctgcgagctttgtag

SEQ ID NO: 93011 - DNA, 3372 bp, Artificial Sequence
  derived and/or modified sequence
atggagaggcaccaaccaaggcttcaccatcccgcacagggtagtgcagcgggaactccgtacccatcttccgcttctttacgcggttgtcgtgagagcaagatgcccaggcgcaaaggtcctcagcatcccccacccccttccgggccagaggaaccaggcgaaaaaagaccaaagttcgaggatatgaaccttaatgaagataaaaaggctcctctgcgggagaaggacttcagcattaaaaaggagatggttatgcagtatatcaatacagcctccaagacaggctccctcaaacgttctcgccagatctccccacaggagttcatccacgaactgaagatgggcagcgcggatgagcgcctcgtgacgtgtcttgagagcctacgggtaagccttacaagcaacccagtgtcttgggtggaaagctttggtcatgaggggcttggactcctactggacattttggaaaagctcatcagcggcaagatacaggagaaggtagtcaaaaaaaaccagcataaggtgatccagtgcctgaaagcactcatgaatacccaatacggcctcgagcgcatcatgtctgaggagcgctccctgagccttctcgccaaggctgtggacccgcgacatccaaacatgatgacggacgttgttaaactcctgtctgccgtgtgtatcgtcggtgaggagtccattttggaagaggtcctcgaagctctgactagtgcgggagaagaaaagaaaattgacagattcttctgcattgtggagggactacggcataacagcgtgcagctgcaagtcgcgtgtatgcagctgatcaacgcactggttacatcacccgacgacttagacttccggctccacattcgcaatgaatttatgagatgtggattgaaagaaatcctaccgaacctcaagtgtatcaaaaatgatggccttgacatacagctcaaggtgtttgatgaacacaaagaggaagacctgttcgaactctctcatcggctggaagacattcgggctgagttagatgaagcgtacgacgtgtataacatggtatggtcaaccgtgaaagaaacaagggcagaggggtatttcatcagtattttgcagcacctccttctgattcggaacgactacttcatacgccagcaatacttcaagctcattgacgagtgtgtatcacagatcgtgcttcacagagacggaatggacccagattttacctacagaaagcgcctagacctcgatttgacccagtttgtcgacatttgcatagatcaggccaaattggaagagtttgaagagaaggccagcgaactctataaaaaatttgaaaaagagtttacagatcaccaggagacccaggcggagctgcaaaaaaaagaagcaaagatcaatgaactgcaggccgagctgcaagccttcaagagtcagttcggggctctcccagcagattgcaacattcccttacctccctctaaagagggcggaaccggacactctgccctaccaccccctcctccccttccgtccggtgggggagtgccacccccaccccctccacctccaccccctcctttgcctgggatgcgcatgccattctcgggcccagtaccacccccacctccgctagggttcttgggcggacagaattccccacccctgcctattcttccattcggcttaaagcctaagaaagagtttaaaccagaaatcagcatgcgtaggttgaattggctcaagattcgacctcacgaaatgaccgaaaactgtttctggataaaagtcaacgagaacaaatacgaaaacgtcgacctgctgtgcaaattggagaacactttttgttgtcagcagaaggaaaggagggaagaggaagatatcgaggaaaagaagagtattaagaaaaagattaaagaactgaaatttctcgatagcaagatagcacagaatttgagtatcttcctgtctagcttcagggtgccatacgaagagatcagaatgatgatcttggaagtagacgaaactcgactggccgagtccatgatccaaaatctgatcaaacacttacccgatcaggaacagctgaactcgcttagtcaattcaagtccgagtattccaatctgtgcgaaccagagcaattcgtggtggtgatgagtaacgtgaaacggctgaggcctcgactctcagccatactgttcaagcttcaattcgaggagcaggtgaataacattaagccagacatcatggcggtgtctaccgcatgtgaggaaatcaaaaaatcgaagagcttcagtaagcttctcgagttagtcttgctgatgggaaattatatgaatgctgggtctcgcaatgcccagacattcggctttaacttaagtagtttatgcaagctgaaagataccaagagcgccgaccagaaaactacccttctccattttctggtcgaaatttgtgaagagaagtaccccgatattctgaacttcgtcgatgacctggaaccattggataaggctagcaaggtgagtgtcgagactctggaaaagaacctgaggcagatgggcaggcagctgcagcagttggagaaagaactagaaaccttccctccaccagaagacctgcacgacaagttcgtcactaaaatgtcaatctttgtgatatctgcaaaggagcagtatgagacactgtccaaattgcatgaaaacatggaaaagctgtatcagtccattatcgggtactatgcaattgacgttaaaaaagtgtctgtggaagactttcttaccgatctaaataactttcgcaccacgtttatgcaggctatcaaggagaacatcaagaaacgggaggcagaggagaaggagaaaagggtcaggatagccaaagaactggccgaacgggagagacttgagagacagcagaagaagaagaggcttctcgagatgaagaccgaaggtgatgaaaccggtgttatggacaacctgttggaggctctacaatccggagccgctttccgagaccgcaggaagcgcaccccaatgcccaaggatgtaagacagagcctctcccccatgtcacagcgccctgtactgaaggtatgcaatcacgaaaaccagaaggtgcagctgactgagggctcgcgatctcactataacattaattgtaactccacaaggacccctgtggcaaaggaactgaactacaacctcgacactcatacgtccaccggacgcatcaaggctgctgagaaaaaagaggcgtgcaatgtggaaagcaataggaaaaaggagacagagctcctcggaagcttctctaaaaatgagagcgtgcctgaggtcgaggcactgttggctaggctgagggctttgtag

SEQ ID NO: 93012 - protein, 849 aa, Artificial Sequence
  derived and/or modified sequence
MSEERSLSLLAKAVDPRHPNMMTDVVKLLSAVCIVGEESILEEVLEALTSAGEEKKIDRFFCIVEGLRHNSVQLQVACMQLINALVTSPDDLDFRLHIRNEFMRCGLKEILPNLKCIKNDGLDIQLKVFDEHKEEDLFELSHRLEDIRAELDEAYDVYNMVWSTVKETRAEGYFISILQHLLLIRNDYFIRQQYFKLIDECVSQIVLHRDGMDPDFTYRKRLDLDLTQFVDICIDQAKLEEFEEKASELYKKFEKEFTDHQETQAELQKKEAKINELQAELQAFKSQFGALPADCNIPLPPSKEGGTGHSALPPPPPLPSGGGVPPPPPPPPPPPLPGMRMPFSGPVPPPPPLGFLGGQNSPPLPILPFGLKPKKEFKPEISMRRLNWLKIRPHEMTENCFWIKVNENKYENVDLLCKLENTFCCQQKERREEEDIEEKKSIKKKIKELKFLDSKIAQNLSIFLSSFRVPYEEIRMMILEVDETRLAESMIQNLIKHLPDQEQLNSLSQFKSEYSNLCEPEQFVVVMSNVKRLRPRLSAILFKLQFEEQVNNIKPDIMAVSTACEEIKKSKSFSKLLELVLLMGNYMNAGSRNAQTFGFNLSSLCKLKDTKSADQKTTLLHFLVEICEEKYPDILNFVDDLEPLDKASKVSVETLEKNLRQMGRQLQQLEKELETFPPPEDLHDKFVTKMSIFVISAKEQYETLSKLHENMEKLYQSIIGYYAIDVKKVSVEDFLTDLNNFRTTFMQAIKENIKKREAEEKEKRVRIAKELAERERLERQQKKKRLLEMKTEGDETGVMDNLLEALQSGAAFRDRRKRTPMPKDVRQSLSPMSQRPVLKVCNHGNKPYL

SEQ ID NO: 93013 - protein, 1112 aa, Artificial Sequence
  derived and/or modified sequence
MERHQPRLHHPAQGSAAGTPYPSSASLRGCRESKMPRRKGPQHPPPPSGPEEPGEKRPKFHLNIRTLTDDMLDKFASIRIPGSKKERPPLPNLKTAFASSDCSAAPLEMMENFPKPLSENELLELFEKMMEDMNLNEDKKAPLREKDFSIKKEMVMQYINTASKTGSLKRSRQISPQEFIHELKMGSADERLVTCLESLRVSLTSNPVSWVESFGHEGLGLLLDILEKLISGKIQEKVVKKNQHKVIQCLKALMNTQYGLERIMSEERSLSLLAKAVDPRHPNMMTDVVKLLSAVCIVGEESILEEVLEALTSAGEEKKIDRFFCIVEGLRHNSVQLQVACMQLINALVTSPDDLDFRLHIRNEFMRCGLKEILPNLKCIKNDGLDIQLKVFDEHKEEDLFELSHRLEDIRAELDEAYDVYNMVWSTVKETRAEGYFISILQHLLLIRNDYFIRQQYFKLIDECVSQIVLHRDGMDPDFTYRKRLDLDLTQFVDICIDQAKLEEFEEKASELYKKFEKEFTDHQETQAELQKKEAKINELQAELQAFKSQFGALPADCNIPLPPSKEGGTGHSALPPPPPLPSGGGVPPPPPPPPPPPLPGMRMPFSGPVPPPPPLGFLGGQNSPPLPILPFGLKPKKEFKPEISMRRLNWLKIRPHEMTENCFWIKVNENKYENVDLLCKLENTFCCQQKERREEEDIEEKKSIKKKIKELKFLDSKIAQNLSIFLSSFRVPYEEIRMMILEVDETRLAESMIQNLIKHLPDQEQLNSLSQFKSEYSNLCEPEQFVVVMSNVKRLRPRLSAILFKLQFEEQVNNIKPDIMAVSTACEEIKKSKSFSKLLELVLLMGNYMNAGSRNAQTFGFNLSSLCKLKDTKSADQKTTLLHFLVEICEEKYPDILNFVDDLEPLDKASKVSVETLEKNLRQMGRQLQQLEKELETFPPPEDLHDKFVTKMSRFVISAKEQYETLSKLHENMEKLYQSIIGYYAIDVKKVSVEDFLTDLNNFRTTFMQAIKENIKKREAEEKEKRVRIAKELAERERLERQQKKKRLLEMKTEGDETGVMDNLLEALQSGAAFRDRRKRTPMPKDVRQSLSPMSQRPVLKVCNHGNKPYL

SEQ ID NO: 93014 - DNA, 2550 bp, Artificial Sequence
  derived and/or modified sequence
atgagcgaggagagaagcctgagcctgctggccaaggccgtggaccccagacaccccaacatgatgaccgacgtggtgaagctgctgagcgccgtgtgcatcgtgggcgaggagagcatcctggaggaggtgctggaggccctgaccagcgccggcgaggagaagaagatcgacagattcttctgcatcgtggagggcctgagacacaacagcgtgcagctgcaggtggcctgcatgcagctgatcaacgccctggtgaccagccccgacgacctggacttcagactgcacatcagaaacgagttcatgagatgcggcctgaaggagatcctgcccaacctgaagtgcatcaagaacgacggcctggacatccagctgaaggtgttcgacgagcacaaggaggaggacctgttcgagctgagccacagactggaggacatcagagccgagctggacgaggcctacgacgtgtacaacatggtgtggagcaccgtgaaggagaccagagccgagggctacttcatcagcatcctgcagcacctgctgctgatcagaaacgactacttcatcagacagcagtacttcaagctgatcgacgagtgcgtgagccagatcgtgctgcacagagacggcatggaccccgacttcacctacagaaagagactggacctggacctgacccagttcgtggacatctgcatcgaccaggccaagctggaggagttcgaggagaaggccagcgagctgtacaagaagttcgagaaggagttcaccgaccaccaggagacccaggccgagctgcagaagaaggaggccaagatcaacgagctgcaggccgagctgcaggccttcaagagccagttcggcgccctgcccgccgactgcaacatccccctgccccccagcaaggagggcggcaccggccacagcgccctgcccccccccccccccctgcccagcggcggcggcgtgcccccccccccccccccccccccccccccccccctgcccggcatgagaatgcccttcagcggccccgtgcccccccccccccccctgggcttcctgggcggccagaacagcccccccctgcccatcctgcccttcggcctgaagcccaagaaggagttcaagcccgagatcagcatgagaagactgaactggctgaagatcagaccccacgagatgaccgagaactgcttctggatcaaggtgaacgagaacaagtacgagaacgtggacctgctgtgcaagctggagaacaccttctgctgccagcagaaggagagaagagaggaggaggacatcgaggagaagaagagcatcaagaagaagatcaaggagctgaagttcctggacagcaagatcgcccagaacctgagcatcttcctgagcagcttcagagtgccctacgaggagatcagaatgatgatcctggaggtggacgagaccagactggccgagagcatgatccagaacctgatcaagcacctgcccgaccaggagcagctgaacagcctgagccagttcaagagcgagtacagcaacctgtgcgagcccgagcagttcgtggtggtgatgagcaacgtgaagagactgagacccagactgagcgccatcctgttcaagctgcagttcgaggagcaggtgaacaacatcaagcccgacatcatggccgtgagcaccgcctgcgaggagatcaagaagagcaagagcttcagcaagctgctggagctggtgctgctgatgggcaactacatgaacgccggcagcagaaacgcccagaccttcggcttcaacctgagcagcctgtgcaagctgaaggacaccaagagcgccgaccagaagaccaccctgctgcacttcctggtggagatctgcgaggagaagtaccccgacatcctgaacttcgtggacgacctggagcccctggacaaggccagcaaggtgagcgtggagaccctggagaagaacctgagacagatgggcagacagctgcagcagctggagaaggagctggagaccttccccccccccgaggacctgcacgacaagttcgtgaccaagatgagcatcttcgtgatcagcgccaaggagcagtacgagaccctgagcaagctgcacgagaacatggagaagctgtaccagagcatcatcggctactacgccatcgacgtgaagaaggtgagcgtggaggacttcctgaccgacctgaacaacttcagaaccaccttcatgcaggccatcaaggagaacatcaagaagagagaggccgaggagaaggagaagagagtgagaatcgccaaggagctggccgagagagagagactggagagacagcagaagaagaagagactgctggagatgaagaccgagggcgacgagaccggcgtgatggacaacctgctggaggccctgcagagcggcgccgccttcagagacagaagaaagagaacccccatgcccaaggacgtgagacagagcctgagccccatgagccagagacccgtgctgaaggtgtgcaaccacggcaacaagccctacctgtag

SEQ ID NO: 93015 - DNA, 3051 bp, Artificial Sequence
  derived and/or modified sequence
atggagagacaccagcccagactgcaccaccccgcccagggcagcgccgccggcaccccctaccccagcagcgccagcctgagaggctgcagagagagcaagatgcccagaagaaagggcccccagcacccccccccccccagcggccccgaggagcccggcgagaagagacccaagttccacctgaacatcagaaccctgaccgacgacatgctggacaagttcgccagcatcagaatccccggcagcaagaaggagagaccccccctgcccaacctgaagaccgccttcgccagcagcgactgcagcgccgcccccctggagatgatggagaacttccccaagcccctgagcgagaacgagctgctggagctgttcgagaagatgatggaggacatgaacctgaacgaggacaagaaggcccccctgagagagaaggacttcagcatcaagaaggagatggtgatgcagtacatcaacaccgccagcaagaccggcagcctgaagagaagcagacagatcagcccccaggagttcatccacgagctgaagatgggcagcgccgacgagagactggtgacctgcctggagagcctgagagtgagcctgaccagcaaccccgtgagctgggtggagagcttcggccacgagggcctgggcctgctgctggacatcctggagaagctgatcagcggcaagatccaggagaaggtggtgaagaagaaccagcacaaggtgatccagtgcctgaaggccctgatgaacacccagtacggcctggagagaatcatgagcgaggagagaagcctgagcctgctggccaaggccgtggaccccagacaccccaacatgatgaccgacgtggtgaagctgctgagcgccgtgtgcatcgtgggcgaggagagcatcctggaggaggtgctggaggccctgaccagcgccggcgaggagaagaagatcgacagattcttctgcatcgtggagggcctgagacacaacagcgtgcagctgcaggtggcctgcatgcagctgatcaacgccctggtgaccagccccgacgacctggacttcagactgcacatcagaaacgagttcatgagatgcggcctgaaggagatcctgcccaacctgaagtgcatcaagaacgacggcctggacatccagctgaaggtgttcgacgagcacaaggaggaggacctgttcgagctgagccacagactggaggacatcagagccgagctggacgaggcctacgacgtgtacaacatggtgtggagcaccgtgaaggagaccagagccgagggctacttcatcagcatcctgcagcacctgctgctgatcagaaacgactacttcatcagacagcagtacttcaagctgatcgacgagtgcgtgagccagatcgtgctgcacagagacggcatggaccccgacttcacctacagaaagagactggacctggacctgacccagttcgtggacatctgcatcgaccaggccaagctggaggagttcgaggagaaggccagcgagctgtacaagaagttcgagaaggagttcaccgaccaccaggagacccaggccgagctgcagaagaaggaggccaagatcaacgagctgcaggccgagctgcaggccttcaagagccagttcggcgccctgcccgccgactgcaacatccccctgccccccagcaaggagggcggcaccggccacagcgccctgcccccccccccccccctgcccagcggcggcggcgtgcccccccccccccccccccccccccccccccccctgcccggcatgagaatgcccttcagcggccccgtgcccccccccccccccctgggcttcctgggcggccagaacagcccccccctgcccatcctgcccttcggcctgaagcccaagaaggagttcaagcccgagatcagcatgagaagactgaactggctgaagatcagaccccacgagatgaccgagaactgcttctggatcaaggtgaacgagaacaagtacgagaacgtggacctgctgtgcaagctggagaacaccttctgctgccagcagaaggagagaagagaggaggaggacatcgaggagaagaagagcatcaagaagaagatcaaggagctgaagttcctggacagcaagatcgcccagaacctgagcatcttcctgagcagcttcagagtgccctacgaggagatcagaatgatgatcctggaggtggacgagaccagactggccgagagcatgatccagaacctgatcaagcacctgcccgaccaggagcagctgaacagcctgagccagttcaagagcgagtacagcaacctgtgcgagcccgagcagttcgtggtggtgatgagcaacgtgaagagactgagacccagactgagcgccatcctgttcaagctgcagttcgaggagcaggtgaacaacatcaagcccgacatcatggccgtgagcaccgcctgcgaggagatcaagaagagcaagagcttcagcaagctgctggagctggtgctgctgatgggcaactacatgaacgccggcagcagaaacgcccagaccttcggcttcaacctgagcagcctgtgcaagctgaaggacaccaagagcgccgaccagaagaccaccctgctgcacttcctggtggagatctgcgaggagaagtaccccgacatcctgaacttcgtggacgacctggagcccctggacaaggccagcaaggtgagcgtggagaccctggagaagaacctgagacagatgggcagacagctgcagcagctggagaaggagctggagaccttccccccccccgaggacctgcacgacaagttcgtgaccaagatgagcatcttcgtgatcagcgccaaggagcagtacgagaccctgagcaagctgcacgagaacatggagaagctgtaccagagcatcatcggctactacgccatcgacgtgaagaaggtgagcgtggaggacttcctgaccgacctgaacaacttcagaaccaccttcatgaaggccatcaagttccagatctag

SEQ ID NO: 93016 - DNA, 3339 bp, Artificial Sequence
  derived and/or modified sequence
atggagagacaccagcccagactgcaccaccccgcccagggcagcgccgccggcaccccctaccccagcagcgccagcctgagaggctgcagagagagcaagatgcccagaagaaagggcccccagcacccccccccccccagcggccccgaggagcccggcgagaagagacccaagttccacctgaacatcagaaccctgaccgacgacatgctggacaagttcgccagcatcagaatccccggcagcaagaaggagagaccccccctgcccaacctgaagaccgccttcgccagcagcgactgcagcgccgcccccctggagatgatggagaacttccccaagcccctgagcgagaacgagctgctggagctgttcgagaagatgatggaggacatgaacctgaacgaggacaagaaggcccccctgagagagaaggacttcagcatcaagaaggagatggtgatgcagtacatcaacaccgccagcaagaccggcagcctgaagagaagcagacagatcagcccccaggagttcatccacgagctgaagatgggcagcgccgacgagagactggtgacctgcctggagagcctgagagtgagcctgaccagcaaccccgtgagctgggtggagagcttcggccacgagggcctgggcctgctgctggacatcctggagaagctgatcagcggcaagatccaggagaaggtggtgaagaagaaccagcacaaggtgatccagtgcctgaaggccctgatgaacacccagtacggcctggagagaatcatgagcgaggagagaagcctgagcctgctggccaaggccgtggaccccagacaccccaacatgatgaccgacgtggtgaagctgctgagcgccgtgtgcatcgtgggcgaggagagcatcctggaggaggtgctggaggccctgaccagcgccggcgaggagaagaagatcgacagattcttctgcatcgtggagggcctgagacacaacagcgtgcagctgcaggtggcctgcatgcagctgatcaacgccctggtgaccagccccgacgacctggacttcagactgcacatcagaaacgagttcatgagatgcggcctgaaggagatcctgcccaacctgaagtgcatcaagaacgacggcctggacatccagctgaaggtgttcgacgagcacaaggaggaggacctgttcgagctgagccacagactggaggacatcagagccgagctggacgaggcctacgacgtgtacaacatggtgtggagcaccgtgaaggagaccagagccgagggctacttcatcagcatcctgcagcacctgctgctgatcagaaacgactacttcatcagacagcagtacttcaagctgatcgacgagtgcgtgagccagatcgtgctgcacagagacggcatggaccccgacttcacctacagaaagagactggacctggacctgacccagttcgtggacatctgcatcgaccaggccaagctggaggagttcgaggagaaggccagcgagctgtacaagaagttcgagaaggagttcaccgaccaccaggagacccaggccgagctgcagaagaaggaggccaagatcaacgagctgcaggccgagctgcaggccttcaagagccagttcggcgccctgcccgccgactgcaacatccccctgccccccagcaaggagggcggcaccggccacagcgccctgcccccccccccccccctgcccagcggcggcggcgtgcccccccccccccccccccccccccccccccccctgcccggcatgagaatgcccttcagcggccccgtgcccccccccccccccctgggcttcctgggcggccagaacagcccccccctgcccatcctgcccttcggcctgaagcccaagaaggagttcaagcccgagatcagcatgagaagactgaactggctgaagatcagaccccacgagatgaccgagaactgcttctggatcaaggtgaacgagaacaagtacgagaacgtggacctgctgtgcaagctggagaacaccttctgctgccagcagaaggagagaagagaggaggaggacatcgaggagaagaagagcatcaagaagaagatcaaggagctgaagttcctggacagcaagatcgcccagaacctgagcatcttcctgagcagcttcagagtgccctacgaggagatcagaatgatgatcctggaggtggacgagaccagactggccgagagcatgatccagaacctgatcaagcacctgcccgaccaggagcagctgaacagcctgagccagttcaagagcgagtacagcaacctgtgcgagcccgagcagttcgtggtggtgatgagcaacgtgaagagactgagacccagactgagcgccatcctgttcaagctgcagttcgaggagcaggtgaacaacatcaagcccgacatcatggccgtgagcaccgcctgcgaggagatcaagaagagcaagagcttcagcaagctgctggagctggtgctgctgatgggcaactacatgaacgccggcagcagaaacgcccagaccttcggcttcaacctgagcagcctgtgcaagctgaaggacaccaagagcgccgaccagaagaccaccctgctgcacttcctggtggagatctgcgaggagaagtaccccgacatcctgaacttcgtggacgacctggagcccctggacaaggccagcaaggtgagcgtggagaccctggagaagaacctgagacagatgggcagacagctgcagcagctggagaaggagctggagaccttccccccccccgaggacctgcacgacaagttcgtgaccaagatgagcagattcgtgatcagcgccaaggagcagtacgagaccctgagcaagctgcacgagaacatggagaagctgtaccagagcatcatcggctactacgccatcgacgtgaagaaggtgagcgtggaggacttcctgaccgacctgaacaacttcagaaccaccttcatgcaggccatcaaggagaacatcaagaagagagaggccgaggagaaggagaagagagtgagaatcgccaaggagctggccgagagagagagactggagagacagcagaagaagaagagactgctggagatgaagaccgagggcgacgagaccggcgtgatggacaacctgctggaggccctgcagagcggcgccgccttcagagacagaagaaagagaacccccatgcccaaggacgtgagacagagcctgagccccatgagccagagacccgtgctgaaggtgtgcaaccacggcaacaagccctacctgtag

SEQ ID NO: 93017 - DNA, 2550 bp, Artificial Sequence
  derived and/or modified sequence
atgtccgaagagcgtagcctctctttacttgccaaagcagtagatccacggcacccaaacatgatgaccgacgtggtcaaacttctgtctgctgtgtgcatcgtgggggaggagtcaatattggaagaagtgttggaagccttgacatcagccggagaggagaagaagatcgatagatttttttgcatcgtggaaggtctgaggcataactcggtgcagctgcaggtggcctgtatgcagctcatcaacgctctagtgacttccccagatgaccttgatttccggctccatatccgaaacgaatttatgcggtgcggcctaaaagaaattcttcctaatctaaagtgtatcaaaaatgacggcctggacatccagctcaaagttttcgacgagcataaggaggaggatctgttcgaactttcacatcggcttgaagacatccgcgctgaattagatgaagcgtacgacgtttacaatatggtttggtcgactgtgaaggaaacgagggcagagggttattttatttctatcctccagcacttgctcctaattcggaacgattacttcattcgccagcagtacttcaagttgattgatgaatgtgtgagccaaatcgtcctccatcgcgacggaatggaccccgattttacctataggaaaagactggacttggacctgacccagtttgtggacatatgtatagaccaggccaaactggaggaatttgaagagaaagcctctgaactgtacaagaaatttgaaaaggagtttactgatcaccaggaaacacaggccgagctccaaaagaaggaggcaaaaatcaatgagctccaagcggagctgcaggcctttaagagtcaatttggagctctgccggctgactgtaacatccccctccctccatccaaagaaggcgggaccgggcatagcgcattgccaccaccgccccccttgccctcagggggcggcgttccccctcccccgccaccccctcccccacctcctctcccaggcatgagaatgccttttagcggacccgtgccacccccgccacccttaggttttcttggcggccagaactccccacctttgccaattctgcctttcggcctgaaacctaaaaaggagttcaagccagagatcagcatgaggcggctgaactggttgaaaataagaccacacgagatgactgaaaactgcttctggatcaaggtgaacgagaacaagtatgaaaacgtagacctcctgtgtaaactggagaatacgttctgctgccagcagaaagagcgccgagaggaggaggacattgaagaaaaaaaatctattaagaagaagattaaggagttgaagttcctagactctaaaattgcccagaacctgagtatcttcctcagcagcttcagagttccatacgaggagattaggatgatgatactcgaagttgatgaaacgagactcgctgagtccatgatccagaatctaatcaaacatctccctgatcaagagcaactgaattccctgagtcagtttaagagcgagtactccaatctgtgtgagcctgagcagttcgtggtggtgatgtctaacgttaagagactcaggcctagactctccgccattctcttcaaactgcagtttgaggaacaggtcaataacattaagccagatattatggcagtgtccactgcttgtgaggagatcaagaaatcgaaaagcttctccaagctcttagaactcgtcttgctgatgggtaattatatgaacgccggttcccgaaatgctcagacttttggctttaacttgtctagcctttgtaagcttaaggacaccaaatcagccgatcagaaaacgactttactacactttttagttgagatctgcgaagaaaagtatccagatatcctaaacttcgtggacgacctcgaaccactcgacaaggcttcaaaggtctccgttgaaactctcgaaaaaaatctgagacagatggggagacagctccagcagttggagaaggagttggaaacatttccgcccccagaggacttgcatgataagttcgtaacaaaaatgtcaatcttcgtgattagtgcgaaggaacaatacgagaccctctccaaacttcatgaaaacatggagaagctttaccagagcattatcggttattacgccattgacgttaagaaggttagcgtggaggacttcctcacggacctgaataacttcaggaccacttttatgcaggcaatcaaggaaaatatcaagaaacgcgaggctgaagagaaggaaaaaagggtgcggattgctaaagaacttgctgagcgtgagcggctggaacgacagcagaaaaaaaaacgcctgctggagatgaagaccgagggagacgagacaggcgttatggacaatctgctcgaagctttacagagcggagccgccttcagggatcgacgcaaacggacgcctatgccgaaggacgtgaggcagtcattaagtcccatgtctcagcggcccgtattgaaggtctgtaaccatggcaataaaccgtatctgtag

SEQ ID NO: 93018 - DNA, 3051 bp, Artificial Sequence
  derived and/or modified sequence
atggagcggcaccaacctcgactgcaccatccagcccagggctctgccgccggtaccccttatccatcttcagcaagtctgagaggatgtagagagtccaaaatgccccggagaaaaggccctcagcatcccccgcccccctcgggccccgaggaaccgggagagaagcgaccgaagttccacctgaacatacgcacgctgactgacgacatgctcgacaagtttgcaagtatccgcatcccggggagtaaaaaggaaagacctcccctacctaatcttaaaaccgcttttgcgtcttccgactgctctgctgcacccttagaaatgatggaaaactttcctaagccactgtctgaaaatgaattgttagagttgttcgagaagatgatggaggacatgaacctgaacgaggataaaaaggcccctttaagggagaaggacttttctatcaaaaaggaaatggtgatgcagtatatcaacactgccagcaaaacggggtccctaaaacgttcacgccagataagcccccaagaattcattcacgagctgaagatgggaagtgctgacgagcgcctcgtgacttgtctcgagagccttcgggtgtcgctgacctccaatcctgtgagttgggtggagtcctttgggcacgaaggactcgggctgctgctggatatcttagaaaagcttatcagcggtaaaattcaagagaaagttgtgaagaaaaaccagcacaaggtcattcagtgtttgaaggctttaatgaatacgcagtatgggctggaacggatcatgtccgaagagagaagtctgtcattgctggcgaaagccgtggatcctcgtcaccccaacatgatgacggatgtggtgaagctcctttcagcagtgtgcatcgtcggggaggagtcaatcctcgaagaagtcctggaggccttgacctccgccggggaggaaaagaaaatcgaccgttttttttgcatcgtggaggggctccgccataactcagtccagctgcaggtggcttgcatgcagctgatcaacgctctggttacatctcccgatgacctggatttccgcctgcacattcgaaatgaatttatgaggtgcggactcaaggaaatcctgcctaatctcaagtgtatcaaaaatgacggacttgatattcagctgaaagtttttgacgaacacaaggaggaggatctgttcgagcttagccatcgtcttgaggacattcgcgctgagctggatgaagcttatgacgtgtataacatggtatggtccacagtcaaggaaacaagagcggaaggctatttcatctcaatcctgcagcatttattgctcatccgcaatgattattttattaggcagcagtacttcaaactgattgatgagtgtgtctcacagatcgtactgcatcgcgatgggatggatccggactttacatatcggaagagacttgacctcgatctgacacagttcgtggacatctgcattgatcaggctaagcttgaggaattcgaagaaaaggccagcgagctgtataaaaagttcgagaaggagttcacagaccatcaggaaactcaggccgaattacagaagaaagaggccaaaattaacgaactccaggctgagcttcaggccttcaaatcccagtttggcgcactgcctgccgactgtaatattcctttacccccatcaaaagagggaggaaccggacactcggctctgcctccacccccaccgcttcctagtggcgggggggtgccgccacctcccccgccacccccaccaccccccctgcccgggatgaggatgcccttcagcggtcccgtgccaccacctcccccccttggattcctcggaggccagaatagtcctcctctgccaatcctcccatttggcctcaaacctaagaaggaattcaagccagaaatcagtatgcgtagactgaactggctgaagataagaccgcacgaaatgaccgagaactgcttctggatcaaggtaaatgagaacaaatatgagaatgttgatctcctttgtaagcttgaaaacactttctgttgtcaacagaaggagcgacgtgaagaggaagatatcgaggaaaagaagtctattaaaaagaagattaaagaactcaaattcctagattcgaagatagcccagaatctgagtatttttctctccagcttccgcgtcccttatgaggaaatcaggatgatgattctggaggtggatgagactcgcttggcagagagcatgattcagaaccttattaagcatctgccagatcaagagcagttgaattcgctgagtcagtttaaaagtgagtattcaaacctttgtgaacctgagcagtttgtggttgtgatgtcaaatgttaagcggctccgccctagactgtctgcaattctgttcaagttgcagttcgaggagcaggtgaacaatattaaacctgacattatggccgtgagcacggcctgcgaggaaattaaaaagagcaaaagcttctccaagcttctggagttagtgctgttaatggggaattacatgaacgcgggctctcgtaacgctcaaacttttggtttcaacctgagctcgctgtgcaaattgaaagatactaaaagtgcagatcagaaaactacactgcttcactttctcgtagaaatttgcgaagagaagtacccagacattttaaacttcgtggatgacttggaacctctggacaaggcatcaaaagtctccgttgaaactctcgagaaaaacttaaggcagatgggcagacagcttcaacaactggagaaagaactggagacatttccaccacctgaggacctgcatgacaagtttgtgacaaaaatgtcgattttcgttatctccgccaaggaacagtacgaaactctgagtaagctgcatgagaatatggagaagctgtaccagtccatcatcggctattacgctatcgatgttaagaaggtgtcggtggaggattttctcaccgacctcaataacttcagaactacctttatgaaggctatcaagttccagatttag

SEQ ID NO: 93019 - DNA, 3339 bp, Artificial Sequence
  derived and/or modified sequence
atggaacgacatcagccccgcttgcatcaccctgcacagggcagtgcagctggaacaccttatccttcctcggcttccctgcggggctgcagagagtctaagatgccccggcgaaagggcccccagcatccgcctcctcccagtgggccggaggaaccgggggagaagaggcccaaatttcacctgaacataagaactctaactgatgacatgctcgataagtttgcctccatccgaatacccggctctaagaaggagcggccgccattgcccaatctgaagactgccttcgccagctccgactgttctgcagctccgctggagatgatggaaaattttcccaaacctttatccgagaacgaactcctcgagttgtttgagaaaatgatggaggatatgaatctgaatgaggataagaaagctccactgcgagagaaggatttttctatcaagaaggagatggttatgcagtacattaacaccgcttctaaaacggggtctttgaaacgaagcagacaaatttctccgcaggagttcatccacgaactcaagatgggtagcgctgatgaacgccttgttacctgcctggaatccctgagagtcagcctaacatccaaccctgtgagctgggtagagtctttcggtcacgagggcttagggttactactggatattctcgagaaattgattagcgggaaaatccaggagaaagtggtcaagaagaaccaacataaggttattcaatgccttaaggcactgatgaatacacagtacggcctggaaagaataatgagcgaggagaggtctctgagtttgctggctaaggctgtggaccctcggcacccaaatatgatgacagacgtggtgaagctcctctccgccgtgtgcatcgtgggtgaagagtccattcttgaagaggtgctggaggctctgacgtctgctggcgaagagaagaagatcgatcggttcttttgcatagtcgaaggactgcggcacaatagtgtgcagctgcaagtggcatgtatgcagctcatcaatgccctggtgacaagccccgatgatctcgactttagactgcacattcgcaatgagttcatgagatgcggcctcaaggaaatactacccaatctgaaatgcatcaagaacgacggacttgacattcagctcaaggttttcgacgagcacaaagaagaggacctgtttgagctgtcccacaggctggaggatatcagggccgagctggatgaagcgtatgacgtgtacaatatggtgtggtcgacagtgaaggagacaagagccgaaggatattttataagtattctccaacacctcctgctgattaggaatgactatttcatccgacaacagtactttaagctgattgacgaatgcgtgagccaaattgtgctgcacagagatggcatggatcctgacttcacatatcggaagagactggaccttgaccttacccagttcgttgatatatgtatagaccaggccaaattggaagaattcgaggaaaaagctagcgagttatataagaaatttgagaaggaatttactgatcatcaggagacacaggccgaactgcagaagaaggaggctaagataaacgagcttcaagccgagttacaggccttcaagtcccaatttggcgcattgccggcagattgcaacatcccattgcccccatctaaagaaggaggaacagggcattcagctctgccgccaccccctcctctcccttcgggggggggtgtaccccccccaccgccaccccctccgccccccccactgcccgggatgagaatgccattctccgggcccgtgccaccacccccccccctcggctttctgggaggtcaaaatagtcctcctctcccaattctgcccttcggccttaagcccaagaaggaattcaagcccgagatcagtatgcgacgtctgaattggctgaaaattcgaccacatgagatgaccgaaaactgcttttggatcaaggtgaatgaaaacaaatatgagaacgtggacctgctctgcaagctggagaatactttctgctgtcagcaaaaggaaaggagagaggaagaagacattgaagaaaagaaatctatcaaaaaaaaaatcaaggaactgaaatttctggatagtaaaatcgctcaaaatctgtctatcttcctatctagctttagagtaccctacgaggaaataaggatgatgatacttgaggttgatgagacgaggctcgcagaatcaatgatccagaatttgattaagcacttacctgaccaggaacagttgaatagtctgtctcaattcaagagcgaatacagcaatctttgcgagccagagcagtttgtggtggtaatgagtaacgtaaagaggctcaggccgagactctccgctattctattcaagctgcagtttgaagagcaggtaaataacatcaaacccgacataatggctgtcagcacagcctgcgaggagatcaagaagagcaagtcattttccaagctgcttgagctagttctactgatgggcaattacatgaacgcaggttcgcggaacgcacagacttttggcttcaatctgtcttccctctgtaagcttaaagatacaaagtccgctgatcagaaaaccactctgttacatttcctggtggagatttgcgaggagaagtatcctgatatattaaactttgtcgatgacttggaacccttggataaggcctcgaaggtgtccgttgaaacactggagaagaatctgaggcaaatgggccgacagttgcagcagctcgaaaaggagctcgagactttccccccccccgaggacttacatgacaaattcgtcactaagatgagtagatttgtgatcagcgctaaggaacagtacgagacactctcaaaactccatgagaatatggagaagttgtaccagagcatcatcggttactacgctattgatgtgaaaaaggtatccgtcgaagacttccttactgacctgaataacttccggacaactttcatgcaggctatcaaagagaacatcaagaagcgggaggcggaggaaaaagaaaagagggttaggattgctaaggagctggcagagagagaaagactcgaaaggcaacagaagaaaaaacgccttctcgaaatgaaaacagagggggacgagaccggagtgatggataacctactggaagctctccagtccggagcagcatttcgagaccgtaggaagcgcacccctatgcccaaagatgtgcgacagtccctctcaccgatgagccaacgtcctgttctgaaggtgtgcaatcacggaaataaaccctatctgtag

SEQ ID NO: 93020 - DNA, 2734 bp, Artificial Sequence
  derived and/or modified sequence
ggaacctggcattgatcctcagtttagaacaggccagttaccatattgtccggagtgggtccttgacattcaggaaagatacatccttagacctttcaaaatttgtcatgcctctctaacctaaaacagccctcattaaatgcactttaatccgagcactgtatggcttggaaagaattatgagtgaggagaggagcctttccttattggccaaagccgtggatcccagacaccccaatatgatgacagatgtggttaaacttctctctgcggtatgcattgtaggggaagaaagcatccttgaagaagttttagaagctttaacttcagctggtgaagaaaaaaaaattgacagatttttttgtattgtggaaggcctccggcacaattcagttcaactgcaagtagcttgtatgcagctcatcaatgccctggttacatctcctgatgatttggatttcaggcttcacatcagaaatgaatttatgcgttgtggattgaaagagatattgccaaatttaaaatgcattaagaatgatggcctggatatccaacttaaagtctttgatgagcataaagaagaagatttgtttgagttatcccatcgccttgaagatattagagctgaacttgatgaagcatatgatgtttacaacatggtgtggagcacagttaaagaaactagagcagagggatattttatttctattcttcagcatcttttgctgattcgaaatgattattttataaggcaacaatacttcaaattaattgatgagtgtgtatcccagattgtattgcatagagatggaatggatccagacttcacatatcgaaaaagactagatttagatttaacccagtttgtagacatttgcatagatcaagcaaaactagaagagtttgaagagaaagcatcagaactttacaagaaatttgaaaaagagtttaccgaccaccaagaaactcaggctgaattgcagaaaaaagaggcaaagattaatgagcttcaagcagagctacaagcttttaagtctcagtttggtgccttgccagctgattgtaatattcctttgcctccctctaaagaaggtggaactggccactcagcacttcctcctccgcctccactgccttctggtggaggggtgccgcctccacctcctcccccaccacctcctccacttccaggaatgcggatgccattcagtggtcctgtgcctccaccacctcccctgggattccttggaggacaaaattctcctcctctaccaatcctgccatttgggttgaaaccaaagaaagaatttaaacctgaaatcagcatgagaagattgaattggttaaagatcagacctcatgaaatgactgaaaactgtttctggataaaagtaaatgaaaataagtatgaaaacgtggatttgctttgtaaacttgagaatacattttgttgccaacaaaaagagagaagagaagaggaagatattgaagagaagaaatcgattaagaaaaaaattaaagaacttaagtttttagattctaaaattgcccagaacctttcaatcttcctgagctcttttcgggtgccatatgaggaaatcagaatgatgatattggaagtagatgaaacacggttggcagagtctatgattcagaacttaataaagcatcttcctgatcaagagcaattaaattcattgtctcagttcaagagtgaatatagcaacttatgtgaacctgagcagtttgtggttgtgatgagcaatgtgaagagactacggccacggctcagtgctattctctttaagcttcagtttgaagagcaggtgaacaacatcaaacctgacatcatggctgtcagtactgcctgcgaagagataaagaagagcaaaagctttagcaagttgctggaacttgtattgctaatgggaaactacatgaatgctggctcccggaatgctcaaaccttcggatttaaccttagctctctctgtaaactaaaggacacaaaatcagcagatcagaaaacaacgctacttcatttcctggtagaaatatgtgaagagaagtaccctgatatactgaattttgtggatgatttggaacctttagacaaagctagtaaagtctctgtagaaacgctggaaaagaatttgaggcagatgggaaggcagcttcaacagcttgagaaggaattggaaacctttccccctcctgaggacttgcatgacaagtttgtgacaaagatgtccatatttgttatcagtgcaaaagaacaatatgagacactttcgaagttacacgaaaacatggaaaagttataccagagtataataggatactatgccattgatgtgaagaaggtgtctgtggaagactttcttactgacctgaataacttcagaaccacattcatgcaagcaataaaggagaatatcaaaaaaagagaagcagaggaaaaagaaaaacgtgtcagaatagctaaagaattagcagagcgagaaagactcgaacgccaacaaaagaaaaagcgtttattagaaatgaagactgagggtgatgagacaggagtgatggataatctgctggaggccttgcagtccggggctgccttccgcgacagaagaaaaaggacaccgatgccaaaagatgttcggcagagtctcagtccaatgtctcagaggcctgttctgaaagtttgtaaccatggtaataaaccgtatttataaattgc

SEQ ID NO: 93021 - DNA, 3270 bp, Artificial Sequence
  derived and/or modified sequence
tgatccggcggcgcgggattggccagtcccgggccaacacgggtggcgggagttttcagatgtgttggctgcggccccgacttcagcggttgggctaggctgtgctgactgtttgggtggcggaccccgggagtaaaacctgttgtcgatccctcagcttccagcttgcggcttgctgagtggccaccttctttccggtccccggagctgcggggaaagatggaacggcaccagccgcggctgcaccacccggcccaaggctcagccgctgggactccctacccttcctcagcctctctccgcggctgccgggaaagcaagatgccgcgcaggaagggcccccaacaccctccgccgcccagtggccccgaggagcctggggagaagcgccccaagtttcatttaaatattaggacactgacggatgatatgctggacaaatttgccagcataagaattccagggagcaagaaagagagacctccacttcccaacctgaagactgcatttgcaagcagtgattgctcagcagcacctttagagatgatggagaactttccaaagccactgtcagagaatgaactcttagaactttttgaaaaaatgatggaagatatgaatttaaatgaagataaaaaggcaccattgcgggaaaaggacttcagtatcaaaaaagaaatggtgatgcagtacattaatactgcttctaagacaggaagtcttaagagaagccgacagatctcacctcaggaattcattcatgagctgaaaatggggtctgcagatgagagacttgtcacatgcctggagtctctccgagtgtctttgaccagcaatcctgtgagttgggtggaaagctttggacatgaagggcttggattattattagacattttggaaaaactgattagtggaaaaatccaagaaaaagttgtaaagaaaaatcaacataaagtcatacagtgtctaaaagccctgatgaatacgcagtatggcttggaaagaattatgagtgaggagaggagcctttccttattggccaaagccgtggatcccagacaccccaatatgatgacagatgtggttaaacttctctctgcggtatgcattgtaggggaagaaagcatccttgaagaagttttagaagctttaacttcagctggtgaagaaaaaaaaattgacagatttttttgtattgtggaaggcctccggcacaattcagttcaactgcaagtagcttgtatgcagctcatcaatgccctggttacatctcctgatgatttggatttcaggcttcacatcagaaatgaatttatgcgttgtggattgaaagagatattgccaaatttaaaatgcattaagaatgatggcctggatatccaacttaaagtctttgatgagcataaagaagaagatttgtttgagttatcccatcgccttgaagatattagagctgaacttgatgaagcatatgatgtttacaacatggtgtggagcacagttaaagaaactagagcagagggatattttatttctattcttcagcatcttttgctgattcgaaatgattattttataaggcaacaatacttcaaattaattgatgagtgtgtatcccagattgtattgcatagagatggaatggatccagacttcacatatcgaaaaagactagatttagatttaacccagtttgtagacatttgcatagatcaagcaaaactagaagagtttgaagagaaagcatcagaactttacaagaaatttgaaaaagagtttaccgaccaccaagaaactcaggctgaattgcagaaaaaagaggcaaagattaatgagcttcaagcagagctacaagcttttaagtctcagtttggtgccttgccagctgattgtaatattcctttgcctccctctaaagaaggtggaactggccactcagcacttcctcctccgcctccactgccttctggtggaggggtgccgcctccacctcctcccccaccacctcctccacttccaggaatgcggatgccattcagtggtcctgtgcctccaccacctcccctgggattccttggaggacaaaattctcctcctctaccaatcctgccatttgggttgaaaccaaagaaagaatttaaacctgaaatcagcatgagaagattgaattggttaaagatcagacctcatgaaatgactgaaaactgtttctggataaaagtaaatgaaaataagtatgaaaacgtggatttgctttgtaaacttgagaatacattttgttgccaacaaaaagagagaagagaagaggaagatattgaagagaagaaatcgattaagaaaaaaattaaagaacttaagtttttagattctaaaattgcccagaacctttcaatcttcctgagctcttttcgggtgccatatgaggaaatcagaatgatgatattggaagtagatgaaacacggttggcagagtctatgattcagaacttaataaagcatcttcctgatcaagagcaattaaattcattgtctcagttcaagagtgaatatagcaacttatgtgaacctgagcagtttgtggttgtgatgagcaatgtgaagagactacggccacggctcagtgctattctctttaagcttcagtttgaagagcaggtgaacaacatcaaacctgacatcatggctgtcagtactgcctgcgaagagataaagaagagcaaaagctttagcaagttgctggaacttgtattgctaatgggaaactacatgaatgctggctcccggaatgctcaaaccttcggatttaaccttagctctctctgtaaactaaaggacacaaaatcagcagatcagaaaacaacgctacttcatttcctggtagaaatatgtgaagagaagtaccctgatatactgaattttgtggatgatttggaacctttagacaaagctagtaaagtctctgtagaaacgctggaaaagaatttgaggcagatgggaaggcagcttcaacagcttgagaaggaattggaaacctttccccctcctgaggacttgcatgacaagtttgtgacaaagatgtccatatttgttatcagtgcaaaagaacaatatgagacactttcgaagttacacgaaaacatggaaaagttataccagagtataataggatactatgccattgatgtgaagaaggtgtctgtggaagactttcttactgacctgaataacttcagaaccacattcatgaaagctataaaatttcagatttaa

SEQ ID NO: 93022 - DNA, 3449 bp, Artificial Sequence
  derived and/or modified sequence
atggaacggcaccagccgcggctgcaccacccggcccaaggctcagccgctgggactccctacccttcctcagcctctctccgcggctgccgggaaagcaagatgccgcgcaggaagggcccccaacaccctccgccgcccagtggccccgaggagcctggggagaagcgccccaagtttcatttaaatattaggacactgacggatgatatgctggacaaatttgccagcataagaattccagggagcaagaaagagagacctccacttcccaacctgaagactgcatttgcaagcagtgattgctcagcagcacctttagagatgatggagaactttccaaagccactgtcagagaatgaactcttagaactttttgaaaaaatgatggaagatatgaatttaaatgaagataaaaaggcaccattgcgggaaaaggacttcagtatcaaaaaagaaatggtgatgcagtacattaatactgcttctaagacaggaagtcttaagagaagccgacagatctcacctcaggaattcattcatgagctgaaaatggggtctgcagatgagagacttgtcacatgcctggagtctctccgagtgtctttgaccagcaatcctgtgagttgggtggaaagctttggacatgaagggcttggattattattagacattttggaaaaactgattagtggaaaaatccaagaaaaagttgtaaagaaaaatcaacataaagtcatacagtgtctaaaagccctgatgaatacgcagtatggcttggaaagaattatgagtgaggagaggagcctttccttattggccaaagccgtggatcccagacaccccaatatgatgacagatgtggttaaacttctctctgcggtatgcattgtaggggaagaaagcatccttgaagaagttttagaagctttaacttcagctggtgaagaaaaaaaaattgacagatttttttgtattgtggaaggcctccggcacaattcagttcaactgcaagtagcttgtatgcagctcatcaatgccctggttacatctcctgatgatttggatttcaggcttcacatcagaaatgaatttatgcgttgtggattgaaagagatattgccaaatttaaaatgcattaagaatgatggcctggatatccaacttaaagtctttgatgagcataaagaagaagatttgtttgagttatcccatcgccttgaagatattagagctgaacttgatgaagcatatgatgtttacaacatggtgtggagcacagttaaagaaactagagcagagggatattttatttctattcttcagcatcttttgctgattcgaaatgattattttataaggcaacaatacttcaaattaattgatgagtgtgtatcccagattgtattgcatagagatggaatggatccagacttcacatatcgaaaaagactagatttagatttaacccagtttgtagacatttgcatagatcaagcaaaactagaagagtttgaagagaaagcatcagaactttacaagaaatttgaaaaagagtttaccgaccaccaagaaactcaggctgaattgcagaaaaaagaggcaaagattaatgagcttcaagcagagctacaagcttttaagtctcagtttggtgccttgccagctgattgtaatattcctttgcctccctctaaagaaggtggaactggccactcagcacttcctcctccgcctccactgccttctggtggaggggtgccgcctccacctcctcccccaccacctcctccacttccaggaatgcggatgccattcagtggtcctgtgcctccaccacctcccctgggattccttggaggacaaaattctcctcctctaccaatcctgccatttgggttgaaaccaaagaaagaatttaaacctgaaatcagcatgagaagattgaattggttaaagatcagacctcatgaaatgactgaaaactgtttctggataaaagtaaatgaaaataagtatgaaaacgtggatttgctttgtaaacttgagaatacattttgttgccaacaaaaagagagaagagaagaggaagatattgaagagaagaaatcgattaagaaaaaaattaaagaacttaagtttttagattctaaaattgcccagaacctttcaatcttcctgagctcttttcgggtgccatatgaggaaatcagaatgatgatattggaagtagatgaaacacggttggcagagtctatgattcagaacttaataaagcatcttcctgatcaagagcaattaaattcattgtctcagttcaagagtgaatatagcaacttatgtgaacctgagcagtttgtggttgtgatgagcaatgtgaagagactacggccacggctcagtgctattctctttaagcttcagtttgaagagcaggtgaacaacatcaaacctgacatcatggctgtcagtactgcctgcgaagagataaagaagagcaaaagctttagcaagttgctggaacttgtattgctaatgggaaactacatgaatgctggctcccggaatgctcaaaccttcggatttaaccttagctctctctgtaaactaaaggacacaaaatcagcagatcagaaaacaacgctacttcatttcctggtagaaatatgtgaagagaagtaccctgatatactgaattttgtggatgatttggaacctttagacaaagctagtaaagtctctgtagaaacgctggaaaagaatttgaggcagatgggaaggcagcttcaacagcttgagaaggaattggaaacctttccccctcctgaggacttgcatgacaagtttgtgacaaagatgtccagatttgttatcagtgcaaaagaacaatatgagacactttcgaagttacacgaaaacatggaaaagttataccagagtataataggatactatgccattgatgtgaagaaggtgtctgtggaagactttcttactgacctgaataacttcagaaccacattcatgcaagcaataaaggagaatatcaaaaaaagagaagcagaggaaaaagaaaaacgtgtcagaatagctaaagaattagcagagcgagaaagactcgaacgccaacaaaagaaaaagcgtttattagaaatgaagactgagggtgatgagacaggagtgatggataatctgctggaggccttgcagtccggggctgccttccgcgacagaagaaaaaggacaccgatgccaaaagatgttcggcagagtctcagtccaatgtctcagaggcctgttctgaaagtttgtaaccatggtaataaaccgtatttataaattgcacattcttcttatctacttttatcctattgatctgtgattttagtagactgctgtgaaattctcaagttccaatataactaaaatagtaaaaatgtgtgcatgta

SEQ ID NO: 93023 - DNA, 2550 bp, Artificial Sequence
  derived and/or modified sequence
atgtctgaggagaggagcctgagcctgctggccaaggctgtggaccccaggcaccccaacatgatgacagatgtggtgaagctgctgtctgctgtgtgcatcgtgggggaggagagcatcctggaggaggtgctggaggccctgaccagcgctggggaggagaagaagattgaccgcttcttctgcatcgtggagggcctgcggcacaacagcgtgcagctgcaggtggcctgcatgcagctgatcaatgccctggtgaccagcccagatgacctggacttccggctgcacatcagaaatgagttcatgagatgtggcctgaaggagatcctgcccaacctgaagtgcatcaagaatgatggcctggacatccagctgaaggtgtttgatgagcacaaggaggaggacctgtttgagctgagccaccggctggaggacatccgggcagagctggatgaggcctatgatgtgtacaacatggtgtggagcacagtgaaggagaccagggctgagggctacttcatcagcatcctgcagcacctgctgctgatcagaaatgactacttcatccggcagcagtacttcaagctgattgatgaatgtgtgtcccagatcgtgctgcacagagatggcatggaccctgacttcacctacaggaagaggctggacctggacctgacccagtttgtggacatctgcatcgaccaggccaagctggaggagtttgaggagaaggccagcgagctgtacaagaagtttgagaaggagttcacagaccaccaggagacccaggccgagctgcagaagaaggaggccaagatcaatgagctgcaggccgagctgcaggccttcaagagccagtttggagccctgcctgctgactgcaacatccccctgccccccagcaaggagggcggcaccggccacagcgccctgcccccacctccacccctgcccagcggcggcggcgtgcccccacctcctcctcctcctcctcctccacccctgcccggcatgaggatgcccttcagcggccctgtgcccccacctccacccctgggcttcctgggcggccagaacagcccccccctgcccatcctgcccttcggcctgaagcccaagaaggagttcaagccagagatctccatgaggcggctgaactggctgaagatccggccccatgagatgacagagaactgcttctggatcaaggtgaatgaaaacaagtatgaaaatgtggacctgctgtgcaagctggagaacaccttctgctgccagcagaaggagcggcgggaggaggaggacatcgaggagaagaagagcatcaagaagaagatcaaggagctgaagttcctggacagcaagatcgcccagaacctgagcatcttcctgagcagcttccgggtgccctatgaggagatccgcatgatgatcctggaggtggatgagacccggctggccgagagcatgatccagaacctgatcaagcacctgcctgaccaggagcagctgaacagcctgagccagttcaagtctgagtacagcaacctgtgtgagcctgagcagtttgtggtggtgatgagcaatgtgaagaggctgcggccccggctgagcgccatcctcttcaagctgcagtttgaggagcaggtgaacaacatcaagccagacatcatggctgtgtccacagcctgtgaggagatcaagaagagcaagagcttcagcaagctgctggagctggtgctgctgatgggcaactacatgaatgccggcagcagaaatgcccagaccttcggcttcaacctgagcagcctgtgcaagctgaaggacaccaagtctgctgaccagaagaccaccctgctgcacttcctggtggagatctgtgaggagaagtacccagacatcctgaactttgtggatgacctggagcccctggacaaggccagcaaggtgtctgtggagaccctggagaagaacctgcggcagatgggccggcagctgcagcagctggagaaggagctggagaccttccccccacctgaggacctgcatgacaagtttgtgaccaagatgagcatctttgtgatcagcgccaaggagcagtatgagaccctgagcaagctgcacgagaacatggagaagctgtaccagagcatcatcggctactatgccattgatgtgaagaaggtgtctgtggaggacttcctgacagacctgaacaacttccgcaccaccttcatgcaggccatcaaggagaacatcaagaagcgggaggccgaggagaaggagaagagggtgagaattgccaaggagctggccgagcgggagcggctggagcggcagcagaagaagaagaggctgctggagatgaagacagaaggagatgagaccggggtgatggacaacctgctggaggccctgcagagcggggccgccttccgggacaggaggaagaggacccccatgcccaaggatgtgcggcagagcctgagccccatgagccagaggcctgtgctgaaggtgtgcaaccacggcaacaagccctacctgtag

SEQ ID NO: 93024 - DNA, 3051 bp, Artificial Sequence
  derived and/or modified sequence
atggagcggcaccagccccggctgcaccacccagcccagggcagcgctgctggcaccccctaccccagcagcgccagcctgcggggctgccgggagagcaagatgcccaggaggaagggcccccagcaccccccaccacccagcggccctgaggagcctggagagaagaggcccaagttccacctgaacatccgcaccctgacagatgacatgctggacaagtttgccagcatccgcatccctggcagcaagaaggagcggccccccctgcccaacctgaagacagcctttgccagcagtgactgcagcgctgcccccctggagatgatggagaacttccccaagcccctgtctgaaaatgagctgctggagctgtttgagaagatgatggaggacatgaacctgaatgaagacaagaaggcccccctgcgggagaaggacttcagcatcaagaaggagatggtgatgcagtacatcaacacagccagcaagacaggcagcctgaagaggagccggcagatcagcccccaggagttcatccacgagctgaagatgggcagcgcagatgagcggctggtgacctgcctggagagcctgcgggtgtccctgaccagcaaccctgtgtcctgggtggagagctttggccacgagggcctgggcctgctgctggacatcctggagaagctgatcagcggcaagatccaggagaaggtggtgaagaagaaccagcacaaggtgatccagtgcctgaaggccctgatgaacacccagtatggcctggagcgcatcatgtctgaggagaggagcctgagcctgctggccaaggctgtggaccccaggcaccccaacatgatgacagatgtggtgaagctgctgtctgctgtgtgcatcgtgggggaggagagcatcctggaggaggtgctggaggccctgaccagcgctggggaggagaagaagattgaccgcttcttctgcatcgtggagggcctgcggcacaacagcgtgcagctgcaggtggcctgcatgcagctgatcaatgccctggtgaccagcccagatgacctggacttccggctgcacatcagaaatgagttcatgagatgtggcctgaaggagatcctgcccaacctgaagtgcatcaagaatgatggcctggacatccagctgaaggtgtttgatgagcacaaggaggaggacctgtttgagctgagccaccggctggaggacatccgggcagagctggatgaggcctatgatgtgtacaacatggtgtggagcacagtgaaggagaccagggctgagggctacttcatcagcatcctgcagcacctgctgctgatcagaaatgactacttcatccggcagcagtacttcaagctgattgatgaatgtgtgtcccagatcgtgctgcacagagatggcatggaccctgacttcacctacaggaagaggctggacctggacctgacccagtttgtggacatctgcatcgaccaggccaagctggaggagtttgaggagaaggccagcgagctgtacaagaagtttgagaaggagttcacagaccaccaggagacccaggccgagctgcagaagaaggaggccaagatcaatgagctgcaggccgagctgcaggccttcaagagccagtttggagccctgcctgctgactgcaacatccccctgccccccagcaaggagggcggcaccggccacagcgccctgcccccacctccacccctgcccagcggcggcggcgtgcccccacctcctcctcctcctcctcctccacccctgcccggcatgaggatgcccttcagcggccctgtgcccccacctccacccctgggcttcctgggcggccagaacagcccccccctgcccatcctgcccttcggcctgaagcccaagaaggagttcaagccagagatctccatgaggcggctgaactggctgaagatccggccccatgagatgacagagaactgcttctggatcaaggtgaatgaaaacaagtatgaaaatgtggacctgctgtgcaagctggagaacaccttctgctgccagcagaaggagcggcgggaggaggaggacatcgaggagaagaagagcatcaagaagaagatcaaggagctgaagttcctggacagcaagatcgcccagaacctgagcatcttcctgagcagcttccgggtgccctatgaggagatccgcatgatgatcctggaggtggatgagacccggctggccgagagcatgatccagaacctgatcaagcacctgcctgaccaggagcagctgaacagcctgagccagttcaagtctgagtacagcaacctgtgtgagcctgagcagtttgtggtggtgatgagcaatgtgaagaggctgcggccccggctgagcgccatcctcttcaagctgcagtttgaggagcaggtgaacaacatcaagccagacatcatggctgtgtccacagcctgtgaggagatcaagaagagcaagagcttcagcaagctgctggagctggtgctgctgatgggcaactacatgaatgccggcagcagaaatgcccagaccttcggcttcaacctgagcagcctgtgcaagctgaaggacaccaagtctgctgaccagaagaccaccctgctgcacttcctggtggagatctgtgaggagaagtacccagacatcctgaactttgtggatgacctggagcccctggacaaggccagcaaggtgtctgtggagaccctggagaagaacctgcggcagatgggccggcagctgcagcagctggagaaggagctggagaccttccccccacctgaggacctgcatgacaagtttgtgaccaagatgagcatcttcgtcatcagcgccaaggagcagtatgagaccctgagcaagctgcacgagaacatggagaagctgtaccagagcatcatcggctactatgccattgatgtgaagaaggtgtctgtggaggacttcctgacagacctgaacaacttccgcaccaccttcatgaaggccatcaagttccagatctag

SEQ ID NO: 93025 - DNA, 3339 bp, Artificial Sequence
  derived and/or modified sequence
atggagcggcaccagccccggctgcaccacccagcccagggcagcgctgctggcaccccctaccccagcagcgccagcctgcggggctgccgggagagcaagatgcccaggaggaagggcccccagcaccccccaccacccagcggccctgaggagcctggagagaagaggcccaagttccacctgaacatccgcaccctgacagatgacatgctggacaagtttgccagcatccgcatccctggcagcaagaaggagcggccccccctgcccaacctgaagacagcctttgccagcagtgactgcagcgctgcccccctggagatgatggagaacttccccaagcccctgtctgaaaatgagctgctggagctgtttgagaagatgatggaggacatgaacctgaatgaagacaagaaggcccccctgcgggagaaggacttcagcatcaagaaggagatggtgatgcagtacatcaacacagccagcaagacaggcagcctgaagaggagccggcagatcagcccccaggagttcatccacgagctgaagatgggcagcgcagatgagcggctggtgacctgcctggagagcctgcgggtgtccctgaccagcaaccctgtgtcctgggtggagagctttggccacgagggcctgggcctgctgctggacatcctggagaagctgatcagcggcaagatccaggagaaggtggtgaagaagaaccagcacaaggtgatccagtgcctgaaggccctgatgaacacccagtatggcctggagcgcatcatgtctgaggagaggagcctgagcctgctggccaaggctgtggaccccaggcaccccaacatgatgacagatgtggtgaagctgctgtctgctgtgtgcatcgtgggggaggagagcatcctggaggaggtgctggaggccctgaccagcgctggggaggagaagaagattgaccgcttcttctgcatcgtggagggcctgcggcacaacagcgtgcagctgcaggtggcctgcatgcagctgatcaatgccctggtgaccagcccagatgacctggacttccggctgcacatcagaaatgagttcatgagatgtggcctgaaggagatcctgcccaacctgaagtgcatcaagaatgatggcctggacatccagctgaaggtgtttgatgagcacaaggaggaggacctgtttgagctgagccaccggctggaggacatccgggcagagctggatgaggcctatgatgtgtacaacatggtgtggagcacagtgaaggagaccagggctgagggctacttcatcagcatcctgcagcacctgctgctgatcagaaatgactacttcatccggcagcagtacttcaagctgattgatgaatgtgtgtcccagatcgtgctgcacagagatggcatggaccctgacttcacctacaggaagaggctggacctggacctgacccagtttgtggacatctgcatcgaccaggccaagctggaggagtttgaggagaaggccagcgagctgtacaagaagtttgagaaggagttcacagaccaccaggagacccaggccgagctgcagaagaaggaggccaagatcaatgagctgcaggccgagctgcaggccttcaagagccagtttggagccctgcctgctgactgcaacatccccctgccccccagcaaggagggcggcaccggccacagcgccctgcccccacctccacccctgcccagcggcggcggcgtgcccccacctcctcctcctcctcctcctccacccctgcccggcatgaggatgcccttcagcggccctgtgcccccacctccacccctgggcttcctgggcggccagaacagcccccccctgcccatcctgcccttcggcctgaagcccaagaaggagttcaagccagagatctccatgaggcggctgaactggctgaagatccggccccatgagatgacagagaactgcttctggatcaaggtgaatgaaaacaagtatgaaaatgtggacctgctgtgcaagctggagaacaccttctgctgccagcagaaggagcggcgggaggaggaggacatcgaggagaagaagagcatcaagaagaagatcaaggagctgaagttcctggacagcaagatcgcccagaacctgagcatcttcctgagcagcttccgggtgccctatgaggagatccgcatgatgatcctggaggtggatgagacccggctggccgagagcatgatccagaacctgatcaagcacctgcctgaccaggagcagctgaacagcctgagccagttcaagtctgagtacagcaacctgtgtgagcctgagcagtttgtggtggtgatgagcaatgtgaagaggctgcggccccggctgagcgccatcctcttcaagctgcagtttgaggagcaggtgaacaacatcaagccagacatcatggctgtgtccacagcctgtgaggagatcaagaagagcaagagcttcagcaagctgctggagctggtgctgctgatgggcaactacatgaatgccggcagcagaaatgcccagaccttcggcttcaacctgagcagcctgtgcaagctgaaggacaccaagtctgctgaccagaagaccaccctgctgcacttcctggtggagatctgtgaggagaagtacccagacatcctgaactttgtggatgacctggagcccctggacaaggccagcaaggtgtctgtggagaccctggagaagaacctgcggcagatgggccggcagctgcagcagctggagaaggagctggagaccttccccccacctgaggacctgcatgacaagtttgtgaccaagatgagccgcttcgtcatcagcgccaaggagcagtatgagaccctgagcaagctgcacgagaacatggagaagctgtaccagagcatcatcggctactatgccattgatgtgaagaaggtgtctgtggaggacttcctgacagacctgaacaacttccgcaccaccttcatgcaggccatcaaggagaacatcaagaagcgggaggccgaggagaaggagaagagggtgcgcatcgccaaggagctggccgagcgggagcggctggagcggcagcagaagaagaagaggctgctggagatgaagacagaaggagatgaaacaggagtgatggacaacctgctggaggccctgcagagcggggccgccttccgggacaggaggaagaggacccccatgcccaaggatgtgcggcagagcctgagccccatgagccagaggcctgtgctgaaggtgtgcaaccacggcaacaagccctacctgtag

SEQ ID NO: 93026 - DNA, 2550 bp, Artificial Sequence
  derived and/or modified sequence
atgagcgaggagcggagcctgagcctgctggccaaggccgtggacccaaggcatcccaacatgatgacagatgtggtaaagctgctgagtgccgtgtgcatcgtcggcgaagaatccattctggaggaggtcctggaggcccttacgagcgcgggagaggagaagaaaatcgatcggttcttctgcatcgtagagggactcaggcataattcagttcaactgcaggtggcatgcatgcagctgattaatgcccttgtgacaagccccgatgatctcgattttcgcctgcacattcgcaatgaattcatgagatgcggtttaaaagaaatacttcccaacctaaagtgcatcaagaatgacggactggacattcagcttaaagtctttgacgaacacaaggaagaggatttattcgagttaagccaccggcttgaggacatcagggccgagttggatgaagcctacgacgtgtacaacatggtttggtctacagttaaagaaacccgcgccgagggctacttcatttctatcctacagcacttgctgcttatccgcaacgactatttcatcagacaacagtacttcaagctcatcgatgagtgcgtgagccagatcgtgctacatcgggacggcatggatcccgatttcacttataggaagcgattagatttggatctgactcagttcgtcgatatctgtatagaccaggcaaagttggaagagttcgaagagaaagccagtgagctgtacaagaagtttgagaaagaattcaccgatcatcaagaaacccaggccgagctacagaaaaaggaggcgaaaattaacgaattgcaggcagaactccaggccttcaagagtcagtttggcgctctgccagcagactgcaacattccactcccaccctccaaagagggaggcaccggacactccgctctgccgcccccaccaccgcttccttcgggcggtggggtgcccccacccccaccccccccccccccgccccccttgccaggaatgcgaatgccattcagtggaccggtccccccaccaccccctcttggcttcctgggtggccaaaactcacctccactgcctatcttacccttcggcctcaaacccaaaaaggagttcaaaccagaaatttcgatgcggagactcaattggcttaagatcaggcctcacgagatgaccgaaaactgcttctggattaaagttaacgagaacaaatatgagaatgtagacctgctgtgtaagctggagaatacattttgctgtcagcagaaggaacgacgagaagaggaggatatcgaggaaaagaaaagcataaaaaagaaaatcaaagagctcaagtttctggattctaagatcgcacagaatctaagcatcttcctgagctctttccgtgtgccgtacgaggagatccgcatgatgattttggaggtggatgaaacccgcctggctgagtccatgatccaaaatctgatcaagcatctgccagaccaggagcaacttaatagtctgtctcaatttaagagcgagtacagcaacctttgcgaaccagagcagttcgtggttgtcatgagcaacgtcaaaagactccgaccaagactatccgcaattctgtttaagctgcagtttgaggagcaggtgaacaacataaaaccggatatcatggccgtgtccactgcttgcgaagagatcaagaagtccaaatctttcagcaagctgctggagctggtgcttctcatgggaaactacatgaacgccggctctcgcaacgctcagacattcggttttaacctgtcctctctctgtaagctcaaagataccaagtccgcagaccagaagacgacccttctacatttcctggttgagatttgtgaggaaaaatatcctgatatcctaaacttcgtagacgatctggagccactggacaaagcaagtaaagtaagcgttgagaccctggagaaaaacctgaggcagatgggccgccagctgcagcaactggaaaaagagcttgagacttttcccccacccgaggacctccatgataaattcgtcaccaagatgtccatcttcgtgatctctgccaaagaacagtacgagacactttcaaagttacatgagaatatggaaaaactttaccaatccatcataggctattacgccatcgacgtcaagaaagttagcgtggaggactttcttacggacctgaacaactttcggaccactttcatgcaggcaataaaagagaacatcaaaaagcgggaagccgaagaaaaagaaaaacgcgtacggatagcaaaggaacttgccgagagggagcggttggagaggcaacagaaaaagaagcgtctgctcgagatgaaaacagaaggagacgaaaccggggtaatggataatctcctcgaggccctccaatctggcgcagcattccgcgaccggcgcaaacgcactcctatgcctaaagacgtccggcagtctctgtctcctatgtcccagcgccccgtgcttaaggtgtgtaatcatgggaacaaaccctacctatag

SEQ ID NO: 93027 - DNA, 3051 bp, Artificial Sequence
  derived and/or modified sequence
atggagcggcaccagccccggctgcaccaccccgcccagggcagcgctgccgggaccccttacccctcatcagcatctctgcgcgggtgtagggaaagcaagatgccaaggcgtaaaggccctcaacaccctccccctcctagcggccctgaagagcctggcgagaagcgccccaagtttcaccttaacattcgaaccctcaccgatgatatgcttgacaaatttgcatcaatacggattcctggatccaaaaaagaaaggccccccctgcccaatctcaagacagcctttgccagtagcgattgttccgctgcccccttggaaatgatggaaaatttccctaaacctctgagcgagaatgagcttctcgaacttttcgagaaaatgatggaggacatgaacctgaacgaagacaagaaggccccgttaagagagaaagacttcagtattaaaaaggagatggtcatgcagtatatcaacacagcctcgaaaaccggctctctgaaaagatcacggcagattagcccgcaggagttcatccacgagctgaagatgggctcagcagacgaaaggcttgtgacctgtttagaaagtctccgcgtgagccttactagcaatcccgtcagttgggtggaatccttcggacatgaagggctcgggttgttattggatattctcgagaaattaatctccggcaagatccaggaaaaggtggtcaagaaaaatcagcataaggtaatccaatgtctgaaagccctgatgaacacacagtacggactggaaaggattatgagcgaagagagaagcctgtccctcctggccaaggcagtggacccacgccatccaaatatgatgacagacgtggtgaaattgctctcagccgtgtgcattgttggggaggagtcgatcttggaggaggttttagaggccctcacttctgcaggagaggagaaaaaaattgataggtttttctgcattgtagaaggactgaggcacaattctgtccagcttcaagtcgcatgcatgcagctcattaatgcccttgtgacttccccggatgatctggactttcgcttacacattaggaatgaatttatgagatgcggactgaaagaaatcctaccaaatttaaaatgcatcaagaatgacggactggatatccagttaaaggtttttgatgaacataaggaggaggatctctttgagctcagccaccggttagaggacataagagccgaactggatgaagcatacgatgtgtacaatatggtatggtcaaccgtgaaggaaactcgagcagaaggatactttatcagtatcctccagcacctactgctgatccgtaatgattacttcattaggcaacagtattttaaacttatcgatgagtgcgtgtcccagatagtgctccatcgagacggcatggatcctgattttacatatcgcaaaagactggacctggaccttacccagtttgtggacatttgcattgaccaagcgaagctggaggagtttgaggagaaagcaagtgagctttacaaaaaatttgagaaagagttcactgatcaccaggaaacacaggccgagcttcaaaagaaagaagccaagattaatgaactgcaggccgagctgcaggccttcaaaagtcagtttggtgcccttccagctgattgcaacatccccttgcctccctctaaagagggaggcacaggtcattccgcccttccccccccgccacctctgccgtccggtggcggtgtacctcccccgcctccaccacccccccctcctcccctacccgggatgcggatgccgttctccggccccgtgccccctcccccccccctcggatttctcgggggccagaatagtcctccactccccattttaccttttggcttgaaacctaaaaaagaattcaagccagagatttcaatgcggagactgaactggctgaagataaggccccatgaaatgaccgagaactgcttttggattaaggtgaacgagaataagtacgaaaatgtggatttgctttgcaagctggagaacaccttttgctgtcagcagaaggagcgtcgggaggaagaggacatagaagagaagaagtccatcaaaaagaagatcaaggaactgaaattcctggattctaagatagctcaaaatctgagtatttttctgtcatcttttagagtgccttacgaggagatccggatgatgattctggaggtcgatgagacgcgactggcggaatccatgattcagaacctcattaagcatctgccagaccaggaacagctgaacagtctgtctcagtttaagtctgagtactcaaatttgtgtgaacccgagcagtttgtggtggtcatgagcaacgtgaagaggctgcgacctcgtctgagtgcaattttatttaagcttcagtttgaggaacaagtgaataatatcaagcctgacataatggccgtatccaccgcttgtgaagagatcaagaaaagtaagtcgttttctaagcttctggaactggttctcctaatgggcaattacatgaacgcggggtccagaaatgcacagaccttcggatttaacctgtcctccctctgtaagctgaaagacacgaagagcgctgatcaaaagacgacactgctgcacttcctggttgaaatttgcgaggaaaagtatcccgacatcctcaattttgtggatgatctcgaaccccttgataaggcctcaaaggtgagtgtggaaacattagaaaaaaacctgaggcaaatggggagacagcttcagcaattagagaaggaacttgaaactttccccccccctgaggacctgcatgacaaatttgtgaccaagatgtcaattttcgtgatttccgcaaaagagcagtatgaaacattgtctaaactgcatgaaaacatggagaagctctatcaatcaatcataggttactacgccatagatgtcaaaaaagttagcgtcgaggactttcttacagaccttaacaattttcggaccacctttatgaaggccattaagttccagatctag

SEQ ID NO: 93028 - DNA, 3339 bp, Artificial Sequence
  derived and/or modified sequence
atggagcggcaccagccccggctgcaccaccccgcccagggcagcgctgcaggcactccataccccagtagtgcctctctgagaggttgccgcgagtctaagatgccccggcgaaagggacctcagcaccctcccccaccatccggaccggaggaacccggcgagaagcgcccaaagtttcatctgaatattcgcactctgaccgacgatatgctggataaatttgctagcataaggattccagggtcaaagaaagaacgcccacctttgccaaatctcaaaaccgcttttgctagcagtgactgcagtgccgcaccgctggaaatgatggaaaatttccctaaaccgctctccgagaatgagctgctggagttgttcgaaaagatgatggaggacatgaacctaaacgaggataagaaggctcctcttagagaaaaggattttagcatcaagaaagagatggtcatgcaatacatcaatacagcgagcaagacgggcagtctaaagcggtctcggcagataagccctcaggagtttattcacgagttgaagatgggttctgcggacgagcggctggtgacctgtttagagtccttacgggtctctctgacgagtaatcctgtgagttgggtggagtccttcggccacgagggtctcgggctgctgttagacattctggagaaactgatctccgggaagatccaagagaaggtagtgaagaaaaatcaacataaggtgatccaatgtctcaaagctctaatgaacacccagtacggcctggaaagaatcatgagcgaggagagaagcctttcactgttagcaaaagcagtggatcctcggcaccccaacatgatgacagacgtagtcaaacttcttagcgccgtgtgcatagttggagaggagtcaatcctcgaagaggtgcttgaggctctgacatcggccggagaagagaagaagatcgataggttcttttgcatcgttgaagggttaagacataattcggtccagctgcaggtagcgtgcatgcaactgatcaacgcgttagtgacgtccccggatgacctggacttcagactgcatattagaaacgagttcatgcgatgcgggcttaaagaaatactgcccaatcttaaatgtatcaaaaacgacgggctggacattcaacttaaagttttcgacgaacacaaggaagaggacctgttcgaacttagccatcgactagaggatattagggccgaattagatgaagcatatgacgtatacaatatggtgtggagtacggtgaaggaaacgcgcgctgaaggttacttcatcagcattcttcaacacttgttactcatacgaaacgactatttcatccgtcaacagtacttcaagctcatcgatgagtgtgtttcacagatcgtgctccaccgagatggcatggaccctgatttcacctaccggaaaagactggatttagatcttacacagttcgttgatatctgcattgaccaggctaaactggaggagtttgaggaaaaggcttcagagctctataagaaattcgagaaagagtttacggaccaccaggagacccaggcagagctgcaaaagaaggaggccaagatcaatgagttgcaggccgaactccaagccttcaaatcccagttcggggcactacctgccgactgcaacattcccctgcctccgtccaaagaggggggcacaggacattcagcactccctcctcctccaccccttccctcgggcgggggagtacctccaccgcccccccccccaccaccccccccactaccaggtatgagaatgcccttctcaggacctgtcccaccaccaccccctttgggatttcttgggggacaaaacagccctccgctgcctattcttccattcggtttgaaaccaaagaaagagttcaagcctgagatatctatgcgtcgactgaattggctgaaaattcggccccacgagatgaccgagaactgcttttggattaaggtgaatgagaacaagtacgagaacgttgatctgctctgtaagctggaaaacacgttctgttgtcagcagaaagagcgcagggaggaggaagatattgaggagaaaaaatcgattaagaaaaagattaaagagttgaaatttctggacagcaaaatcgcccaaaacctgtcgatattcctgagttcctttagggtgccgtacgaagaaattcgcatgatgatcctggaagtcgacgaaacgcggcttgcggagtccatgatacagaatctgatcaaacatctccccgaccaggagcagctgaacagcctgtcacagttcaaaagcgagtattcaaacctctgtgagcctgagcagttcgtggttgttatgtcgaacgtcaagaggttgaggccacggcttagcgccatcctgtttaagctgcagtttgaagagcaggtgaacaacatcaagccagatatcatggctgtaagtactgcatgcgaggaaattaagaagagcaagtccttctccaagctcctggaacttgtgctgttgatgggcaactatatgaatgctgggagtagaaacgctcagacattcggttttaatttaagtagcctctgtaaattgaaagataccaagagcgcggaccaaaagacgacgttgttgcacttcctggtagagatctgtgaggagaagtacccagatatcctgaactttgtagatgacttagagccccttgataaagcaagtaaggtctcggtcgagacgctggagaagaacctgagacagatgggaagacagcttcaacagctggagaaggaactggagacgtttcctccacctgaagacctccacgataaattcgtgacaaaaatgtctcgctttgtaatcagcgccaaggagcagtacgagaccctgtctaaattgcatgagaacatggagaaactgtatcagtcaatcatcggttattacgcaattgatgtgaaaaaggtgtcggtggaggacttcctaacagacttaaataacttccgtaccacgttcatgcaggccattaaggaaaacattaagaaacgcgaggcagaagagaaagaaaaaagagtccgaatagcaaaggaactcgccgaaagagaacggttggaacgtcagcagaagaagaaacgccttctggaaatgaaaaccgaaggtgacgagactggagtgatggacaacttactggaggccctccagtcaggagccgcctttcgagaccggcgcaaaaggacacctatgcctaaggacgttcggcagtcactgtcgcctatgtcccagcgcccagtgcttaaggtgtgtaatcatgggaacaaaccgtacctgtag

SEQ ID NO: 93029 - DNA, 2550 bp, Artificial Sequence
  derived and/or modified sequence
atgagtgaggaaagatccctgagtctcctggcgaaggcagtagatcctcgacacccgaacatgatgaccgacgtggttaagctcttatccgctgtgtgcatagtgggcgaagagtcaatcctagaggaggtgcttgaggctctgacctcagcaggtgaagaaaaaaagatcgaccggtttttttgcattgttgaggggctgaggcacaacagcgtccaattgcaggttgcctgcatgcagctgatcaacgccttggtgaccagcccagacgacctggactttcgtcttcacatcagaaatgaatttatgcgctgcggcctgaaggagattctcccaaaccttaagtgtattaagaatgatggcttggacatccagttgaaagtctttgatgaacacaaggaagaggacttgttcgaactgtcccataggctggaggatattcgagcggaactggatgaggcctacgatgtttataacatggtgtggtccacagtcaaggagacaagggctgagggatatttcatttcgattctccagcatttactcctgatcagaaacgactatttcattagacagcagtactttaaactaatcgacgaatgtgtgtcacagatcgtgcttcaccgggatgggatggatcccgacttcacatacagaaaacgcctcgatcttgacctgacacagtttgtcgatatttgcatcgaccaggccaaactggaggaattcgaggaaaaggcctccgagctctataaaaaattcgagaaagaatttacagatcatcaggagacccaggctgaattgcagaagaaggaggccaaaatcaacgaactccaggccgagcttcaggcgttcaagtcccaatttggggctttgcctgccgattgtaatatcccgcttcctcctagtaaggagggcggtaccggccactccgccctgccgccacctccaccactgcctagcggtggaggagttccacctcccccaccccctcctcctcctccgccactacctggcatgagaatgcctttttccggccctgtacccccaccgccacctctagggtttttagggggacaaaactcaccacccctacctatactgccattcgggctgaaacctaaaaaggagttcaagcccgaaatctcaatgaggagactgaactggctgaagatccgcccacacgagatgaccgagaattgcttttggattaaagttaatgaaaacaagtatgaaaacgttgatctgctatgcaaacttgaaaacactttttgttgtcagcagaaggaaaggagagaggaagaagacatcgaggagaagaaatcaatcaagaagaagatcaaagagttgaagttcttggacagcaagattgctcagaacttatctatctttctgtcatccttccgtgttccctacgaagagatccgcatgatgatactagaagtggacgagactagattggccgagtcaatgattcagaatctgattaagcatctcccagaccaggagcagctcaactccttgagtcagtttaagagtgaatattcgaacctttgtgaacccgagcaattcgtagtggtcatgagcaacgtgaagcgcctccgaccgaggctctctgccattctcttcaagttgcagtttgaagagcaggtgaacaacattaagccagacatcatggccgtgagcaccgcttgcgaggaaatcaagaagtctaagagcttctccaagttgctcgagctggtcctgctgatgggcaactacatgaatgccggtagtcggaacgctcaaaccttcggcttcaacctcagttctctctgcaaactgaaagacacaaagagcgccgatcagaagacaaccttgctgcacttcctggtcgagatttgcgaagaaaaatacccggacatcctgaactttgtagacgatctggaacctctggacaaggctagcaaggttagtgtggaaacactggaaaagaacctgaggcagatgggaagacagcttcagcaactcgaaaaggagctagagaccttcccacccccagaggacttgcacgacaaatttgtgaccaaaatgagcatcttcgttatctctgctaaagagcaatacgagaccttatccaagctccacgaaaatatggagaagttataccagtcaatcattggctactacgctatcgacgttaagaaggtaagcgtggaggatttcctaacagatctgaacaattttaggactacattcatgcaagccatcaaggagaatattaaaaagagggaagctgaggagaaagagaagagggtgcggatcgctaaagaactggcggagcgggagagattggagcgacagcagaagaaaaagagactgctggaaatgaagacagaaggtgacgaaaccggagttatggataatctcctggaagctttacagagcggtgccgcatttagggaccgcagaaaacgcacacctatgcccaaggatgtgcgccagtccctttctccaatgagccaaaggcctgttctgaaagtgtgtaaccacggtaacaagccttacctgtag

SEQ ID NO: 93030 - DNA, 3051 bp, Artificial Sequence
  derived and/or modified sequence
atggagagacaccagccacggctgcaccatccggctcagggaagcgccgcaggcacgccttacccgagcagcgcatccctacgtggctgtagagagagcaaaatgcctcggagaaagggtccacagcatccccctcctccttcagggcctgaagagccgggagaaaaaaggcctaaatttcacctcaatatcaggaccctgaccgacgatatgttggacaagtttgctagtatacgtattcccggttccaagaaagagagaccacctctgccaaacctcaagacagcgttcgcctcttcagattgctcagccgctcccctcgaaatgatggagaatttcccaaaaccgctgtcagagaacgaactgctcgaattattcgaaaaaatgatggaggacatgaatctgaacgaagacaagaaggccccactaagggaaaaggatttctccattaagaaggagatggtgatgcagtatattaatacagccagtaaaacagggtcactcaagcgcagtaggcagatctcccctcaagaattcatccacgagcttaagatggggagtgcagacgagcgactggtcacttgcctggaaagtctcagggtcagtctaacatctaatccggtttcgtgggttgaatccttcggtcacgaaggcttgggtctgctccttgatattctagagaagctgattagtggcaagattcaagaaaaagtggtgaagaaaaatcagcacaaggtgatccagtgcctgaaagcactgatgaacacacagtacgggctggaaaggatcatgtctgaggagagatctctgtcattgcttgcaaaggctgtggatcctaggcatccaaacatgatgactgatgtggtaaaactcctctccgctgtttgtatcgttggagaagaaagtattctggaggaggtactggaagccttaacttccgccggagaggaaaaaaagatcgataggttcttctgtatcgttgaagggttgcggcataacagtgtgcagttacaggtcgcctgcatgcaactaatcaatgctctggtcaccagcccagacgacttagactttcggctacacatccgcaatgagttcatgcgctgcggattgaaggaaattctgcctaatttgaagtgtatcaaaaacgacggcttagacatccagttgaaggtatttgatgaacataaagaggaagacctgttcgagttgagccatcgtttggaggatatccgcgcagaactagatgaagcttacgacgtgtataacatggtttggagtaccgtcaaggagactcgtgcagagggctacttcatctcaatccttcagcatctgctgctgattcgtaatgattactttatcaggcaacagtactttaagttgatagacgagtgcgtttcacaaatcgtgttgcatagagacgggatggaccccgatttcacttatagaaaacgccttgaccttgatctgacgcagttcgtcgacatctgtattgatcaggcaaagcttgaggagttcgaggagaaagctagtgaattatataagaagtttgaaaaagaattcaccgaccatcaagagacgcaggctgaattgcaaaaaaaagaagctaagatcaacgaactccaggcagaattgcaggcgttcaagtctcagtttggggctctacccgctgattgtaatattccgctgcccccttctaaagaaggtgggacaggtcactctgctctgccccctccacctcctctgccttcagggggtggcgtcccgcctcctcctccccctccgccaccgccaccgttgcctggtatgaggatgcccttctcaggcccagttcctcctccacctccactggggtttctcggaggtcagaattcacccccacttcccatactgccgttcggcctcaaacctaaaaaggagtttaaacctgagatctcaatgcgcagactaaactggctaaagattaggcctcacgagatgacagaaaactgcttctggatcaaggtaaacgagaataaatacgagaatgtggatctgctctgcaagttggagaatacattctgttgccagcagaaggagcgcagggaggaggaggacatcgaggagaagaagtctattaagaagaaaatcaaggaactgaaatttctggacagcaagatagcccagaacctgtccatttttttatcctcttttcgggtgccgtacgaggagattcggatgatgattttggaggttgatgaaacccgcctggcggagtctatgattcagaacctgataaagcatttaccggaccaagaacagcttaattccctgtcccaatttaagtcagaatattccaacctgtgcgagcctgagcagtttgtggtcgtgatgagtaacgttaagcggctgaggccacgcctcagcgcgatcttgtttaagttacaattcgaagagcaggtcaataatataaaaccggacattatggctgtatctactgcttgcgaagagataaaaaagagtaaaagcttctccaaactcctggagctcgtgctattaatgggcaactacatgaatgccggaagcagaaatgcacagacatttgggtttaacctgtccagcctatgcaagttgaaggatactaagtcagcagaccagaagacaacacttttgcattttctcgtggagatctgtgaggagaaatatcccgacatcctcaattttgtcgacgacctggaaccccttgataaagcctcaaaggtctccgtggagacgcttgaaaagaacctgagacaaatgggccgacagctgcagcaacttgagaaggagctggaaacttttcccccacctgaggatctgcatgacaagtttgttacaaagatgagcatcttcgtgatctctgcaaaggagcagtacgagacgttatctaagctgcatgagaacatggaaaaattgtatcagtcaattatcgggtattatgcgatcgacgtgaagaaggtgtccgtggaggactttttaaccgacttgaacaattttcgcacaactttcatgaaagcaattaaatttcaaatatag

SEQ ID NO: 93031 - DNA, 3339 bp, Artificial Sequence
  derived and/or modified sequence
atggagaggcaccaacccagattacaccacccagctcagggtagcgctgccggaaccccatacccgagctcggccagtttacggggatgccgagagtctaaaatgccacgacgcaagggtccacaacaccctcctccacccagtggccctgaggaaccaggggagaaacgcccaaagtttcatctgaacatccgtaccctgactgacgatatgctcgataagttcgccagcatcagaatcccgggttctaagaaggaacgtccccctcttcccaacttaaagacagcattcgcttctagtgactgctcagctgcgcctttggagatgatggaaaacttccccaagcccttgtccgagaatgagttgcttgagctattcgaaaaaatgatggaggacatgaatctgaacgaggacaagaaggcacccttaagggagaaagattttagtatcaaaaaggagatggtgatgcaatacatcaatacggcttctaagacgggtagcctcaagagatctagacagatttctccgcaagagttcatccacgaattgaagatgggatccgccgatgagcgcttggtgacatgtctggagtctttgcgagtgtcactgacttcaaacccggtcagttgggttgagagcttcggtcacgaaggcctcggacttctgctggacatccttgaaaaactaatctctggaaagattcaggaaaaagttgtgaagaaaaaccagcataaggtgatccagtgcctgaaggccctgatgaatactcagtatgggctggaaagaataatgtcagaagagagaagcctgagcctcttagccaaggccgtggacccgagacaccccaatatgatgactgacgtagtcaagctgctttccgcggtctgtatagtgggagaggagtcaattctggaggaggtcctggaggccctaactagcgctggagaagaaaagaagatcgaccgtttcttctgtatcgtggaaggcctacggcacaatagcgtacagctccaagtcgcctgcatgcagttaataaatgctctcgtcacatccccggacgatcttgatttccggttgcacattcggaatgaatttatgcggtgcggcctgaaggagattctgcccaaccttaaatgtataaagaacgacggcctggatatccagctgaaggtttttgacgaacacaaggaggaggacctgtttgagttgtcccaccgtctcgaggacatccgcgctgagttggatgaagcgtacgacgtatataatatggtctggtccacagtcaaagaaacacgcgcagagggatacttcatctctatactccagcacctgcttcttatccggaacgactattttatacggcagcagtatttcaagttgattgacgagtgtgtgtcacagatcgtgctacaccgtgacggcatggaccccgacttcacgtatagaaagaggttggatttggatcttactcagttcgtggatatctgtatagatcaggctaagctggaggaattcgaagagaaggccagcgaactttacaaaaagttcgaaaaagagtttaccgaccaccaagaaacacaagccgagctgcagaagaaagaagccaagatcaatgagttgcaagctgaactgcaagcattcaagagtcagttcggagcccttccggcagactgcaacatccccttacctccctcaaaggagggcggaacgggacatagtgcattgcctccgccacctcctctgccttccggcggaggcgtgccgccacccccaccaccaccccctcctccaccactccccggaatgcggatgcccttcagcggaccggtgcctccacccccaccacttggcttcttgggtggccagaactctcctccactccccatactcccttttggcttaaaaccaaaaaaggaattcaagcctgagatttctatgcgaagactcaattggctcaagattcggcctcatgaaatgactgaaaattgtttttggatcaaagtgaatgagaataaatacgagaacgttgacctgctgtgtaagcttgaaaataccttctgctgccagcagaaagaaaggagggaagaggaagatatcgaggaaaagaagtcaatcaagaagaagatcaaagaactcaagttcttggacagcaagattgcgcaaaatctgtcaatcttcctgtcctcttttcgagttccttatgaagaaattcggatgatgatcctcgaggtagatgagacccgtttagccgaatcgatgattcaaaacctgatcaaacatctgccagaccaggagcagctcaacagtcttagccagttcaagtctgaatactctaatctgtgtgaacctgagcagttcgtggttgtgatgagcaatgttaagcgtctacggcctcggctctctgcaattctatttaagctccaattcgaggaacaggtcaacaacatcaaacccgatattatggccgtctctactgcctgtgaagaaatcaaaaagtcaaaatcattctctaaacttttggaactcgtcctgctgatgggtaactacatgaacgcaggatcacggaatgcccagactttcggcttcaatctgtccagcctgtgcaagctgaaagacactaagagtgcagatcagaagaccaccctgctgcattttcttgtagagatatgcgaggagaaataccctgatattttgaatttcgtcgatgatcttgaaccccttgacaaagcttctaaagtgtccgtggaaaccctggaaaaaaatctaaggcaaatgggcagacaactgcagcaactagaaaaagagctcgaaaccttcccgcctccagaggaccttcatgacaagtttgtcactaaaatgagtcgattcgtgatctctgccaaagagcaatatgagaccctctccaagctccatgaaaacatggaaaaactttaccagtccataattgggtactatgccatcgatgtcaaaaaagtgagcgtggaagatttcttaactgacctgaataactttagaactacctttatgcaggccatcaaggaaaacataaagaaaagagaagccgaggagaaggaaaagcgtgtgcgaattgcgaaagaactggccgaaagggagagactggaaagacaacagaagaagaagcggctgctggagatgaagaccgagggcgatgagaccggagtgatggataatttactggaggcactgcagagcggggcagctttcagggataggcgcaaaaggacgcccatgcctaaggacgtgcgccaaagcttgagccccatgtctcagcgaccagttttgaaggtttgtaaccacggtaataagccttacctgtag

SEQ ID NO: 93032 - protein, 943 aa, Artificial Sequence
  derived and/or modified sequence
MGIGLCVPPARCWKRLTRSSRGQPLERPAATIIIGLSIVERSKQTQRGPVDFSRSHSAPAAEQECKPRISAARSTPAPPSPAVPGFRTTPCQTFTAWCNSHLRKAGTQIENIEEDFRNGLKLMLLLEVISGERLPRPDKGKMRFHKIANVNKALDFIASKGVKLVSIGAEEIVDGNLKMTLGMIWTIILRFAIQDISVEETSAKEGLLLWCQRKTAPYRNVNVQNFHTSWKDGLALCALIHRHRPDLIDYAKLRKDDPIGNLNTAFEVAEKYLDIPKMLDAEDIVNTPKPDEKAIMTYVSCFYHAFAGAEQAETAANRICKVLAVNQENEKLMEEYEKLASELLEWIRRTVPWLENRVGEPSMSAMQRKLEDFRDYRRLHKPPRIQEKCQLEINFNTLQTKLRLSHRPAFMPSEGKLVSDIANAWRGLEQVEKGYEDWLLSEIRRLQRLQHLAEKFRQKASLHEAWTRGKEEMLSQRDYDSALLQEVRALLRRHEAFESDLAAHQDRVEHIAALAQELNELDYHEAASVNSRCQAICDQWDNLGTLTQKRRDALERMEKLLETIDRLQLEFARRAAPFNNWLDGAVEDLQDVWLVHSVEETQSLLTAHDQFKATLPEADERGAIMGIQGEIQKICQTYGLRPCSTNPYITLSPQDINTKWDMVRKLVPSCDQTLQEELARQQVNERLRRQFAAQANAIGPWIQAKVEEVGRLAAGLAGSLEEQMAGLRQQEQNIINYKTNIDRLEGDHQLLQESLVFDNKHTVYSMEHIRVGWEQLLTSIARTINEVENQVLTRDAKGLSQEQLNEFRASFNHFDRKQNGMMEPDDFRACLISMGYDLGEVEFARIMTMVDPNAAGVVTFQAFIDFMTRETAETDTTEQVVASFKILAGDKNYITPEELRRELPAKQAEYCIRRMVPYKGSGAPAGALDYVAFSSALYGESDL

SEQ ID NO: 93033 - DNA, 3084 bp, Artificial Sequence
  derived and/or modified sequence
aatagccctgccgcagcccatccagctggctcagagccgttccccatgcccgggtgtctccatcaccccagaaaacatgcaaaacagctcggcgcctctgtgttcctgactgtgaaatggggatagggctctgtgtcccaccagcgaggtgctggaagaggctcacgaggagctccagagggcagcctctagagcggcccgcggccactattattatcggcctttctattgtggagaggagtaaacagactcagagaggtcccgtggatttctcaaggtcacacagcgccccagcagcggagcaggaatgcaaacccaggatctccgccgcgagatccaccccggcgcccccgagtcccgcagttcccggcttcaggacaaccccttgccagaccttcactgcctggtgcaactcacacctgcgcaaggcaggcacccagatcgagaacatcgaggaagatttccgcaatggcctcaaactcatgctgctcctggaggtcatttcaggtgagaggctgcctaggccagataaaggcaagatgcgcttccacaaaatcgccaacgttaacaaggccctggacttcattgccagcaagggggttaaactggtgtccattggtgctgaagagattgttgacgggaacctgaagatgaccctgggcatgatctggaccatcatccttcgcttcgccatccaggacatctctgtggaagaaacctcagccaaggaaggcttgcttctgtggtgccagaggaagacagcaccgtaccgcaacgtcaacgtgcagaacttccacaccagctggaaggatggcctggccctctgtgccctcatccaccgacaccgccctgacctcatcgactacgccaaactgcgaaaggatgaccccatcggaaacctgaacactgcctttgaggtggcagagaaatacctggacatccccaagatgttggatgcagaagacattgtgaacaccccaaagccggatgagaaggccatcatgacctatgtgtcctgcttctaccatgcctttgccggggctgagcaggcagagacagctgccaacaggatctgcaaggtgctggcagtgaaccaggaaaacgagaagctgatggaggagtatgagaagcttgccagtgagctgctggagtggatccgccgcactgtcccatggctggagaaccgtgtgggtgagcccagcatgagtgccatgcagcgcaaactagaggactttcgggactaccggcgtctgcacaagccgccccgcattcaggaaaagtgccagctggagatcaacttcaacacactgcagaccaagttgcggctcagccaccggcctgccttcatgccctccgagggcaagctggtctcggacatcgccaacgcctggcgggggctggagcaggtggaaaagggctatgaggactggctgctctcggagatccggcgcctgcagcgactccagcacctggctgagaagttccggcagaaggcctccctgcacgaagcctggacccggggaaaggaggagatgctgagccagcgcgactacgattcggctttgctacaggaggtgcgggcgttgctgcggcgccacgaggcctttgagagcgacctggcggcgcaccaggaccgcgtggagcacattgccgcgctggcccaggagctcaatgagctggactaccacgaggcagcctcagtgaatagccgctgccaggccatctgcgatcagtgggacaacctgggcaccctgacccagaagaggcgggatgcgctagagcggatggagaagctcctggagaccattgaccggctgcaactggagtttgcccggcgggccgcgcccttcaacaactggctggatggtgccgtggaggacctgcaggacgtgtggctggtacactctgtggaggagacccagagcctgctgacagcgcacgatcagttcaaggcaacactgcccgaggctgactgagagcgaggtgccatcatgggcatccagggtgagatccagaagatctgccagacgtatgggctgcggccctgctccaccaatccctacatcaccctcagcccgcaggacatcaacaccaagtgggatatggtccgaaagctggtgcccagctgtgaccagacactgcaggaggagctggcacggcagcaggtaaacgagaggctccggcgacagtttgcggcccaggccaatgccattggaccctggatccaggcgaaggtggaggaagtggggcggctggcagcagggctagctggctctctggaggagcagatggctgggctacggcagcaggagcagaacattatcaactacaagactaacattgaccggctggagggtgaccaccagctgctgcaggagagcctggtgttcgacaataagcacaccgtctacagcatggagcacatccgcgtgggctgggagcagctgctcacctccattgcccgcaccatcaatgaagtggagaaccaggtactgacccgagacgccaagggactgagccaggagcagctcaacgagttccgagcatccttcaaccactttgacaggaagcagaatgggatgatggagcctgatgacttccgagcttgcctcatctccatgggctatgacctgggggaagtggagtttgctcgcatcatgaccatggtggaccccaacgcagctggggtggtgaccttccaggccttcatagacttcatgacccgagagacagccgagactgacacgactgagcaagttgtagcttccttcaagatcttggcaggagacaagaactacatcacccccgaggagctgcggcgcgagctccctgccaagcaggccgagtactgcatccgccgtatggtgccctacaagggatccggggccccggctggagccctggactacgtggccttctccagtgccctctatggggagagcgacctttgaccccaaccactgaggttctctatgcaagatggagagaggatgcaccctgtggctgatcccatccgtccctcggagcaagggcctaagagaaaagccagccaagtgcttctgaataaagatccctctctgggtc

SEQ ID NO: 93034 - DNA, 704 bp, Artificial Sequence
  derived and/or modified sequence
gcgaagccaggagcccgatcgagatgatgatggttatgcagcccgagggtctgggggccggggaggggcgctttgcgggcggcggcgggggcggcgagtacatggaacaggaggaggactgggaccgcgacctgctgctggacccggcctgggagaagcagcagcggaaagaaaacgaaagctcagagagggaaagggactggcccaggatgcacagcaagtcagtggctgagctgagctgagacttgaatccagaaatacaaggctctgagacctaccctgactgaggagacaggactgtgccctacatcccccagagccagtcgtagggtttgagtgctgtcctctgcccctagaccttcactgcctggtgcaactcacacctgcgcaaggcaggcacccagatcgagaacatcgaggaagatttccgcaatggcctcaaactcatgctgctcctggaggtcatttcaggtgagaggctgcctaggccagataaaggcaagatgcgcttccacaaaatcgccaacgttaacaaggccctggacttcattgccagcaagggggttaaactggtgtccattggtgctgaagagattgttgacgggaacctgaagatgaccctgggcatgatctggaccatcatccttcgcttcgccatccaggacatctctgtggaagaaacctcagccaaggaaggcttgctt

SEQ ID NO: 93035 - protein, 786 aa, Artificial Sequence
  derived and/or modified sequence
MLGARAWLGRVLLLPRAGAGLAASRRGSSSRDKDRSATVSSSVPMPAGGKGSHPSSTPQRVPNRLIHEKSPYLLQHAYNPVDWYPWGQEAFDKARKENKPIFLSVGYSTCHWCHMMEEESFQNEEIGRLLSEDFVSVKVDREERPDVDKVYMTFVQATSSGGGWPMNVWLTPNLQPFVGGTYFPPEDGLTRVGFRTVLLRIREQWKQNKNTLLENSQRVTTALLARSEISVGDRQLPPSAATVNNRCFQQLDEGYDEEYGGFAEAPKFPTPVILSFLFSYWLSHRLTQDGSRAQQMALHTLKMMANGGIRDHVGQGFHRYSTDRQWHVPHFEKMLYDQAQLAVAYSQAFQLSGDEFYSDVAKGILQYVARSLSHRSGGFYSAEDADSPPERGQRPKEGAYYVWTVKEVQQLLPEPVLGATEPLTSGQLLMKHYGLTEAGNISPSQDPKGELQGQNVLTVRYSLELTAARFGLDVEAVRTLLNSGLEKLFQARKHRPKPHLDSKMLAAWNGLMVSGYAVTGAVLGQDRLINYATNGAKFLKRHMFDVASGRLMRTCYTGPGGTVEHSNPPCWGFLEDYAFVVRGLLDLYEASQESAWLEWALRLQDTQDKLFWDSQGGGYFCSEAELGAGLPLRLKDDQDGAEPSANSVSAHNLLRLHGFTGHKDWMDKCVCLLTAFSERMRRVPVALPEMVRALSAQQQTLKQIVICGDRQAKDTKALVQCVHSVYIPNKVLILADGDPSSFLSRQLPFLSTLRRLEDQATAYVCENQACSVPITDPCELRKLLHP

SEQ ID NO: 93036 - protein, 742 aa, Artificial Sequence
  derived and/or modified sequence
MPAGGKGSHPSSTPQRVPNRLIHEKSPYLLQHAYNPVDWYPWGQEAFDKARKENKPIFLSVGYSTCHWCHMMEEESFQNEEIGRLLSEDFVSVKVDREERPDVDKVYMTFVQATSSGGGWPMNVWLTPNLQPFVGGTYFPPEDGLTRVGFRTVLLRIREQWKQNKNTLLENSQRVTTALLARSEISVGDRQLPPSAATVNNRCFQQLDEGYDEEYGGFAEAPKFPTPVILSFLFSYWLSHRLTQDGSRAQQMALHTLKMMANGGIRDHVGQGFHRYSTDRQWHVPHFEKMLYDQAQLAVAYSQAFQLSGDEFYSDVAKGILQYVARSLSHRSGGFYSAEDADSPPERGQRPKEGAYYVWTVKEVQQLLPEPVLGATEPLTSGQLLMKHYGLTEAGNISPSQDPKGELQGQNVLTVRYSLELTAARFGLDVEAVRTLLNSGLEKLFQARKHRPKPHLDSKMLAAWNGLMVSGYAVTGAVLGQDRLINYATNGAKFLKRHMFDVASGRLMRTCYTGPGGTVEHSNPPCWGFLEDYAFVVRGLLDLYEASQESAWLEWALRLQDTQDKLFWDSQGGGYFCSEAELGAGLPLRLKDDQDGAEPSANSVSAHNLLRLHGFTGHKDWMDKCVCLLTAFSERMRRVPVALPEMVRALSAQQQTLKQIVICGDRQAKDTKALVQCVHSVYIPNKVLILADGDPSSFLSRQLPFLSTLRRLEDQATAYVCENQACSVPITDPCELRKLLHP

SEQ ID NO: 93037 - protein, 75 aa, Artificial Sequence
  derived and/or modified sequence
GQGHQGPGQCVHSVYIPNKVLILADGDPSSFLSRQLPFLSTLRRLEDQATAYVCENQACSVPITDPCELRKLLHP

SEQ ID NO: 93038 - protein, 43 aa, Artificial Sequence
  derived and/or modified sequence
MLGARAWLGRVLLLPRAGAGLAASRRSACSPTSRLNSLRSLIP

SEQ ID NO: 93039 - DNA, 2361 bp, Artificial Sequence
  derived and/or modified sequence
atgctgggcgccagagcctggctgggcagagtgctgctgctgcccagagccggcgccggcctggccgccagcagaagaggcagcagcagcagagacaaggacagaagcgccaccgtgagcagcagcgtgcccatgcccgccggcggcaagggcagccaccccagcagcaccccccagagagtgcccaacagactgatccacgagaagagcccctacctgctgcagcacgcctacaaccccgtggactggtacccctggggccaggaggccttcgacaaggccagaaaggagaacaagcccatcttcctgagcgtgggctacagcacctgccactggtgccacatgatggaggaggagagcttccagaacgaggagatcggcagactgctgagcgaggacttcgtgagcgtgaaggtggacagagaggagagacccgacgtggacaaggtgtacatgaccttcgtgcaggccaccagcagcggcggcggctggcccatgaacgtgtggctgacccccaacctgcagcccttcgtgggcggcacctacttcccccccgaggacggcctgaccagagtgggcttcagaaccgtgctgctgagaatcagagagcagtggaagcagaacaagaacaccctgctggagaacagccagagagtgaccaccgccctgctggccagaagcgagatcagcgtgggcgacagacagctgccccccagcgccgccaccgtgaacaacagatgcttccagcagctggacgagggctacgacgaggagtacggcggcttcgccgaggcccccaagttccccacccccgtgatcctgagcttcctgttcagctactggctgagccacagactgacccaggacggcagcagagcccagcagatggccctgcacaccctgaagatgatggccaacggcggcatcagagaccacgtgggccagggcttccacagatacagcaccgacagacagtggcacgtgccccacttcgagaagatgctgtacgaccaggcccagctggccgtggcctacagccaggccttccagctgagcggcgacgagttctacagcgacgtggccaagggcatcctgcagtacgtggccagaagcctgagccacagaagcggcggcttctacagcgccgaggacgccgacagcccccccgagagaggccagagacccaaggagggcgcctactacgtgtggaccgtgaaggaggtgcagcagctgctgcccgagcccgtgctgggcgccaccgagcccctgaccagcggccagctgctgatgaagcactacggcctgaccgaggccggcaacatcagccccagccaggaccccaagggcgagctgcagggccagaacgtgctgaccgtgagatacagcctggagctgaccgccgccagattcggcctggacgtggaggccgtgagaaccctgctgaacagcggcctggagaagctgttccaggccagaaagcacagacccaagccccacctggacagcaagatgctggccgcctggaacggcctgatggtgagcggctacgccgtgaccggcgccgtgctgggccaggacagactgatcaactacgccaccaacggcgccaagttcctgaagagacacatgttcgacgtggccagcggcagactgatgagaacctgctacaccggccccggcggcaccgtggagcacagcaaccccccctgctggggcttcctggaggactacgccttcgtggtgagaggcctgctggacctgtacgaggccagccaggagagcgcctggctggagtgggccctgagactgcaggacacccaggacaagctgttctgggacagccagggcggcggctacttctgcagcgaggccgagctgggcgccggcctgcccctgagactgaaggacgaccaggacggcgccgagcccagcgccaacagcgtgagcgcccacaacctgctgagactgcacggcttcaccggccacaaggactggatggacaagtgcgtgtgcctgctgaccgccttcagcgagagaatgagaagagtgcccgtggccctgcccgagatggtgagagccctgagcgcccagcagcagaccctgaagcagatcgtgatctgcggcgacagacaggccaaggacaccaaggccctggtgcagtgcgtgcacagcgtgtacatccccaacaaggtgctgatcctggccgacggcgaccccagcagcttcctgagcagacagctgcccttcctgagcaccctgagaagactggaggaccaggccaccgcctacgtgtgcgagaaccaggcctgcagcgtgcccatcaccgacccctgcgagctgagaaagctgctgcacccctag

SEQ ID NO: 93040 - DNA, 2361 bp, Artificial Sequence
  derived and/or modified sequence
atgctcggggccagggcatggttagggagagtcctgttgttgcctagggctggagccgggctggccgcttctcggcggggctcttcttctcgggacaaagaccgctccgcgacggtctcaagctccgtgcccatgcctgcaggaggaaagggcagccatccctcttctaccccgcagagagttcccaatcgactgatccacgagaagtccccttacttactgcagcacgcatacaacccagttgactggtatccatgggggcaggaagctttcgacaaagctaggaaggaaaataaacctatttttctgtccgtaggctactccacttgtcactggtgtcacatgatggaggaggagtcctttcaaaacgaggaaattggccgactgctgtctgaggacttcgtcagcgtcaaggtcgacagggaagagagacccgacgtggacaaggtgtatatgacctttgtacaggcaacgtcctcgggtggcggctggcccatgaatgtgtggcttacaccaaacttacagcccttcgtgggaggaacatactttcctcctgaggatggcttgacccgggtcggcttccggactgtgctgctcaggattcgcgaacagtggaagcagaataagaatactttactcgagaattcccaaagggtcacaaccgccctgcttgcacgatcagagatttctgtgggggataggcaattgcccccatctgccgccacggttaacaaccgctgttttcagcagctggacgaaggttatgacgaggagtatggaggattcgcggaggcgcccaaattcccaactcccgtgattctgtcctttctcttttcctattggctgtcccatcgattaacacaggatggttctcgggcgcagcaaatggccctacatacactcaagatgatggcaaacggaggcatcagggaccacgtcgggcaggggttccaccgttactcaacagaccggcagtggcacgtcccacactttgaaaagatgctgtacgaccaggcacagctcgccgttgcctactctcaggccttccaactgagcggggacgagttctatagcgacgtggcaaagggcatactgcagtatgtggcgcgtagtttgagtcaccgatcaggaggattttactcagctgaggacgcagattcgcccccggagcgagggcagcggcccaaggagggagcctattatgtgtggacagttaaggaagttcagcaattgctgccagagccggtattaggagccacggagcctctcacttctggtcagctgctaatgaaacactacggactaacagaggctggaaatattagcccatcgcaagatcctaagggagaattacagggacagaacgtccttactgttcgatattcccttgagctgacagctgccagattcgggctggatgtcgaggccgtgcgcacactgctgaattcaggacttgaaaagctcttccaggccaggaaacatcgacctaaacctcacctcgattccaagatgctcgccgcttggaacggactgatggtctccggctatgccgttaccggtgcagtgctcggccaggacaggctcatcaattacgcaaccaatggcgccaagtttctcaagaggcacatgtttgatgtcgcgagtggtaggctgatgcgtacctgctatacaggaccaggcggtactgtggaacatagcaatcctccatgctggggcttcctggaagactacgcatttgtagtccgcggtctgttagatctttacgaagccagtcaggaatccgcctggctggaatgggccctgcgtctccaggacacacaggataagttattttgggatagtcagggcggcgggtatttctgtagcgaagcagaactgggggccggcctgccattgcgcttgaaggatgatcaagatggcgcagagccaagcgctaattccgtatcagctcacaaccttctgcggttacacggtttcacaggccataaggattggatggacaaatgtgtgtgtctgctgactgctttcagtgaaagaatgagaagggtccctgtggcccttcccgagatggtgcgggctctgtctgcccagcagcaaacactaaaacaaatcgtgatctgcggcgatcgccaggctaaggataccaaggctctggtccagtgcgtgcattcagtgtacattccgaacaaggtgctcatactcgccgatggtgatccaagctcattcctgtctcgacagttaccattcctgtccaccttgagacgtctcgaagaccaggccaccgcgtatgtgtgcgagaaccaggcctgcagcgtcccgattaccgatccctgcgagctgaggaagttgttacacccatag

SEQ ID NO: 93041 - DNA, 2361 bp, Artificial Sequence
  derived and/or modified sequence
atgctgggcgcccgggcctggctgggccgggtgctgctgctgcccagggctggagctggcctggccgccagcagaagaggcagcagcagccgggacaaggacagaagtgccaccgtgagcagctctgtgcccatgcctgctgggggcaagggcagccaccccagcagcaccccccagagggtgcccaacagactcatccacgagaagagcccctacctgctgcagcacgcctacaaccctgtggactggtacccctggggccaggaggcctttgacaaggccaggaaagaaaacaagcccatcttcctgtctgtgggctacagcacctgccactggtgccacatgatggaggaggagagcttccagaatgaggagatcggccgcctgctgtctgaggactttgtgtctgtgaaggtggaccgggaggagaggccagatgtggacaaggtgtacatgacctttgtgcaggccaccagcagcggcggcggctggcccatgaatgtgtggctgacccccaacctgcagccctttgtgggcggcacctacttccccccagaagatggcctgaccagggtgggcttcagaacagtgctgctgcgcatccgggagcagtggaagcagaacaagaacaccctgctggagaacagccagagggtgaccacagccctgctggcccggtctgagatctctgtgggggaccggcagctgcccccatctgctgccaccgtgaacaaccgctgcttccagcagctggatgagggctatgatgaggagtatggaggctttgctgaggcccccaagttccccacccctgtgatcctgtccttcctgttctcctactggctgagccaccggctgacccaggacggcagccgggcccagcagatggccctgcacaccctgaagatgatggccaacggcggcatccgggaccacgtgggccagggcttccaccgctacagcacagaccggcagtggcacgtgccccactttgagaagatgctgtatgaccaggcccagctggccgtggcctacagccaggccttccagctgtctggagatgagttctacagtgatgtggccaagggcatcctgcagtatgtggcccggagcctgagccacaggtctgggggcttctacagcgcagaagatgctgacagccccccagagcggggccagaggcccaaggagggcgcctactacgtgtggacagtgaaggaggtgcagcagctgctgcctgagcctgtgctgggcgccacagagcccctgaccagcggccagctgctgatgaagcactacggcctgacagaggccggcaacatcagccccagccaggaccccaagggggagctgcagggccagaatgtgctgactgtgcgctacagcctggagctgacagctgcccgcttcggcctggatgtggaggccgtgaggaccctgctgaacagcggcctggagaagctgttccaggccaggaagcaccggcccaagccccacctggacagcaagatgctggccgcctggaatggcctgatggtgtctggctatgctgtgactggagctgtgctgggccaggacaggctcatcaactatgccaccaacggggccaagttcctgaagaggcacatgtttgatgtggccagcggccgcctgatgaggacctgctacacaggccctgggggcaccgtggagcacagcaaccccccctgctggggcttcctggaggactatgcctttgtggtgcggggcctgctggacctgtatgaggccagccaggagagcgcctggctggagtgggccctgcggctgcaggacacccaggacaagctgttctgggacagccagggcggcggctacttctgcagcgaggccgagctgggcgccggcctgcccctgcggctgaaggatgaccaggatggagctgagcccagcgccaacagcgtgtctgcccacaacctgctgcggctgcacggcttcaccggccacaaggactggatggacaagtgtgtgtgcctgctgacagccttcagcgagaggatgagaagagtgcctgtggccctgcctgagatggtgcgggccctgagcgcccagcagcagaccctgaagcagatcgtcatctgtggggaccggcaggccaaggacaccaaggccctggtgcagtgtgtgcacagcgtgtacatccccaacaaggtgctgatcctggctgatggagaccccagcagcttcctgagccggcagctgcccttcctgagcaccctgcggcggctggaggaccaggccacagcctacgtgtgtgagaaccaggcctgcagcgtgcccatcacagacccctgtgagctgaggaagctgctgcacccctag

SEQ ID NO: 93042 - DNA, 2361 bp, Artificial Sequence
  derived and/or modified sequence
atgctgggcgcccgggcctggctgggccgggtgctgctgctgccccgcgccggtgctggcctcgccgcctctcgacgaggatcatcgtccagggataaagaccggagcgcgacagtatcgtcttctgtgcccatgcctgctggaggtaaaggctcacatccctcctcgactccccaacgtgtgcctaatcggctgatccacgaaaagagtccttatctactgcagcacgcctacaaccccgtggactggtacccgtgggggcaggaggcctttgataaagccagaaaagaaaataaacccatctttctgtctgttggatacagcacctgccactggtgtcacatgatggaggaagagtcctttcaaaacgaagaaatcggcagactcctttctgaagactttgttagcgtgaaggtagacagagaagaaagaccggatgtggacaaggtatacatgacctttgttcaggcaaccagcagcggcggaggatggcccatgaatgtgtggctcacccctaatctgcaaccatttgttggcggaacttattttccacccgaggatggcctcactagggtcgggttccggaccgttcttttacggattcgcgaacagtggaagcagaataagaataccttgctggagaattctcagagagttacaacggctttactggcgaggtcggagatctccgtaggtgatcggcagcttcccccatccgcagccacggtgaataacaggtgtttccaacagctcgacgaaggctatgacgaggaatatggggggttcgctgaagctcccaagttcccaactcctgttatcctcagtttcctcttctcgtattggctatcccaccggctgacccaggatggttcccgcgctcaacagatggcactgcatactttgaaaatgatggccaatggaggcataagagaccatgtgggccagggatttcatcggtattcaacagaccggcagtggcatgtccctcatttcgagaaaatgctctatgatcaggcacagcttgctgtggcctatagtcaggcttttcagttatctggcgacgagttctatagtgatgtggcgaagggaatacttcagtacgtggccagatcactgtcccacagatctggcggattctactcggccgaggacgctgatagcccccccgagcggggacagcgcccaaaggaaggagcctattatgtgtggacagtaaaggaagtgcagcagctgctcccagaaccagtgctgggagcaaccgagcctctcactagtggtcagcttctgatgaagcattacgggctgaccgaggcgggcaacatctcacctagtcaggatccaaaaggagagctccagggtcagaatgttctcaccgtgaggtacagcctggaactcaccgcagctaggttcggccttgatgttgaggcagtgcggaccctgctcaactctgggcttgagaagctgttccaagccagaaagcataggcctaagccacacctcgatagcaagatgcttgccgcctggaacgggctaatggtaagcggatacgccgtgaccggcgcagtgctcggtcaggataggctgataaactacgctaccaatggagccaagttccttaaaagacatatgttcgacgttgccagtggacggctgatgaggacgtgctacactggtcctggcgggacggtggaacactctaaccctccctgttggggctttctggaggattatgccttcgtcgttcgtggcctgcttgacctctacgaggcgagtcaggaaagcgcctggttggagtgggctctcaggttacaggacacacaggacaagctcttctgggactcccagggaggggggtatttctgctccgaagccgagctaggagcagggttaccattgaggcttaaagatgatcaggacggagcggaacccagtgccaactctgtgagcgcccacaatcttctaaggctgcatggttttactggtcataaggactggatggataaatgcgtctgtcttctgacagccttctccgagagaatgcggagggttcctgtggcgctgcccgaaatggttagagccctcagtgctcaacaacaaacacttaaacagattgtcatctgtggggatcggcaggctaaagacacgaaggccctggttcagtgcgtgcattccgtatacattccaaacaaggtgctcattttggcagatggcgatccctcctcattcctgagtagacagctcccgttccttagcacgctgcggaggctggaagaccaggcgactgcatacgtttgcgaaaatcaagcgtgtagcgttcccatcactgacccatgcgagctgcgcaaactgctgcacccatag

SEQ ID NO: 93043 - DNA, 2361 bp, Artificial Sequence
  derived and/or modified sequence
atgctgggcgcaagagcctggctgggtagagtgctgctgctgccgagggctggagcaggtctggctgcctcgagaaggggctcatcgtccagggataaagacaggtccgcaaccgtgagcagttctgtacctatgcctgcaggcggaaaggggtctcaccctagctcaaccccccagcgagttcctaatcgactgattcacgagaagagcccatatctgcttcagcacgcctataaccccgtagactggtacccctgggggcaggaagcctttgacaaggctagaaaggaaaacaagcccatctttcttagtgtcggctatagcacatgccattggtgccatatgatggaagaggaaagttttcagaatgaggagattgggagacttctgagcgaagattttgtgagcgtgaaagttgacagagaggagaggcccgacgtggacaaggtgtacatgacctttgttcaagccacctcttccggcggagggtggccaatgaatgtgtggctaacacccaatctgcaaccatttgtggggggtacatattttccgcctgaagacggactgaccagggtcgggttccgcacggttctgttaaggattcgcgaacagtggaagcagaacaagaacaccctgctggagaactcacaaagggtgactacagccctcttggcgaggagtgaaatcagcgtaggtgacaggcagctgccaccctccgccgctaccgtcaacaaccgctgcttccaacaacttgatgaagggtacgacgaggagtatggcggattcgccgaagcacccaagttccccacgcccgtcattctttcctttctgttcagctactggctgagtcacagacttactcaggacggaagcagggcccagcagatggcattacatactcttaagatgatggcaaacggaggaattcgggaccatgttggccaagggtttcacagatacagtactgataggcagtggcacgtaccccatttcgagaaaatgctttatgatcaggcacagcttgccgtggcctacagccaagccttccagttaagcggagacgaattttattccgatgtggccaagggcatcttgcagtacgtggccaggagcttatctcacagaagtggtgggttctatagcgccgaggacgccgatagccctcccgaacgtggacaacgccctaaggaaggagcctactatgtttggaccgtgaaggaagtccagcaactgcttccagaacctgtactgggggcaactgaacctctgacctcaggtcagcttctgatgaaacattatggattaaccgaagctgggaacatcagcccttctcaagaccccaagggggaactacaaggccagaatgtgctcaccgtgcgctatagtcttgaacttaccgcagcaagatttggacttgatgtggaagcagtgcgcaccttactgaactccggcttggagaaattgttccaggccaggaaacacagaccaaaacctcatctcgacagtaaaatgctagccgcttggaacggcctgatggttagcggctacgccgtcacaggcgctgtattaggccaagatcggctcataaattatgccactaatggtgccaaatttctgaagcggcatatgttcgacgttgcctctggcagactgatgcgaacttgctataccgggcctggtggaactgtggaacattccaaccctccctgttggggcttcctcgaggactatgcctttgttgtgcgcggactcctagacttgtacgaggcctctcaggagtcagcatggttggagtgggcgttgcgtctgcaggatacacaggataagctcttttgggatagccaggggggaggctacttttgcagcgaagcagagctgggcgctggcctgccactcaggcttaaggacgatcaggatggagctgagccttcggctaatagtgtgagcgctcacaacctgctgagactgcacggattcactggacataaagactggatggacaagtgtgtgtgcctgttaacggctttttccgagaggatgagaagagtccccgtggcactgcccgagatggtgagggccctgtcagcccagcagcaaaccctcaagcagattgttatctgtggggaccgacaagccaaggataccaaggcgctggttcagtgcgtgcattcggtttatattcctaacaaggtgctcattctcgccgacggagatcccagctcattcctgagtagacagctgccctttttgagcaccttgaggagacttgaagaccaagccacagcctacgtgtgtgagaaccaggcctgctccgtccccatcaccgacccgtgcgaactccgtaaactcctgcatccctag

SEQ ID NO: 93044 - DNA, 2634 bp, Artificial Sequence
  derived and/or modified sequence
tccgtaggtgcccggcccgcccctcgcagcctcctgacttcccttcctgtcctcagcggccgggcccacggccccgagcagccatgctgggcgcgcgggcctggttgggccgcgtccttctgctgccccgcgccggtgcaggcctcgccgcgagccgcaggggtagctcctcccgggacaaggaccgaagtgcgacggtcagtagttcagtgcccatgcctgctggagggaaaggaagccatccttcatctacaccccagagggtccccaaccgcctgatccacgagaagtcaccatacctcctacaacatgcctacaatcctgtggactggtacccctggggacaggaagccttcgacaaggccaggaaggaaaacaagccgattttcctctcagtcgggtactccacctgccactggtgccacatgatggaagaggagtccttccagaatgaggagattggccgcctgctcagtgaggactttgtgagtgtgaaggtagaccgtgaggagcggcctgacgtggacaaggtgtacatgacgttcgtgcaggccaccagcagcggcgggggctggcccatgaatgtgtggctgactcccaacctccagccctttgtcgggggcacctatttccctcctgaggatggcttgacccgagtcggcttccgcacagtgttgctgagaatacgagaacagtggaaacagaacaagaacaccctgctagaaaatagccagcgtgtcaccactgccctgctggcccgatcagagatcagcgtgggtgaccgccagctgccgccctctgccgccaccgtgaacaatcgctgcttccagcagctggatgagggctatgatgaggaatacggtggcttcgctgaggcccccaagtttcccacgccggtgatcctgagcttcctgttctcctactggctcagccatcgactgactcaggatggctctcgggcccagcagatggccttgcataccctgaaaatgatggctaacgggggcatccgggaccatgtggggcagggctttcaccgctactccacagaccgccagtggcacgtccctcactttgagaagatgctctatgaccaggcacagctcgctgtggcctattcgcaggccttccagctctctggtgatgaattctactctgacgtggccaaaggcatcctgcagtacgtggctcggagcctgagccaccggtccggaggcttctatagcgcagaagatgcagactcgcccccagagcggggccagcggcccaaagagggcgcctactatgtgtggacggtcaaagaggttcagcagctcctcccggagcctgtgttgggtgccaccgagccgctgacctcaggccagctcctcatgaagcactacggcctcacagaggctggtaacatcagccccagtcaggaccccaagggggagctgcagggccagaatgtgctgaccgtccggtactcgctggagctgactgctgcccgctttggcttggatgtggaggccgtgcggaccttgctcaattcagggctggagaagctcttccaggcccggaagcatcggcccaagccgcacctggacagcaagatgctggctgcctggaatggcttgatggtgtcaggctatgctgtgactggggctgtcctgggccaagacaggctgatcaactatgccaccaatggtgccaagttcctgaagcggcacatgtttgatgtggccagtggccgcctgatgcggacctgctacaccggccctggggggactgtggagcacagcaacccaccctgctggggcttcctggaggactacgccttcgtggtgcggggcctgctggacctgtatgaggcctcacaggagagtgcgtggctcgagtgggctctgcggctgcaggacacacaggacaagctcttttgggactcccagggtggcggctacttctgcagtgaggctgagctgggggctggcctgcccctgcgtctgaaggacgaccaggatggagcagagcccagcgccaattccgtgtcagcccacaacctgctccggctgcatggcttcacgggccacaaggactggatggacaagtgtgtgtgcctattgaccgccttttccgagcgcatgcgtcgtgtcccggtggcgttgcccgagatggtccgcgccctctcagcccagcagcagaccctcaagcagatcgtgatctgtggagaccgtcaggccaaggacaccaaggccctggtgcagtgcgtccactctgtctacattcctaacaaggtgctgattctggctgatggggacccctcgagcttcctgtcccgccagctgcctttcctgagtaccctccgacggttggaagaccaggccactgcatatgtgtgtgagaatcaagcctgctcagtgcccatcactgatccctgcgaattacgaaaactactacatccatgactgccccaacccccttggggtggggcagaaggtgaagcatcccaactgactagagactcaggccctgcagggccctatagaacctgtggccatccctgagcaccctgccaccaggtgacctcggccatactcactgccccccttgggcacccactcaccctagaataaacttaacagtgtcccgtggtaa

SEQ ID NO: 93045 - DNA, 228 bp, Artificial Sequence
  derived and/or modified sequence
ggccagggccaccagggccccggccagtgcgtgcacagcgtgtacatccccaacaaggtgctgatcctggccgacggcgaccccagcagcttcctgagcagacagctgcccttcctgagcaccctgagaagactggaggaccaggccaccgcctacgtgtgcgagaaccaggcctgcagcgtgcccatcaccgacccctgcgagctgagaaagctgctgcacccctag

SEQ ID NO: 93046 - DNA, 228 bp, Artificial Sequence
  derived and/or modified sequence
gggcagggacaccagggtcccgggcagtgcgttcactctgtctacatcccaaacaaagtgctgatcctggctgatggagaccccagctcttttctgagtcgccagctaccatttctaagtacactgaggcggctggaagaccaggcgactgcttatgtttgtgaaaatcaggcatgttccgtgcccatcacagacccttgcgagttgcgtaaactgttgcatccatag

SEQ ID NO: 93047 - DNA, 228 bp, Artificial Sequence
  derived and/or modified sequence
ggccagggccaccagggccctggccagtgtgtgcacagcgtgtacatccccaacaaggtgctgatcctggctgatggagaccccagcagcttcctgagccggcagctgcccttcctgagcaccctgcggcggctggaggaccaggccacagcctacgtgtgtgagaaccaggcctgcagcgtgcccatcacagacccctgtgagctgaggaagctgctgcacccctag

SEQ ID NO: 93048 - DNA, 228 bp, Artificial Sequence
  derived and/or modified sequence
ggccagggccaccagggccccggccagtgcgtgcacagcgtgtacatcccgaacaaagtgcttattcttgccgacggagatccttcatcattcctgagccgtcagctcccatttctgtcgactctgcgaaggctcgaagatcaggccaccgcatacgtgtgcgagaatcaggcctgctccgttcccatcactgatccctgcgagttacgaaagttgcttcacccgtag

SEQ ID NO: 93049 - DNA, 228 bp, Artificial Sequence
  derived and/or modified sequence
ggacagggccaccagggccctggccaatgcgtccacagcgtgtatattcctaataaggtgctcattctcgccgatggcgacccatcctcattcctgtcacgacagcttcctttcctttctaccctgcgccgtttggaagaccaagcaacagcctacgtgtgtgagaaccaagcctgctccgtacctattaccgacccctgcgagctgcgaaagctgctgcacccatag

SEQ ID NO: 93050 - protein, 910 aa, Artificial Sequence
  derived and/or modified sequence
MAAPLIPLSQQIPTGNSLYESYYKQVDPAYTGRVGASEAALFLKKSGLSDIILGKIWDLADPEGKGFLDKQGFYVALRLVACAQSGHEVTLSNLNLSMPPPKFHDTSSPLMVTPPSAEAHWAVRVEEKAKFDGIFESLLPINGLLSGDKVKPVLMNSKLPLDVLGRVWDLSDIDKDGHLDRDEFAVAMHLVYRALEKEPVPSALPPSLIPPSKRKKTVFPGAVPVLPASPPPKDSLRSTPSHGSVSSLNSTGSLSPKHSLKQTQPTVNWVVPVADKMRFDEIFLKTDLDLDGYVSGQEVKEIFMHSGLTQNLLAHIWALADTRQTGKLSKDQFALAMYFIQQKVSKGIDPPQVLSPDMVPPSERGTPGPDSSGSLGSGEFTGVKELDDISQEIAQLQREKYSLEQDIREKEEAIRQKTSEVQELQNDLDRETSSLQELEAQKQDAQDRLDEMDQQKAKLRDMLSDVRQKCQDETQMISSLKTQIQSQESDLKSQEDDLNRAKSELNRLQQEETQLEQSIQAGRVQLETIIKSLKSTQDEINQARSKLSQLHESRQEAHRSLEQYDQVLDGAHGASLTDLANLSEGVSLAERGSFGAMDDPFKNKALLFSNNTQELHPDPFQTEDPFKSDPFKGADPFKGDPFQNDPFAEQQTTSTDPFGGDPFKESDPFRGSATDDFFKKQTKNDPFTSDPFTKNPSLPSKLDPFESSDPFSSSSVSSKGSDPFGTLDPFGSGSFNSAEGFADFSQMSKPPPSGPFTSSLGGAGFSDDPFKSKQDTPALPPKKPAPPRPKPPSGKSTPVSQLGSADFPEAPDPFQPLGADSGDPFQSKKGFGDPFSGKDPFVPSSAAKPSKASASGFADFTSFGNEEQQLAWAKRESEKAEQERLARLRRQEQEDLELAIALSKADMPAA

SEQ ID NO: 93051 - DNA, 2733 bp, Artificial Sequence
  derived and/or modified sequence
atggccgcccccctgatccccctgagccagcagatccccaccggcaacagcctgtacgagagctactacaagcaggtggaccccgcctacaccggcagagtgggcgccagcgaggccgccctgttcctgaagaagagcggcctgagcgacatcatcctgggcaagatctgggacctggccgaccccgagggcaagggcttcctggacaagcagggcttctacgtggccctgagactggtggcctgcgcccagagcggccacgaggtgaccctgagcaacctgaacctgagcatgcccccccccaagttccacgacaccagcagccccctgatggtgaccccccccagcgccgaggcccactgggccgtgagagtggaggagaaggccaagttcgacggcatcttcgagagcctgctgcccatcaacggcctgctgagcggcgacaaggtgaagcccgtgctgatgaacagcaagctgcccctggacgtgctgggcagagtgtgggacctgagcgacatcgacaaggacggccacctggacagagacgagttcgccgtggccatgcacctggtgtacagagccctggagaaggagcccgtgcccagcgccctgccccccagcctgatcccccccagcaagagaaagaagaccgtgttccccggcgccgtgcccgtgctgcccgccagccccccccccaaggacagcctgagaagcacccccagccacggcagcgtgagcagcctgaacagcaccggcagcctgagccccaagcacagcctgaagcagacccagcccaccgtgaactgggtggtgcccgtggccgacaagatgagattcgacgagatcttcctgaagaccgacctggacctggacggctacgtgagcggccaggaggtgaaggagatcttcatgcacagcggcctgacccagaacctgctggcccacatctgggccctggccgacaccagacagaccggcaagctgagcaaggaccagttcgccctggccatgtacttcatccagcagaaggtgagcaagggcatcgaccccccccaggtgctgagccccgacatggtgccccccagcgagagaggcacccccggccccgacagcagcggcagcctgggcagcggcgagttcaccggcgtgaaggagctggacgacatcagccaggagatcgcccagctgcagagagagaagtacagcctggagcaggacatcagagagaaggaggaggccatcagacagaagaccagcgaggtgcaggagctgcagaacgacctggacagagagaccagcagcctgcaggagctggaggcccagaagcaggacgcccaggacagactggacgagatggaccagcagaaggccaagctgagagacatgctgagcgacgtgagacagaagtgccaggacgagacccagatgatcagcagcctgaagacccagatccagagccaggagagcgacctgaagagccaggaggacgacctgaacagagccaagagcgagctgaacagactgcagcaggaggagacccagctggagcagagcatccaggccggcagagtgcagctggagaccatcatcaagagcctgaagagcacccaggacgagatcaaccaggccagaagcaagctgagccagctgcacgagagcagacaggaggcccacagaagcctggagcagtacgaccaggtgctggacggcgcccacggcgccagcctgaccgacctggccaacctgagcgagggcgtgagcctggccgagagaggcagcttcggcgccatggacgaccccttcaagaacaaggccctgctgttcagcaacaacacccaggagctgcaccccgaccccttccagaccgaggaccccttcaagagcgaccccttcaagggcgccgaccccttcaagggcgaccccttccagaacgaccccttcgccgagcagcagaccaccagcaccgaccccttcggcggcgaccccttcaaggagagcgaccccttcagaggcagcgccaccgacgacttcttcaagaagcagaccaagaacgaccccttcaccagcgaccccttcaccaagaaccccagcctgcccagcaagctggaccccttcgagagcagcgaccccttcagcagcagcagcgtgagcagcaagggcagcgaccccttcggcaccctggaccccttcggcagcggcagcttcaacagcgccgagggcttcgccgacttcagccagatgagcaagcccccccccagcggccccttcaccagcagcctgggcggcgccggcttcagcgacgaccccttcaagagcaagcaggacacccccgccctgccccccaagaagcccgccccccccagacccaagccccccagcggcaagagcacccccgtgagccagctgggcagcgccgacttccccgaggcccccgaccccttccagcccctgggcgccgacagcggcgaccccttccagagcaagaagggcttcggcgaccccttcagcggcaaggaccccttcgtgcccagcagcgccgccaagcccagcaaggccagcgccagcggcttcgccgacttcaccagcttcggcaacgaggagcagcagctggcctgggccaagagagagagcgagaaggccgagcaggagagactggccagactgagaagacaggagcaggaggacctggagctggccatcgccctgagcaaggccgacatgcccgccgcctag

SEQ ID NO: 93052 - DNA, 3054 bp, Artificial Sequence
  derived and/or modified sequence
gctcggagcccgagtccgcgggaagatggcggcgccgctcatccccctctcccagcagattcccactggaaattcgttgtatgaatcttattacaagcaggtcgatccggcatacacagggagggtgggggcgagtgaagctgcgctttttctaaagaagtctggcctctcggacattatccttgggaagatatgggacttggccgatccagaaggtaaagggttcttggacaaacagggtttctatgttgcactgagactggtggcctgtgcacagagtggccatgaagttaccttgagcaatctgaatttgagcatgccaccgcctaaatttcacgacaccagcagccctctgatggtcacaccgccctctgcagaggcccactgggctgtgagggtggaagaaaaggccaaatttgatgggatttttgaaagcctcttgcccatcaatggtttgctctctggagacaaagtcaagccagtcctcatgaactcaaagctgcctcttgatgtcctgggcagggtctgggacctcagtgacattgacaaggatgggcacttggatcgagatgagttcgctgtggccatgcacttggtgtaccgagccctggagaaggagcccgtgccctccgccctgcccccgtccctcatcccaccctccaagagaaagaagactgtgttccctggcgccgtccccgtcctgcctgccagccccccaccaaaagacagcctccgctccacgccgtcccacggcagcgtcagcagcctcaacagcacagggagcctgtcccccaagcacagcctcaagcaaacacagccaacagtgaactgggtggtgcccgtggcagacaagatgcgatttgatgagatattcctgaagaccgacctggacctggatggctacgtgagtggccaggaggtgaaggagatcttcatgcactcgggcctcacccagaaccttctagcacacatatgggccctggccgatacgaggcaaacggggaagttaagcaaagaccaattcgcgttagctatgtatttcattcagcagaaggtcagtaaaggcatcgaccctcctcaagtcctctcgccggacatggtcccgccttcggagagaggcacgcccggcccggacagttcaggctctctcggctccggggagtttactggcgtgaaggagcttgatgacatcagtcaagagattgcccagttacaaagagagaaatattcactggaacaagacattcgagaaaaggaagaggcaatcagacagaaaaccagcgaggtgcaggaattacaaaatgacctagaccgggaaacaagcagtttgcaggagctcgaggctcagaaacaggatgctcaagaccgcctggacgagatggaccagcagaaggccaagctccgagacatgctgagcgacgtccggcagaagtgccaggatgagactcagatgatctcatcactgaaaacgcaaatccaatctcaggaatctgacttaaagtcccaggaagacgatctgaaccgagccaagtcggagctgaaccgattgcagcaggaggaaacccagctggagcagagcattcaggctgggcgagtccagctggaaaccatcatcaagtccctgaagtcaacgcaagacgaaatcaaccaggcaaggagcaaactttcccagctgcatgaaagccgccaggaggcccacaggagcctggagcagtatgaccaggtgctcgatggagcccatggtgccagcctgaccgacctggccaacctgagcgaaggcgtctccctggcagagaggggcagttttggagccatggatgatcctttcaaaaataaagccttgttatttagcaacaacacgcaagagttgcatccggatcctttccagacagaagaccccttcaaatctgacccatttaaaggagctgaccccttcaaaggcgacccgttccagaatgacccctttgcagaacagcagacaacttcaacagatccatttggaggggaccctttcaaagaaagtgacccattccgtggctctgccactgacgacttcttcaagaaacagacaaagaatgacccatttacctcggatccattcacgaaaaacccttccttaccttcgaagctcgacccctttgaatccagtgatcccttttcatcctccagtgtctcctcaaaaggatcagatccctttggaaccttagatcccttcggaagtgggtccttcaatagtgctgaaggctttgccgacttcagccagatgtccaagcccccaccttctggccctttcacctcctccttgggaggggcaggattctcagatgacccctttaaaagtaaacaggacactcctgctctgcctccgaagaaacctgctcctccacggcctaaaccgcccagcggtaaaagtacacctgtaagccagcttggttccgcagactttcccgaggcccccgatccattccagccactcggggctgacagcggcgacccgttccaaagtaaaaaggggtttggggacccgtttagtggaaaagacccatttgtcccctcctctgcagctaaaccttctaaggcctctgcctcgggctttgcagacttcacctcttttggcaatgaggagcagcagctggcgtgggccaagcgggagagcgagaaggcggaacaggagaggctggcgcggctgcggcggcaggagcaggaggacctggaactggccatcgcgctcagcaaggctgacatgcctgccgcctaggcgagggccgtgtgtaggcgggacagggcacgggcgggttccagagagggggcagtgcagatgtctatatatacacacacacaccgtcgccaccgtactccaaggaccgggactcgggggcttgttcagggtgagcagactcggctgcaagacctggaaaggtcacatctcctggggaagcccttacagaggccttggccaccacttctgcaggtccgtctctccactgtgccatcccccccggggctgactgcctcccgctcttcctctggggacgaacacacagcggtcagtcg

SEQ ID NO: 93053 - DNA, 2733 bp, Artificial Sequence
  derived and/or modified sequence
atggcagccccactaataccactgtctcaacagatcccaactggcaattctctgtatgagtcctactacaaacaggttgaccctgcctacaccggtagagttggggccagtgaagccgccctgttcctgaaaaagagcggcctttctgacattatattggggaagatttgggacctcgctgaccctgaagggaagggattccttgacaagcagggcttctatgtggcactccggctggttgcgtgtgcacagagtggccacgaggtgaccctgtccaacctgaacctgtccatgccacctcccaagttccacgacaccagttctcctctgatggtgactcctccctcagctgaagcacactgggccgtgagagtggaagaaaaggccaaatttgatggaatcttcgaatctttactgccgatcaatgggttgctctcaggcgacaaagttaagcctgtactgatgaattcaaaactccctctggatgtgcttggccgcgtgtgggatctaagtgatattgataaggacgggcacctggaccgcgacgaattcgccgttgccatgcacctggtgtaccgggcgcttgaaaaggagccagtgccatcagcgctccctccaagcttaatccccccaagcaaacggaaaaagacagtattcccaggcgccgtaccagtgctgcccgccagcccaccacccaaggatagcctaaggtccaccccttcacatgggagcgttagttcacttaactcgaccgggagtttgtcccctaagcatagcctgaaacagacccagccaacggttaattgggttgttcctgtggccgataaaatgagattcgacgaaattttccttaaaaccgatttggacctggatggttacgtcagcggccaagaagtaaaagaaatatttatgcattccggcctaactcagaacctcctcgcacacatatgggctctggcagatactcgccagaccggtaagctgagcaaagatcagtttgcactcgccatgtattttattcagcagaaggtgtcaaaggggattgatcctcctcaggtcctctcaccggatatggtccccccatcagagcgggggacacctggccccgacagcagcggtagcttgggcagtggagagtttacgggagtgaaggagctggatgacatcagccaggagatcgcccagcttcagagggaaaagtactccctcgaacaggacatccgcgagaaggaagaggctatacgacagaaaacaagcgaggtccaggaactgcagaacgacctggacagagagacctcctcccttcaggagttggaggctcagaagcaggatgcacaggacagattggacgaaatggaccaacagaaggctaagctcagggatatgctgtcggacgtccggcagaaatgtcaggacgaaacacagatgataagtagtttgaaaacgcagatccagtcccaggagtccgatttgaagtcccaggaggacgaccttaatcgagccaagtctgagctgaatagacttcagcaggaggagacacaactggaacagtcgattcaggctggacgggtgcaattagaaacaatcattaagagcctcaagtctacccaggacgagatcaaccaggcccggtctaagctaagccagcttcatgagtcgcgccaggaggctcacagatctctcgagcagtacgatcaggtcctggatggcgcccatggggcttcgttgacagacctggcaaacctgtcggagggagtctccctggcagagcgtggctctttcggagctatggatgacccatttaaaaataaagcattgctgttctccaataacacgcaggaactgcatcccgatccattccagactgaagaccccttcaagtccgaccccttcaaaggcgcagatccctttaagggtgatccattccagaatgaccctttcgctgaacagcaaacgacaagcacagatcccttcggaggtgacccctttaaggagagcgatccattcagaggcagcgcgaccgacgattttttcaagaagcagaccaaaaatgacccattcacaagcgatccattcacaaagaatccttctctgccatctaaactggatcccttcgagagctcagacccgttttccagttctagcgtgagctccaaggggagcgatccattcggtactcttgatccatttggctcaggctcattcaattctgctgaaggattcgcagacttctcacagatgtcaaagccgccaccatctggacccttcacatcttccctgggcggcgcaggattttccgatgatccattcaagtctaaacaggatacccccgccctcccccctaaaaagcccgcacccccacgcccaaagcccccgagcggaaaatcaactcccgtgtcccaacttggcagtgcggacttcccagaagcccctgaccccttccaacctcttggcgccgacagtggggacccatttcagagcaagaagggattcggggaccccttttctgggaaagaccctttcgtgccttccagtgcagctaaaccaagtaaggcttccgctagcggttttgccgacttcacatccttcggaaacgaggaacagcagctggcgtgggcaaagcgagagagcgagaaggcagagcaggaacgactcgcgcggctgagaagacaggagcaagaggacctggagctggccatcgcgctgtccaaggcagacatgcctgctgcatag

SEQ ID NO: 93054 - DNA, 2733 bp, Artificial Sequence
  derived and/or modified sequence
atggccgcccccctcatccccctgagccagcagatccccaccggcaacagcctgtatgagagctactacaagcaggtggaccctgcctacacaggccgggtgggcgccagcgaggccgccctcttcctgaagaagagcggcctgagtgacatcatcctgggcaagatctgggacctggccgaccctgagggcaagggcttcctggacaagcagggcttctacgtggccctgcggctggtggcctgtgcccagagcggccacgaggtgaccctgagcaacctgaacctgtccatgcccccacccaagttccatgacaccagcagccccctgatggtgaccccacccagcgctgaggcccactgggccgtgcgggtggaggagaaggccaagtttgatggcatctttgagagcctgctgcccatcaatggcctgctgagcggggacaaggtgaagcctgtgctgatgaacagcaagctgcccctggatgtgctgggccgggtgtgggacctgagtgacatcgacaaggatggccacctggacagagatgaatttgctgtggccatgcacctggtgtaccgggccctggagaaggagcctgtgcccagcgccctgccccccagcctcatcccccccagcaagaggaagaagacagtgtttcctggagctgtgcctgtgctgcctgccagccccccacccaaggacagcctgcggagcacccccagccacggctctgtgagcagcctgaacagcacaggcagcctgagccccaagcacagcctgaagcagacccagcccaccgtgaactgggtggtgcctgtggccgacaagatgagatttgatgagatcttcctgaagacagacctggacctggatggctacgtgtctggccaggaggtgaaggagatcttcatgcacagcggcctgacccagaacctgctggcccacatctgggccctggccgacacccggcagacaggcaagctgagcaaggaccagtttgccctggccatgtacttcatccagcagaaggtgtccaagggcatcgaccccccccaggtgctgagcccagacatggtgccccccagcgagcggggcaccccaggccctgacagcagcggcagcctgggcagcggggagttcaccggggtgaaggagctggatgacatcagccaggagatcgcccagctgcagcgggagaagtacagcctggagcaggacatccgggagaaggaggaggccatccggcagaagaccagcgaggtgcaggagctgcagaatgacctggaccgggagaccagcagcctgcaggagctggaggcccagaagcaggatgcccaggaccggctggatgagatggaccagcagaaggccaagctgcgggacatgctgagtgatgtgcggcagaagtgccaggatgagacccagatgatcagcagcctgaagacccagatccagagccaggagagtgacctgaagagccaggaggatgacctgaacagagccaagtctgagctgaaccggctgcagcaggaggagacccagctggagcagagcatccaggccggccgggtgcagctggagaccatcatcaagagcctgaagagcacccaggatgagatcaaccaggcccggagcaagctgagccagctgcacgagagccggcaggaggcccacaggagcctggagcagtatgaccaggtgctggatggagcccacggggccagcctgacagacctggccaacctgtctgaaggagtgtccctggccgagcggggcagctttggagccatggatgaccccttcaagaacaaggccctgctcttcagcaacaacacccaggagctgcacccagaccccttccagacagaggaccccttcaagagtgaccccttcaagggagctgaccccttcaagggggaccccttccagaatgacccctttgctgagcagcagaccaccagcacagacccctttggaggagaccccttcaaggagagtgaccccttccggggcagcgccacagatgacttcttcaagaagcagaccaagaatgaccccttcaccagtgaccccttcaccaagaaccccagcctgcccagcaagctggacccctttgagagcagtgaccccttcagcagcagctctgtgagcagcaaaggaagtgaccccttcggcaccctggaccccttcggcagcggcagcttcaacagcgctgagggctttgctgacttcagccagatgagcaagcccccaccttctggccccttcaccagcagcctgggcggggccggcttcagtgatgaccccttcaagagcaagcaggacaccccagccctgccccccaagaagccagccccaccccggcccaagcccccatctgggaagagcacccctgtgtcccagctgggcagcgctgacttccctgaggccccagaccccttccagcccctgggcgctgacagcggggaccccttccagagcaagaagggctttggagaccccttcagcggcaaggacccctttgtgcccagcagcgctgccaagcccagcaaggccagcgccagcggctttgctgacttcaccagctttggaaatgaggagcagcagctggcctgggccaagcgggagagcgagaaggccgagcaggagcggctggcccggctgcggcggcaggagcaggaggacctggagctggccatcgccctgagcaaggctgacatgcctgctgcctag

SEQ ID NO: 93055 - DNA, 2733 bp, Artificial Sequence
  derived and/or modified sequence
atggccgcccccctgatccccctgagccagcagatccccaccggcaattccctgtatgaatcttactacaaacaggtggacccggcatatacagggagagtcggagccagtgaagctgccttgttcctgaaaaagagcggactttcagacataatcctgggtaagatatgggatcttgctgaccccgagggcaaaggattcctggacaagcagggattttacgtagctttaagactcgtggcctgtgcacaaagcggacatgaggtgaccctgtccaacttgaatttatctatgccacctcccaaatttcacgacacctcctcacctctaatggtaacccccccaagtgctgaggcccactgggctgtgagggtcgaagaaaaggctaaattcgatgggattttcgagtctctgctgccaattaatggactgctgtctggtgacaaggtgaaacctgtgcttatgaacagtaagctgcccctcgacgtgctggggcgagtgtgggacttgtctgatatcgacaaagatggacatctagatagagacgagtttgcggtggcaatgcatctagtgtaccgggcattggagaaggaacctgtccccagcgccctgccgccctctctgattccaccgtcaaaacgaaagaaaacagtattccccggggcagttcctgtgcttcctgctagtccgccccccaaagacagccttcgctcaaccccatcacatgggtcagtgagcagccttaatagcaccgggagcctgagtcccaaacacagcctcaagcagacccagcctactgttaactgggtcgtgccagtggctgataagatgagattcgatgagatattcctgaaaaccgacttggacctggatggttatgtgagtggacaggaagtcaaggaaattttcatgcatagtgggctgacacagaacctactggcccatatttgggcactggcggataccagacaaacaggcaaactaagcaaggaccaattcgctttggccatgtactttatacagcagaaagttagcaagggcatagaccctcctcaggtgctgagcccagatatggtgcccccgtctgagcgcggaacccctggtcccgatagcagtggcagtctgggttctggagagtttactggcgtgaaagaactcgacgacatttcgcaggagattgcacagctccaacgcgaaaagtattcgctagagcaggacatacgcgaaaaagaggaagccatccggcagaagacttcagaagtgcaggagctgcagaatgatttggatagggagaccagttcactgcaggagctcgaggcgcaaaaacaagatgcccaagaccggctggatgagatggaccagcagaaagctaaactgcgcgacatgctttccgacgtgcgccaaaagtgtcaagatgaaacccaaatgatctcgtccttaaaaacgcagattcagtcacaggaatccgaccttaagtcccaggaggatgatctgaatcgcgctaaatcggagctgaaccgacttcagcaggaagaaacacaactggaacagtccatccaagctggccgcgtccagttagagactatcatcaagagcctcaaatccactcaggacgaaataaatcaggccaggtcaaagctgtcgcaactgcacgaatctcggcaagaagcccataggtctctcgagcaatatgaccaggtgttggacggggctcacggcgccagcctcactgatctggcaaatctcagcgagggcgtgagtttggcggagcgcgggagtttcggtgcaatggacgatccattcaaaaataaggctctcctgttttccaataatacccaagagttgcatcctgatccctttcagaccgaggacccattcaagagcgacccctttaaaggggccgatccatttaaaggggatccatttcaaaatgatccatttgccgaacagcagacgacatcaactgatccattcggcggtgaccccttcaaggagtcagatccttttaggggttctgctacagacgatttcttcaagaagcagactaaaaacgacccctttaccagtgacccattcactaagaatccgagtctgcccagtaagctagatccatttgagagctccgacccattcagtagttcctctgtatcatctaagggttctgaccctttcgggacattggacccatttgggtccggctcatttaacagtgccgaagggttcgcggacttttcacagatgagcaagcccccgccttctggaccgtttacttctagtctgggaggagcaggatttagcgatgatcccttcaaaagtaaacaggataccccagccctaccaccgaagaagccagccccgccccggcccaagccgccaagcggcaaatcaacccccgtttcccagttaggatcggctgatttcccggaagctcctgaccctttccagccactgggagccgactcgggggatccctttcagtcaaagaaagggttcggcgatccgttctcaggaaaggacccgtttgtgccatcctccgccgcaaagccctcgaaggcctcagctagcggctttgccgatttcaccagcttcggaaatgaagagcagcagctggcttgggccaaacgggaatcagagaaggctgagcaggaaagacttgccagactgcgtcgccaggagcaggaagacctcgaattggcaattgccttatccaaagctgatatgccagctgcctag

SEQ ID NO: 93056 - DNA, 2733 bp, Artificial Sequence
  derived and/or modified sequence
atggcggcacccctcatacccctttcgcagcaaatccctacgggcaactcactgtatgagagctactataagcaggtggatccagcgtacacaggtagagtgggcgctagtgaggccgcactgttcctgaaaaaaagcgggctgagcgacataatactggggaagatctgggaccttgcggaccctgaagggaagggtttcctggacaagcagggcttttacgtggccttacggttggttgcatgtgctcagtccgggcacgaggtcaccctgagcaacctgaatctcagtatgccgccaccaaaattccacgacacatcatcacctcttatggttacccccccatctgccgaggcgcactgggcggtgcgagttgaggaaaaagcgaagttcgacggaatattcgagtcccttctgcccattaatggcttactcagcggcgacaaggtgaaacctgtgctgatgaacagcaaacttcccctggatgtgctgggcagagtttgggacttgagtgacatcgacaaggatggccaccttgaccgcgacgaattcgccgtggcaatgcaccttgtgtaccgggcactggagaaggagccagtgccaagtgcccttcccccatccttaatcccaccctcaaagaggaaaaaaaccgttttccctggagccgtccctgtgctgccagctagccctccaccaaaggattcccttcggagtacaccaagtcatggttcggttagctcgcttaattctaccggatctctgtctccaaaacacagtctcaagcaaacgcagcctaccgtgaattgggtagtccctgtagccgataagatgaggttcgatgagattttccttaaaaccgatttggaccttgatggatacgtaagcggacaggaggttaaggagatcttcatgcacagcgggctgacccagaacttactggcccatatctgggccttggccgatacgaggcagaccggaaagctgagtaaagatcagtttgccctggccatgtatttcatccagcagaaagtgagcaaagggatcgacccaccacaggtgctctcccctgatatggtcccaccttctgagcggggtaccccaggacctgacagctccggtagcctcgggtcaggtgaattcaccggagtcaaggagctcgatgacatttctcaagagatagcccaactgcagagagaaaaatacagcctcgaacaagatatccgcgagaaagaagaggccatccgacagaagacctctgaggtgcaggagcttcagaacgacttggacagggaaacttcctctttgcaagaactggaagcccaaaaacaagatgctcaggacaggctggatgaaatggatcagcagaaggccaagctcagggatatgctgtccgatgtacgccagaaatgtcaagatgaaacccagatgatcagttccttgaagactcagattcaaagccaagagtctgacctgaagagccaggaagacgatctgaaccgagcaaaatccgaactcaaccgccttcagcaggaggagacacaactggagcaatccattcaggcaggaagggtccagctcgagacaattattaagagcttgaaaagcacccaggatgaaattaaccaggctcgaagcaagctctctcagttgcacgaaagccgccaggaggctcatcggagcctggaacagtatgaccaggtactggatggagcacatggtgccagcctgacagaccttgcgaatctttccgaaggcgtctccctggcagagcgcggatctttcggggcaatggacgatcccttcaaaaataaggcactgctgttcagtaataatactcaggaactgcaccctgatccattccaaaccgaagatccattcaagagtgatccttttaagggcgcagatcctttcaaaggtgacccgtttcagaacgatccattcgccgagcagcagacaaccagtaccgaccccttcggaggcgaccctttcaaagaatctgatccttttcgcggaagcgcaacggacgacttttttaagaaacagactaaaaacgacccctttacaagcgatcccttcactaagaatccgtccctcccgagcaagctggatccgttcgagtcttcagatcctttctcgagcagctctgtttcctctaaaggttcggatccatttggcacactcgatccattcgggagcggcagcttcaatagcgcagagggattcgccgatttctcccagatgagcaagccgccacccagcggtccctttacttcatccctcggcggtgccggtttctcagacgaccctttcaagtccaagcaggataccccggctctgccccctaaaaagccagcccctcctcgcccaaaacccccaagcggcaagtccactcctgtttcccagttaggtagcgcagacttcccagaggcacccgatccatttcaacccctcggtgccgattcaggcgatccttttcagtccaaaaaaggctttggggacccattcagcgggaaggaccctttcgtaccatcatcggcagcaaagccttctaaagcctcagcctctggattcgccgacttcacctctttcggtaacgaagagcaacagctcgcttgggccaagcgggagagcgagaaagcggagcaggagcgcttggccagacttcgacgccaggagcaagaagacctggagctcgccatcgcgctgagtaaagccgacatgcccgcagcctag

SEQ ID NO: 93057 - protein, 754 aa, Artificial Sequence
  derived and/or modified sequence
MAAPLIPLSQQIPTGNSLYESYYKQVDPAYTGRVGASEAALFLKKSGLSDIILGKIWDLADPEGKGFLDKQGFYVALRLVACAQSGHEVTLSNLNLSMPPPKFHDTSSPLMVTPPSAEAHWAVRVEEKAKFDGIFESLLPINGLLSGDKVKPVLMNSKLPLDVLGRVWDLSDIDKDGHLDRDEFAVAMHLVYRALEKEPVPSALPPSLIPPSKRKKTVFPGAVPVLPASPPPKDSLRSTPSHGSVSSLNSTGSLSPKHSLKQTQPTVNWVVPVADKMRFDEIFLKTDLDLDGYVSGQEVKEIFMHSGLTQNLLAHIWALADTRQTGKLSKDQFALAMYFIQQKVSKGIDPPQVLSPDMVPPSERGTPGPDSSGSLGSGEFTGVKELDDISQEIAQLQREKYSLEQDIREKEEAIRQKTSEVQELQNDLDRETSSLQELEAQKQDAQDRLDEMDQQKAKLRDMLSDVRQKCQDETQMISSLKTQIQSQESDLKSQEDDLNRAKSELNRLQQEETQLEQSIQAGRVQLETIIKSLKSTQDEINQARSKLSQLHESRQEAHRSLEQYDQVLDGAHGASLTDLANLSEGVSLAERGSFGAMDDPFKNKALLFSNNTQELHPDPFQTEDPFKSDPFKGADPFKGDPFQNDPFAEQQTTSTDPFGGDPFKESDPFRGSATDDFFKKQTKNDPFTSDPFTKNPSLPSKLDPFESSDPFSSSSVSSKGSDPFGTLDPFGSGSFNSAEGFADFSQMSKVKVHL

SEQ ID NO: 93058 - DNA, 2265 bp, Artificial Sequence
  derived and/or modified sequence
atggccgcccccctgatccccctgagccagcagatccccaccggcaacagcctgtacgagagctactacaagcaggtggaccccgcctacaccggcagagtgggcgccagcgaggccgccctgttcctgaagaagagcggcctgagcgacatcatcctgggcaagatctgggacctggccgaccccgagggcaagggcttcctggacaagcagggcttctacgtggccctgagactggtggcctgcgcccagagcggccacgaggtgaccctgagcaacctgaacctgagcatgcccccccccaagttccacgacaccagcagccccctgatggtgaccccccccagcgccgaggcccactgggccgtgagagtggaggagaaggccaagttcgacggcatcttcgagagcctgctgcccatcaacggcctgctgagcggcgacaaggtgaagcccgtgctgatgaacagcaagctgcccctggacgtgctgggcagagtgtgggacctgagcgacatcgacaaggacggccacctggacagagacgagttcgccgtggccatgcacctggtgtacagagccctggagaaggagcccgtgcccagcgccctgccccccagcctgatcccccccagcaagagaaagaagaccgtgttccccggcgccgtgcccgtgctgcccgccagccccccccccaaggacagcctgagaagcacccccagccacggcagcgtgagcagcctgaacagcaccggcagcctgagccccaagcacagcctgaagcagacccagcccaccgtgaactgggtggtgcccgtggccgacaagatgagattcgacgagatcttcctgaagaccgacctggacctggacggctacgtgagcggccaggaggtgaaggagatcttcatgcacagcggcctgacccagaacctgctggcccacatctgggccctggccgacaccagacagaccggcaagctgagcaaggaccagttcgccctggccatgtacttcatccagcagaaggtgagcaagggcatcgaccccccccaggtgctgagccccgacatggtgccccccagcgagagaggcacccccggccccgacagcagcggcagcctgggcagcggcgagttcaccggcgtgaaggagctggacgacatcagccaggagatcgcccagctgcagagagagaagtacagcctggagcaggacatcagagagaaggaggaggccatcagacagaagaccagcgaggtgcaggagctgcagaacgacctggacagagagaccagcagcctgcaggagctggaggcccagaagcaggacgcccaggacagactggacgagatggaccagcagaaggccaagctgagagacatgctgagcgacgtgagacagaagtgccaggacgagacccagatgatcagcagcctgaagacccagatccagagccaggagagcgacctgaagagccaggaggacgacctgaacagagccaagagcgagctgaacagactgcagcaggaggagacccagctggagcagagcatccaggccggcagagtgcagctggagaccatcatcaagagcctgaagagcacccaggacgagatcaaccaggccagaagcaagctgagccagctgcacgagagcagacaggaggcccacagaagcctggagcagtacgaccaggtgctggacggcgcccacggcgccagcctgaccgacctggccaacctgagcgagggcgtgagcctggccgagagaggcagcttcggcgccatggacgaccccttcaagaacaaggccctgctgttcagcaacaacacccaggagctgcaccccgaccccttccagaccgaggaccccttcaagagcgaccccttcaagggcgccgaccccttcaagggcgaccccttccagaacgaccccttcgccgagcagcagaccaccagcaccgaccccttcggcggcgaccccttcaaggagagcgaccccttcagaggcagcgccaccgacgacttcttcaagaagcagaccaagaacgaccccttcaccagcgaccccttcaccaagaaccccagcctgcccagcaagctggaccccttcgagagcagcgaccccttcagcagcagcagcgtgagcagcaagggcagcgaccccttcggcaccctggaccccttcggcagcggcagcttcaacagcgccgagggcttcgccgacttcagccagatgagcaaggtgaaggtgcacctgtag

SEQ ID NO: 93059 - DNA, 2550 bp, Artificial Sequence
  derived and/or modified sequence
aagatggcggcgccgctcatccccctctcccagcagattcccactggaaattcgttgtatgaatcttattacaagcaggtcgatccggcatacacagggagggtgggggcgagtgaagctgcgctttttctaaagaagtctggcctctcggacattatccttgggaagatatgggacttggccgatccagaaggtaaagggttcttggacaaacagggtttctatgttgcactgagactggtggcctgtgcacagagtggccatgaagttaccttgagcaatctgaatttgagcatgccaccgcctaaatttcacgacaccagcagccctctgatggtcacaccgccctctgcagaggcccactgggctgtgagggtggaagaaaaggccaaatttgatgggatttttgaaagcctcttgcccatcaatggtttgctctctggagacaaagtcaagccagtcctcatgaactcaaagctgcctcttgatgtcctgggcagggtctgggacctcagtgacattgacaaggatgggcacttggatcgagatgagttcgctgtggccatgcacttggtgtaccgagccctggagaaggagcccgtgccctccgccctgcccccgtccctcatcccaccctccaagagaaagaagactgtgttccctggcgccgtccccgtcctgcctgccagccccccaccaaaagacagcctccgctccacgccgtcccacggcagcgtcagcagcctcaacagcacagggagcctgtcccccaagcacagcctcaagcaaacacagccaacagtgaactgggtggtgcccgtggcagacaagatgcgatttgatgagatattcctgaagaccgacctggacctggatggctacgtgagtggccaggaggtgaaggagatcttcatgcactcgggcctcacccagaaccttctagcacacatatgggccctggccgatacgaggcaaacggggaagttaagcaaagaccaattcgcgttagctatgtatttcattcagcagaaggtcagtaaaggcatcgaccctcctcaagtcctctcgccggacatggtcccgccttcggagagaggcacgcccggcccggacagttcaggctctctcggctccggggagtttactggcgtgaaggagcttgatgacatcagtcaagagattgcccagttacaaagagagaaatattcactggaacaagacattcgagaaaaggaagaggcaatcagacagaaaaccagcgaggtgcaggaattacaaaatgacctagaccgggaaacaagcagtttgcaggagctcgaggctcagaaacaggatgctcaagaccgcctggacgagatggaccagcagaaggccaagctccgagacatgctgagcgacgtccggcagaagtgccaggatgagactcagatgatctcatcactgaaaacgcaaatccaatctcaggaatctgacttaaagtcccaggaagacgatctgaaccgagccaagtcggagctgaaccgattgcagcaggaggaaacccagctggagcagagcattcaggctgggcgagtccagctggaaaccatcatcaagtccctgaagtcaacgcaagacgaaatcaaccaggcaaggagcaaactttcccagctgcatgaaagccgccaggaggcccacaggagcctggagcagtatgaccaggtgctcgatggagcccatggtgccagcctgaccgacctggccaacctgagcgaaggcgtctccctggcagagaggggcagttttggagccatggatgatcctttcaaaaataaagccttgttatttagcaacaacacgcaagagttgcatccggatcctttccagacagaagaccccttcaaatctgacccatttaaaggagctgaccccttcaaaggcgacccgttccagaatgacccctttgcagaacagcagacaacttcaacagatccatttggaggggaccctttcaaagaaagtgacccattccgtggctctgccactgacgacttcttcaagaaacagacaaagaatgacccatttacctcggatccattcacgaaaaacccttccttaccttcgaagctcgacccctttgaatccagtgatcccttttcatcctccagtgtctcctcaaaaggatcagatccctttggaaccttagatcccttcggaagtgggtccttcaatagtgctgaaggctttgccgacttcagccagatgtccaaggtaaaagtacacctgtaagccagcttggttccgcagactttcccgaggcccccgatccattccagccactcggggctgacagcggcgacccgttccaaagtaaaaaggggtttggggacccgtttagtggaaaagacccatttgtcccctcctctgcagctaaaccttctaaggcctctgcctcgggctttgcagacttcacctctgtaagttgagtcctccgcctccgggccaccccactcccttccgcttgcagcttccctgggatttttgtctccttttaaaggcaaacctcccagc

SEQ ID NO: 93060 - DNA, 2265 bp, Artificial Sequence
  derived and/or modified sequence
atggccgctcccctcattcccctctctcagcagattccaactggaaattcgctgtatgaatcctattataagcaggtggatcccgcgtacacgggcagagtcggcgcctctgaggccgccttgtttttgaaaaagagtgggctgtcagacatcatcctcggcaagatttgggacctggcagatccggaaggcaagggtttcctggacaagcaaggcttctatgtggctctgagattggtagcttgtgctcagagcggccatgaggtaacactgtccaatctgaatctgtccatgcccccacctaagttccacgatacgtccagtccgctcatggtgacgccacctagcgccgaagcgcattgggccgttcgcgtggaagagaaagcgaagttcgatgggatctttgaaagtttgctcccgattaacggactactgagcggcgataaagtgaagcccgttcttatgaatagcaaacttccacttgatgtgttgggcagggtctgggatctctcagacattgacaaagatggccatctggaccgagacgaatttgctgtggctatgcatttggtgtatagagcactggaaaaagagcccgtgcctagtgctctccccccatctttgatccccccctctaaacggaaaaagaccgtcttccccggcgccgtgcctgtcctacccgccagtccaccgccaaaggacagcctgcggtccactccctcccacggttccgtctccagtttgaactctactggaagcctgagtcctaagcactctctaaagcagacacagcccacagtgaactgggtagttcccgtggcagacaagatgcgatttgatgaaattttccttaagacagacctcgacctagatggctacgtctccggacaagaggtgaaggagatttttatgcactctggactgactcagaacctcctggcccatatatgggctctggcagacacccgccagactgggaaattaagcaaagatcagtttgccttggctatgtactttattcaacagaaggtctctaaaggaattgatcctccacaggttctgtcacctgacatggtgccccctagcgaacggggcacccctgggccagactcttcaggtagcctgggctccggtgagtttaccggggtgaaggagttggatgacatcagccaagaaattgctcagctgcagcgggaaaaatacagcttagaacaggacatcagagagaaagaggaggccattagacaaaagacctctgaggtgcaagagttacaaaatgacctcgatcgcgagacatcttcactgcaggaacttgaagctcaaaaacaggacgcacaagacaggctggacgagatggatcagcaaaaagccaagcttcgcgacatgctttcagacgtaagacagaagtgtcaagacgagacccagatgattagcagtttaaagactcagattcagtcccaggagtccgacttaaaatcacaggaggacgatcttaaccgagctaaaagtgaactcaaccgtctgcaacaggaggagacccaactcgagcagagcatccaggccggccgggtgcagctcgagaccattatcaaatcactgaaatccacccaggatgagattaatcaggcacggtctaaactgtctcaattacacgaatcccgccaggaggcccataggagcctcgagcaatacgaccaggtgctggacggggctcacggagctagcttgactgatctagccaacctgtccgagggagtcagcttagccgagagggggtcatttggcgccatggacgatccatttaaaaataaagctttgctctttagcaacaacacccaagagctgcaccccgaccctttccaaacagaggacccctttaagagcgaccccttcaagggcgctgacccttttaaaggcgatccctttcagaatgaccctttcgcagagcaacagacaaccagtaccgatccatttggaggcgatccattcaaggagtctgaccccttccggggaagtgccactgacgacttttttaagaaacaaaccaaaaatgacccatttacatctgatccattcactaagaatccatcgctgccgagtaagctggatcccttcgagtcaagcgatcccttcagctcttctagcgtgagctccaaaggctctgacccgtttggcacgttggatcccttcggttctgggtccttcaacagcgcagaaggttttgcagatttcagccagatgtccaaggtgaaggtgcatctatag

SEQ ID NO: 93061 - DNA, 2265 bp, Artificial Sequence
  derived and/or modified sequence
atggccgcccccctcatccccctgagccagcagatccccaccggcaacagcctgtatgagagctactacaagcaggtggaccctgcctacacaggccgggtgggcgccagcgaggccgccctcttcctgaagaagagcggcctgagtgacatcatcctgggcaagatctgggacctggccgaccctgagggcaagggcttcctggacaagcagggcttctacgtggccctgcggctggtggcctgtgcccagagcggccacgaggtgaccctgagcaacctgaacctgtccatgcccccacccaagttccatgacaccagcagccccctgatggtgaccccacccagcgctgaggcccactgggccgtgcgggtggaggagaaggccaagtttgatggcatctttgagagcctgctgcccatcaatggcctgctgagcggggacaaggtgaagcctgtgctgatgaacagcaagctgcccctggatgtgctgggccgggtgtgggacctgagtgacatcgacaaggatggccacctggacagagatgaatttgctgtggccatgcacctggtgtaccgggccctggagaaggagcctgtgcccagcgccctgccccccagcctcatcccccccagcaagaggaagaagacagtgtttcctggagctgtgcctgtgctgcctgccagccccccacccaaggacagcctgcggagcacccccagccacggctctgtgagcagcctgaacagcacaggcagcctgagccccaagcacagcctgaagcagacccagcccaccgtgaactgggtggtgcctgtggccgacaagatgagatttgatgagatcttcctgaagacagacctggacctggatggctacgtgtctggccaggaggtgaaggagatcttcatgcacagcggcctgacccagaacctgctggcccacatctgggccctggccgacacccggcagacaggcaagctgagcaaggaccagtttgccctggccatgtacttcatccagcagaaggtgtccaagggcatcgaccccccccaggtgctgagcccagacatggtgccccccagcgagcggggcaccccaggccctgacagcagcggcagcctgggcagcggggagttcaccggggtgaaggagctggatgacatcagccaggagatcgcccagctgcagcgggagaagtacagcctggagcaggacatccgggagaaggaggaggccatccggcagaagaccagcgaggtgcaggagctgcagaatgacctggaccgggagaccagcagcctgcaggagctggaggcccagaagcaggatgcccaggaccggctggatgagatggaccagcagaaggccaagctgcgggacatgctgagtgatgtgcggcagaagtgccaggatgagacccagatgatcagcagcctgaagacccagatccagagccaggagagtgacctgaagagccaggaggatgacctgaacagagccaagtctgagctgaaccggctgcagcaggaggagacccagctggagcagagcatccaggccggccgggtgcagctggagaccatcatcaagagcctgaagagcacccaggatgagatcaaccaggcccggagcaagctgagccagctgcacgagagccggcaggaggcccacaggagcctggagcagtatgaccaggtgctggatggagcccacggggccagcctgacagacctggccaacctgtctgaaggagtgtccctggccgagcggggcagctttggagccatggatgaccccttcaagaacaaggccctgctcttcagcaacaacacccaggagctgcacccagaccccttccagacagaggaccccttcaagagtgaccccttcaagggagctgaccccttcaagggggaccccttccagaatgacccctttgctgagcagcagaccaccagcacagacccctttggaggagaccccttcaaggagagtgaccccttccggggcagcgccacagatgacttcttcaagaagcagaccaagaatgaccccttcaccagtgaccccttcaccaagaaccccagcctgcccagcaagctggacccctttgagagcagtgaccccttcagcagcagctctgtgagcagcaaaggaagtgaccccttcggcaccctggaccccttcggcagcggcagcttcaacagcgctgagggctttgctgacttcagccagatgagcaaggtgaaggtgcacctgtag

SEQ ID NO: 93062 - DNA, 2265 bp, Artificial Sequence
  derived and/or modified sequence
atggccgcccccctgatccccctgagccagcagatccccaccggcaattccctgtacgaatcttattataagcaggtggaccctgcttacacaggaagggtgggtgcgagcgaggccgctctctttctcaagaaatcgggactgagtgatatcattttgggtaagatctgggatttggcagatcccgagggcaaaggctttctggataagcagggattctatgtagcattgaggttagtagcgtgcgcccagtcggggcatgaagtgaccctctccaatctgaacctcagtatgccgccaccaaaattccacgacacgtcgagtcctttaatggtgacccccccttctgcagaggctcactgggcagtgagagttgaagaaaaagctaaattcgacggaatctttgagtctctgttgcctatcaacggcttgctgtcaggcgacaaggttaaaccagtgttaatgaacagtaaactcccacttgatgtgctggggcgagtctgggacctgagcgacatcgacaaggacggacacctggaccgtgacgagtttgctgtggcgatgcacctggtttatcgggctctggaaaaagaacctgtgccctccgcgctgcctcctagcttaatacctccgtctaaaaggaaaaagaccgtcttccctggcgcagtgccagtactcccggcaagccctcctcctaaagacagtctgcgttctaccccctctcatggatccgtatcgtctctgaacagtactggaagcctgagcccaaagcatagtcttaagcaaacgcagcccactgttaactgggtggtgcctgttgcagataaaatgcgctttgatgagatttttctgaagacagatctggacctagatggttatgtgtcggggcaggaagtgaaggagatcttcatgcactcaggactcacgcagaatctgctcgctcacatctgggcattagcagacactcgccagacagggaagctgagcaaggatcagttcgctttggctatgtactttatccaacagaaagtgtccaagggtattgatcctccccaagtgttgagtcccgacatggtgcccccttcagagcgaggtactccgggtccggatagcagcggttccctaggatctggggaattcactggagtcaaagaactggacgatataagccaggagatcgctcaactgcagagagaaaagtactcgctggagcaagacatcagggaaaaggaggaagccattcgtcagaagacctcagaggtccaggagctgcagaatgatctcgatcgggaaacctcctccctccaggaactggaagcacagaagcaagacgcacaagatcgcctagacgaaatggatcagcagaaggcaaagctgcgcgacatgctgtcagacgtgaggcagaagtgtcaagatgagacccagatgattagctctctgaagactcagatccaatcccaggaatccgacctgaaatcccaggaagacgatctcaatcgcgctaaaagcgagctgaataggctgcagcaggaagagacacagttagagcagtctattcaagctgggcgggttcagttggaaacgataatcaaatccctcaaatccacccaggatgagatcaatcaggcgaggtccaaactgtctcagttacatgaatcccggcaggaggcccatcgttcactagagcagtacgatcaggtgctggacggagcccacggggcatccctgacagaccttgctaatctgagcgagggcgtgagcttggccgagagagggagttttggcgccatggatgatccgttcaaaaacaaagccttgctcttttctaacaacacgcaggagctccatccagaccctttccagacagaggacccgttcaagtctgacccattcaaaggcgctgatccttttaagggagacccattccaaaatgacccatttgcagagcagcagacgacatccacggaccccttcggcggggatccgtttaaagagtccgatccttttcgcggctcggccacggatgatttctttaagaaacagacgaagaacgaccccttcacctcggatccattcacaaagaatccttctctgccctccaagctcgacccgttcgaaagctccgatcctttctcttcatcttccgtaagcagcaagggcagtgaccccttcgggacactggacccttttgggagcggctcctttaactctgcagagggtttcgcagatttcagccagatgtccaaagtgaaagtgcacctgtag

SEQ ID NO: 93063 - DNA, 2265 bp, Artificial Sequence
  derived and/or modified sequence
atggctgcaccgttaatcccgctcagtcagcaaattccaactggtaatagcttgtacgagtcctattataagcaagtcgatcccgcttatacagggagggtgggcgcatccgaagcggcactgtttttgaagaaatctggactatctgacataattctcgggaaaatctgggacttagccgaccctgagggtaaagggttcctggacaagcagggattttacgttgctttaaggctggtggcatgtgcccagtctgggcatgaggtgaccctgagcaacctcaatctctccatgccgcctccaaagtttcacgatacctccagccctcttatggtcaccccgcctagcgccgaggcccactgggcagtcagggtagaggaaaaagctaagttcgatggcattttcgaatcgctcctacccatcaatggactcctcagcggtgacaaagtgaagccagtcttgatgaattccaaacttccgttagacgtgctgggcagggtgtgggatctgtccgatatcgacaaggatggtcatctcgaccgtgatgagtttgccgtggccatgcacctcgtttaccgcgctcttgaaaaggagccagtccccagtgctttgcctccaagcttgattcctccctccaaaaggaagaaaacagtcttccccggagcagtgccagtgttgccagctagtccaccacccaaggactccctgcgcagtacaccctctcatgggagcgtcagctcactgaactcaacaggttctctgtcccccaaacacagcctgaaacagacccaaccaaccgtaaattgggttgtgcccgtggcagacaagatgcgcttcgacgaaatctttctgaaaaccgacctagacctggatggctacgtcagcgggcaggaggtaaaagagatttttatgcactccggattgacccaaaacttgttagcccatatctgggcgttagccgacactagacagactgggaaactctcaaaagatcagtttgcacttgccatgtacttcattcagcaaaaagtgtccaaaggcattgacccacctcaggttctgagccctgacatggttcccccttccgagcggggtacccccggaccagattcgtctgggtccctgggcagcggggagtttacgggagtcaaagagctcgacgatatctcccaagaaatcgcccagctgcagcgagagaagtactcccttgagcaggatatcagagaaaaggaggaggctatacggcaaaagactagtgaggtgcaagaattacagaatgatttggatagggaaacttccagtttacaggagcttgaggcccaaaagcaggatgctcaggatagacttgatgaaatggatcagcaaaaggccaaattgcgggatatgctaagtgacgtgcggcagaagtgtcaagacgagacccagatgatcagctctctcaaaacacagattcagagtcaggaatctgacctcaaatctcaggaagatgatctcaacagagccaagagtgagctgaacagactccagcaagaggaaacccagcttgagcaaagcatccaagccggtcgggtgcagctggagacgattattaaatctttaaaaagcactcaggacgagatcaatcaggcacgttccaagctctctcagctccacgagtccaggcaggaggcccaccgctccctcgagcagtacgaccaggtgctggacggcgctcacggcgcttctctgaccgaccttgccaatctctcagagggggtgtctctagccgagcggggatccttcggagcaatggacgacccttttaaaaataaggcactgctgttcagtaacaatactcaggaactgcatccggacccattccaaacagaggatccctttaaatcagaccctttcaagggcgctgaccctttcaagggggatccgtttcagaatgatcccttcgctgagcaacagaccacctctactgacccattcgggggagatcctttcaaggaatccgatcccttccgaggctctgccacagatgatttcttcaaaaaacagaccaagaacgacccattcacatctgatccctttaccaagaatcccagcttacccagtaaacttgatccatttgagagttccgatcccttctcatcttcttctgtcagcagtaaagggtcagatcctttcggcaccctggatccatttggctcagggagttttaacagcgccgaaggcttcgccgacttttcacagatgtccaaagtgaaggtgcacttgtag

SEQ ID NO: 93064 - protein, 601 aa, Artificial Sequence
  derived and/or modified sequence
MAAPLIPLSQQIPTGNSLYESYYKQVDPAYTGRVGASEAALFLKKSGLSDIILGKIWDLADPEGKGFLDKQGFYVALRLVACAQSGHEVTLSNLNLSMPPPKFHDTSSPLMVTPPSAEAHWAVRVEEKAKFDGIFESLLPINGLLSGDKVKPVLMNSKLPLDVLGRVWDLSDIDKDGHLDRDEFAVAMHLVYRALEKEPVPSALPPSLIPPSKRKKTVFPGAVPVLPASPPPKDSLRSTPSHGSVSSLNSTGSLSPKHSLKQTQPTVNWVVPVADKMRFDEIFLKTDLDLDGYVSGQEVKEIFMHSGLTQNLLAHIWALADTRQTGKLSKDQFALAMYFIQQKVSKGIDPPQVLSPDMVPPSERGTPGPDSSGSLGSGEFTGVKELDDISQEIAQLQREKYSLEQDIREKEEAIRQKTSEVQELQNDLDRETSSLQELEAQKQDAQDRLDEMDQQKAKLRDMLSDVRQKCQDETQMISSLKTQIQSQESDLKSQEDDLNRAKSELNRLQQEETQLEQSIQAGRVQLETIIKSLKSTQDEINQARSKLSQLHESRQEAHRSLEQYDQVLDGAHGASLTDLANLSEGVSLAERGSFGAMVKVE

SEQ ID NO: 93065 - DNA, 1806 bp, Artificial Sequence
  derived and/or modified sequence
atggccgcccccctgatccccctgagccagcagatccccaccggcaacagcctgtacgagagctactacaagcaggtggaccccgcctacaccggcagagtgggcgccagcgaggccgccctgttcctgaagaagagcggcctgagcgacatcatcctgggcaagatctgggacctggccgaccccgagggcaagggcttcctggacaagcagggcttctacgtggccctgagactggtggcctgcgcccagagcggccacgaggtgaccctgagcaacctgaacctgagcatgcccccccccaagttccacgacaccagcagccccctgatggtgaccccccccagcgccgaggcccactgggccgtgagagtggaggagaaggccaagttcgacggcatcttcgagagcctgctgcccatcaacggcctgctgagcggcgacaaggtgaagcccgtgctgatgaacagcaagctgcccctggacgtgctgggcagagtgtgggacctgagcgacatcgacaaggacggccacctggacagagacgagttcgccgtggccatgcacctggtgtacagagccctggagaaggagcccgtgcccagcgccctgccccccagcctgatcccccccagcaagagaaagaagaccgtgttccccggcgccgtgcccgtgctgcccgccagccccccccccaaggacagcctgagaagcacccccagccacggcagcgtgagcagcctgaacagcaccggcagcctgagccccaagcacagcctgaagcagacccagcccaccgtgaactgggtggtgcccgtggccgacaagatgagattcgacgagatcttcctgaagaccgacctggacctggacggctacgtgagcggccaggaggtgaaggagatcttcatgcacagcggcctgacccagaacctgctggcccacatctgggccctggccgacaccagacagaccggcaagctgagcaaggaccagttcgccctggccatgtacttcatccagcagaaggtgagcaagggcatcgaccccccccaggtgctgagccccgacatggtgccccccagcgagagaggcacccccggccccgacagcagcggcagcctgggcagcggcgagttcaccggcgtgaaggagctggacgacatcagccaggagatcgcccagctgcagagagagaagtacagcctggagcaggacatcagagagaaggaggaggccatcagacagaagaccagcgaggtgcaggagctgcagaacgacctggacagagagaccagcagcctgcaggagctggaggcccagaagcaggacgcccaggacagactggacgagatggaccagcagaaggccaagctgagagacatgctgagcgacgtgagacagaagtgccaggacgagacccagatgatcagcagcctgaagacccagatccagagccaggagagcgacctgaagagccaggaggacgacctgaacagagccaagagcgagctgaacagactgcagcaggaggagacccagctggagcagagcatccaggccggcagagtgcagctggagaccatcatcaagagcctgaagagcacccaggacgagatcaaccaggccagaagcaagctgagccagctgcacgagagcagacaggaggcccacagaagcctggagcagtacgaccaggtgctggacggcgcccacggcgccagcctgaccgacctggccaacctgagcgagggcgtgagcctggccgagagaggcagcttcggcgccatggtgaaggtggagtag

SEQ ID NO: 93066 - DNA, 3486 bp, Artificial Sequence
  derived and/or modified sequence
ggaagatggcggcgccgctcatccccctctcccagcagattcccactggaaattcgttgtatgaatcttattacaagcaggtcgatccggcatacacagggagggtgggggcgagtgaagctgcgctttttctaaagaagtctggcctctcggacattatccttgggaagatatgggacttggccgatccagaaggtaaagggttcttggacaaacagggtttctatgttgcactgagactggtggcctgtgcacagagtggccatgaagttaccttgagcaatctgaatttgagcatgccaccgcctaaatttcacgacaccagcagccctctgatggtcacaccgccctctgcagaggcccactgggctgtgagggtggaagaaaaggccaaatttgatgggatttttgaaagcctcttgcccatcaatggtttgctctctggagacaaagtcaagccagtcctcatgaactcaaagctgcctcttgatgtcctgggcagggtctgggacctcagtgacattgacaaggatgggcacttggatcgagatgagttcgctgtggccatgcacttggtgtaccgagccctggagaaggagcccgtgccctccgccctgcccccgtccctcatcccaccctccaagagaaagaagactgtgttccctggcgccgtccccgtcctgcctgccagccccccaccaaaagacagcctccgctccacgccgtcccacggcagcgtcagcagcctcaacagcacagggagcctgtcccccaagcacagcctcaagcaaacacagccaacagtgaactgggtggtgcccgtggcagacaagatgcgatttgatgagatattcctgaagaccgacctggacctggatggctacgtgagtggccaggaggtgaaggagatcttcatgcactcgggcctcacccagaaccttctagcacacatatgggccctggccgatacgaggcaaacggggaagttaagcaaagaccaattcgcgttagctatgtatttcattcagcagaaggtcagtaaaggcatcgaccctcctcaagtcctctcgccggacatggtcccgccttcggagagaggcacgcccggcccggacagttcaggctctctcggctccggggagtttactggcgtgaaggagcttgatgacatcagtcaagagattgcccagttacaaagagagaaatattcactggaacaagacattcgagaaaaggaagaggcaatcagacagaaaaccagcgaggtgcaggaattacaaaatgacctagaccgggaaacaagcagtttgcaggagctcgaggctcagaaacaggatgctcaagaccgcctggacgagatggaccagcagaaggccaagctccgagacatgctgagcgacgtccggcagaagtgccaggatgagactcagatgatctcatcactgaaaacgcaaatccaatctcaggaatctgacttaaagtcccaggaagacgatctgaaccgagccaagtcggagctgaaccgattgcagcaggaggaaacccagctggagcagagcattcaggctgggcgagtccagctggaaaccatcatcaagtccctgaagtcaacgcaagacgaaatcaaccaggcaaggagcaaactttcccagctgcatgaaagccgccaggaggcccacaggagcctggagcagtatgaccaggtgctcgatggagcccatggtgccagcctgaccgacctggccaacctgagcgaaggcgtctccctggcagagaggggcagttttggagccatggtaaaggttgaataaacgtattacagtatggggctctggtcccctggtgtgacagcagaacatcccacccgccagatctgttcatggccaacgttggttccagccaagtgcaggcggctgtctgttgtttttgctgccactttgcgcgttcacaccaggccttgcagcctggcacaggtggccatgctgaatcctggcttccagaacaaagtccaagataggcctggatcctttcagaacctgttttgaatgccctccatctctgcggaagtatttacattgggccaaccacccaagttcagagggcttctcaaacttaaccaaaattggatcagtttctgctcattgtggaaaccccacattctactaatcagggggcaggggacatctgaggggcatgtgtctatgtgtatgtgtgtttccacaaggaacaccttgaaaagcaaatgtgttgctaaagatgaggaagtaatggcaagcagcgccccagggtgttgctctttcaagtaagaattggcctctcctgaaattttggttatgtttaaaaacctctgcactttactctgacctcatgaccctggagttgtgatcaggcctggggcaggggactgtcggccccttacatttttgagagctcttgagcccctgataccaagacaggtgtgaccttttccttaggtggtcacatcccccctgttcacaccagagtctgcccctgcagcctcgaacctggggacatgtagtttcccatttcgtcttggtgctgttccgggagcggatgggccgggccgcgcatgtctggatgtttccttggtgctctgctgcctccagcagctctctccgtgctgccaccctctctcccagggctcctccctggagcccttctgctcctgggcctctgtacgtcatggattcctcttcctccctggaataagagtgagcgctcgtgctctctaaacaccacacttgcctctttatgttcaatgcttgatgtgtttcttttctcagcagccaagtcctcagtcccaaggatttatggggaagcacacgcgtcccctgggctgctgggaaggcactgctggcgagctcatctgtctcttgtgtctggcccccgctgggtgcaccgcctccctctttcctcccatactctcttttctcgtggactcgtaatgaggtggtttccatagccgcccccgggcccgtcatcatcagctttatcgtctaaatttaaacgatgagcattcatccttcatgagttacgagaagccagaactcctcgctttgctccctggctgttcttggcgtgtgtgtttccgtctcacaacccggctcctactttccccatctggcattgtcccctggcaccgcttttggcttgtcctgctcagtcttcgttcagggaacagcttcctcttaaatgtcccttttgcaggtttttagaaaccggttttcttggataaaagttggcagtgaagtggcagtttgcaagtggccagtgattcccccaactccaaagacagatttttacctttctggttatttttgttcatcttttgggcagggcaaaggttacctgagacacaattactttgggaatgtagattaagatacgttacatggaaacttgcaactggcatccgaaagaaaaactgtttttatcctgttgtacaaatacagtttttaaagcatt

SEQ ID NO: 93067 - DNA, 1806 bp, Artificial Sequence
  derived and/or modified sequence
atggcggccccgctcattcccctgtcccagcaaatcccaacaggcaattccctctatgagagttattacaagcaggttgacccagcgtataccggcagggttggagcctctgaagctgctctgttcctgaagaaaagcggactcagtgacatcattctgggaaagatctgggatttggctgatcctgagggcaaaggcttcttggataagcagggattttacgtagcccttcggctggtggcctgcgcacaatccggtcatgaagtgaccctgtcaaacctcaacctgagcatgccaccccccaagtttcacgacaccagtagccctctcatggtgacacccccctccgcggaagcccattgggccgtcagggtggaggaaaaggctaagttcgacgggatctttgagtccctcttacccataaatgggctgctgtccggcgacaaggtgaaaccagtgttgatgaattctaagctcccactcgatgtactggggagagtgtgggacctcagcgatatagataaggacggccacctggatcgcgatgagttcgccgtggccatgcacctcgtctaccgtgcgctagagaaagagcccgtcccctccgccctgccaccatcactcataccaccctccaagcgtaaaaagacggtgtttccgggcgcagtgccagtactcccagctagcccacctcctaaggatagtttacggtcgaccccctctcacggaagtgtctcttccctgaacagtaccggctccctctccccgaagcacagcctgaagcaaacacaacctaccgtcaactgggtcgttccggtcgccgacaagatgcggtttgatgagatcttcctgaaaactgatttagatctggatggctacgtcagcggacaggaggtcaaagaaattttcatgcactcaggcctgacgcagaaccttttggctcatatctgggccctcgccgacactcggcagaccggcaaactttctaaagatcagttcgccctcgccatgtatttcatccaacagaaagtatccaagggcatcgacccaccacaggttctgtcccctgatatggtgccccctagcgagcgaggcacgcccggcccagattctagcgggtccctcggaagcggagaattcacaggtgtcaaggagttagacgacatctcacaggaaatcgcccagctccagagggaaaagtatagcctcgagcaggatattcgtgaaaaggaagaagccattagacaaaaaacctctgaagtgcaagaacttcagaacgacctcgacagggaaacgagttcactccaagaactggaggcgcagaaacaggatgcccaggatcgattggacgagatggaccagcagaaagccaagttgcgcgatatgctctcagatgtgcggcagaagtgtcaggatgaaacccaaatgatcagcagcctgaagactcagatccagtcgcaagaatccgatttaaaatctcaggaagacgatttgaaccgggccaaatctgagctgaaccggctgcagcaagaggagacacagctggagcaatcgatccaagcaggacgtgtacagttggaaacaattatcaaatctttgaaaagcacccaggacgagattaaccaagccagatctaagctctcccagctacatgagagcaggcaagaagctcaccgatctctagaacagtatgatcaggttctggatggagcccacggagcaagtctgacagatcttgctaatctgagcgagggagtgtccttagccgaaaggggtagttttggagcgatggttaaggtggaatag

SEQ ID NO: 93068 - DNA, 1806 bp, Artificial Sequence
  derived and/or modified sequence
atggccgcccccctcatccccctgagccagcagatccccaccggcaacagcctgtatgagagctactacaagcaggtggaccctgcctacacaggccgggtgggcgccagcgaggccgccctcttcctgaagaagagcggcctgagtgacatcatcctgggcaagatctgggacctggccgaccctgagggcaagggcttcctggacaagcagggcttctacgtggccctgcggctggtggcctgtgcccagagcggccacgaggtgaccctgagcaacctgaacctgtccatgcccccacccaagttccatgacaccagcagccccctgatggtgaccccacccagcgctgaggcccactgggccgtgcgggtggaggagaaggccaagtttgatggcatctttgagagcctgctgcccatcaatggcctgctgagcggggacaaggtgaagcctgtgctgatgaacagcaagctgcccctggatgtgctgggccgggtgtgggacctgagtgacatcgacaaggatggccacctggacagagatgaatttgctgtggccatgcacctggtgtaccgggccctggagaaggagcctgtgcccagcgccctgccccccagcctcatcccccccagcaagaggaagaagacagtgtttcctggagctgtgcctgtgctgcctgccagccccccacccaaggacagcctgcggagcacccccagccacggctctgtgagcagcctgaacagcacaggcagcctgagccccaagcacagcctgaagcagacccagcccaccgtgaactgggtggtgcctgtggccgacaagatgagatttgatgagatcttcctgaagacagacctggacctggatggctacgtgtctggccaggaggtgaaggagatcttcatgcacagcggcctgacccagaacctgctggcccacatctgggccctggccgacacccggcagacaggcaagctgagcaaggaccagtttgccctggccatgtacttcatccagcagaaggtgtccaagggcatcgaccccccccaggtgctgagcccagacatggtgccccccagcgagcggggcaccccaggccctgacagcagcggcagcctgggcagcggggagttcaccggggtgaaggagctggatgacatcagccaggagatcgcccagctgcagcgggagaagtacagcctggagcaggacatccgggagaaggaggaggccatccggcagaagaccagcgaggtgcaggagctgcagaatgacctggaccgggagaccagcagcctgcaggagctggaggcccagaagcaggatgcccaggaccggctggatgagatggaccagcagaaggccaagctgcgggacatgctgagtgatgtgcggcagaagtgccaggatgagacccagatgatcagcagcctgaagacccagatccagagccaggagagtgacctgaagagccaggaggatgacctgaacagagccaagtctgagctgaaccggctgcagcaggaggagacccagctggagcagagcatccaggccggccgggtgcagctggagaccatcatcaagagcctgaagagcacccaggatgagatcaaccaggcccggagcaagctgagccagctgcacgagagccggcaggaggcccacaggagcctggagcagtatgaccaggtgctggatggagcccacggggccagcctgacagacctggccaacctgtctgaaggagtgtccctggccgagcggggcagctttggagccatggtgaaggtggagtag

SEQ ID NO: 93069 - DNA, 1806 bp, Artificial Sequence
  derived and/or modified sequence
atggccgcccccctgatccccctgagccagcagatccccaccggcaattctctctacgagtcatactacaaacaagtggaccccgcctacaccggacgggtgggcgcaagtgaagccgcgctatttctgaagaagtctgggttgagcgatatcattctcgggaagatatgggatcttgccgatccggaaggaaagggctttctagacaaacagggcttctatgtcgcattgcggcttgtggcctgtgcccagagcggccacgaggtcacactgtcaaacttaaatctgtcaatgcccccacctaaatttcacgacacttcttcacccctgatggtaacccccccgagcgccgaagcgcactgggcagtccgggtagaagaaaaggccaagttcgacggtatctttgagagcctattgccaattaacggccttctttctggcgacaaagtgaagccagtgctgatgaactctaagttacccttggacgtactcggaagagtgtgggatctgagtgacatagacaaggatgggcacctggatagggacgagttcgcagtcgcgatgcacctcgtgtacagagcactcgaaaaagaacccgtaccaagtgcccttccaccctcattgatacccccctctaagaggaagaagaccgtgtttcctggggcagttcccgtcctgcccgcctctcccccacctaaagactctttgcgcagtacacctagtcatgggtccgtgtctagtctcaactctacgggcagtctttccccgaaacactctctaaaacagacccaaccaactgtgaattgggtggtgcctgtggccgacaaaatgcggttcgacgagatctttctaaagacagatctcgatctggacggatacgtctctggccaggaagtgaaagagattttcatgcacagcgggttgacccagaatttgttggctcacatttgggcgctcgctgatacccggcagaccggcaaactgtctaaagaccagttcgcgctggccatgtatttcatccagcagaaggtgtctaagggcatcgacccaccacaggttttatccccagatatggtgccaccgtcagaacggggaacccctgggccagactcatcaggctctttgggctccggggagtttacaggagtgaaggagctggatgacatctctcaggagatcgctcagctgcagagggagaaatattctctggagcaagatataagagagaaggaagaagctattaggcagaaaactagcgaggtgcaggagttgcagaacgaccttgatagagaaaccagcagcctgcaggaattggaggctcagaagcaggacgctcaggaccgcctggatgagatggaccagcagaaagccaagcttagggacatgctcagcgatgtcagacagaagtgtcaagatgaaacccagatgatttctagtctgaagacccagatccaaagccaggagagtgatctgaagtcccaggaggatgacctaaaccgggcaaaaagcgagctcaaccggctgcaacaagaggaaactcagctggagcagtccatccaggcaggccgcgtacaactggaaactataatcaagagtttgaagtccacccaggacgaaattaatcaggcccgcagcaaattgagccagctacatgagtcacgccaggaagctcaccgctcgcttgagcagtacgaccaagtgctcgacggagcccatggtgctagtttgacggatcttgctaacctgtcagaaggagtttctctggctgagagaggctcattcggcgcaatggttaaagtcgaatag

SEQ ID NO: 93070 - DNA, 1806 bp, Artificial Sequence
  derived and/or modified sequence
atggccgctcctcttattccactgagtcaacaaattccaactggcaactcactgtacgagtcatattataaacaggtggacccagcctacaccggtagagtcggagcttctgaagccgctctgttcctcaagaaaagcggactgagtgatatcatcctggggaaaatttgggatctagccgacccggaagggaagggcttcctggacaagcaaggcttctacgttgcactgaggctggtggcgtgcgcgcagtctgggcacgaagtgaccctgtctaatttgaatctcagcatgcctcccccaaagtttcacgacacaagctctccccttatggttaccccaccgagcgccgaggcccattgggccgtgcgggtggaggagaaagcgaaatttgacggaattttcgaatctctgctcccaatcaatggtctgttgtcgggagataaagtgaagcccgtgctgatgaatagtaaactgcccttggatgtgctgggaagagtgtgggacttatccgacatcgacaaagacgggcatcttgacagggatgagtttgcagtggcgatgcaccttgtgtatcgggcactcgagaaggaacccgtgccctccgcgctgccaccctcactgattccccctagcaaacggaaaaaaacagttttccctggagcggtgcctgttttgccagcgagcccaccacctaaggatagcctgcggtcaaccccctcacatggctcggtctcttcacttaatagcactgggtctctatctcctaagcacagtctgaaacagacccaacctaccgttaattgggtcgtgccggtggcggacaagatgcgtttcgacgagattttcctgaaaactgatctggacctggacggttatgtgagcggacaggaagttaaagagatcttcatgcacagcgggctgacacagaatttgctggctcatatctgggcactggcagatactcgacagaccggaaagctgtctaaggaccagttcgctcttgccatgtacttcattcagcagaaggtatctaagggtatcgacccacctcaggtattgtccccagacatggttcccccatcagaacgcggtacgccaggaccagactcttccggatccctgggttcaggagaatttacgggtgtgaaggagctcgatgacatctcacaagaaatagcgcagctgcagagggagaaatactcactggaacaggacatccgtgaaaaggaagaagccatcaggcagaaaacttccgaagtgcaggagcttcaaaacgaccttgatcgcgaaacctcaagcctgcaggaattggaagctcagaagcaggacgctcaagataggttggacgaaatggatcagcagaaagctaagcttcgtgatatgctctctgatgtcaggcaaaaatgtcaggacgagactcagatgatatcttctctgaaaacccagatccagagccaggaatccgatctaaagtcgcaagaggatgatcttaaccgagccaaaagtgaactgaataggttgcagcaggaggaaactcagcttgaacaaagcatccaagctggcagggtgcagctggaaactattattaagagtctgaagtccacacaggatgaaatcaatcaggccagatcaaaactgagccaattgcatgaaagtcgacaagaagcccatcggtccctggaacaatacgaccaggtgttagatggcgctcatggagcttcgctgaccgatctggcaaatctgagcgaaggcgtttctctggccgaacgagggtctttcggcgctatggtcaaggtcgagtag

SEQ ID NO: 93071 - protein, 463 aa, Artificial Sequence
  derived and/or modified sequence
MEADGAGEQMRPLLTRGPDEEAVVDLGKTSSTVNTKFEKEELESHRAVYIGVHVPFSKESRRRHRHRGHKHHHRRRKDKESDKEDGRESPSYDTPSQRVQFILGTEDDDEEHIPHDLFTEMDELCYRDGEEYEWKETARWLKFEEDVEDGGDRWSKPYVATLSLHSLFELRSCILNGTVMLDMRASTLDEIADMVLDNMIASGQLDESIRENVREALLKRHHHQNEKRFTSRIPLVRSFADIGKKHSDPHLLERNGILASPQSAPGNLDNSKSGEIKGNGSGGSRENSTVDFSKVDMNFMRKIPTGAEASNVLVGEVDFLERPIIAFVRLAPAVLLTGLTEVPVPTRFLFLLLGPAGKAPQYHEIGRSIATLMTDEIFHDVAYKAKDRNDLLSGIDEFLDQVTVLPPGEWDPSIRIEPPKSVPSQEKRKIPVFHNGSTPTLGETPKEAAHHAGPELQRTGRVQ

SEQ ID NO: 93072 - protein, 1131 aa, Artificial Sequence
  derived and/or modified sequence
MEADGAGEQMRPLLTRGPDEEAVVDLGKTSSTVNTKFEKEELESHRAVYIGVHVPFSKESRRRHRHRGHKHHHRRRKDKESDKEDGRESPSYDTPSQRVQFILGTEDDDEEHIPHDLFTEMDELCYRDGEEYEWKETARWLKFEEDVEDGGDRWSKPYVATLSLHSLFELRSCILNGTVMLDMRASTLDEIADMVLDNMIASGQLDESIRENVREALLKRHHHQNEKRFTSRIPLVRSFADIGKKHSDPHLLERNGILASPQSAPGNLDNSKSGEIKGNGSGGSRENSTVDFSKVDMNFMRKIPTGAEASNVLVGEVDFLERPIIAFVRLAPAVLLTGLTEVPVPTRFLFLLLGPAGKAPQYHEIGRSIATLMTDEIFHDVAYKAKDRNDLLSGIDEFLDQVTVLPPGEWDPSIRIEPPKSVPSQEKRKIPVFHNGSTPTLGETPKEAAHHAGPELQRTGRLFGGLILDIKRKAPFFLSDFKDALSLQCLASILFLYCACMSPVITFGGLLGEATEGRISAIESLFGASLTGIAYSLFAGQPLTILGSTGPVLVFEKILYKFCRDYQLSYLSLRTSIGLWTSFLCIVLVATDASSLVCYITRFTEEAFAALICIIFIYEALEKLFDLGETYAFNMHNNLDKLTSYSCVCTEPPNPSNETLAQWKKDNITAHNISWRNLTVSECKKLRGVFLGSACGHHGPYIPDVLFWCVILFFTTFFLSSFLKQFKTKRYFPTKVRSTISDFAVFLTIVIMVTIDYLVGVPSPKLHVPEKFEPTHPERGWIISPLGDNPWWTLLIAAIPALLCTILIFMDQQITAVIINRKEHKLKKGAGYHLDLLMVGVMLGVCSVMGLPWFVAATVLSISHVNSLKVESECSAPGEQPKFLGIREQRVTGLMIFILMGLSVFMTSVLKFIPMPVLYGVFLYMGVSSLKGIQLFDRIKLFGMPAKHQPDLIYLRYVPLWKVHIFTVIQLTCLVLLWVIKVSAAAVVFPMMVLALVFVRKLMDLCFTKRELSWLDDLMPESKKKKEDDKKKKEKEEAERMLQDDDDTVHLPFEGGSLLQIPVKALKYSVDPSIVNISDEMAKTAQWKALSMNTENAKVTRSNMSPDKPVSVKISFEDEPRKKYVDAETSL

SEQ ID NO: 93073 - DNA, 2403 bp, Artificial Sequence
  derived and/or modified sequence
atggaggtggtggaggccgagaagatcgtgctgctgaccagcgccagattcctgttcctgctgctgggccccgccggcaaggccccccagtaccacgagatcggcagaagcatcgccaccctgatgaccgacgagatcttccacgacgtggcctacaaggccaaggacagaaacgacctgctgagcggcatcgacgagttcctggaccaggtgaccgtgctgccccccggcgagtgggaccccagcatcagaatcgagccccccaagagcgtgcccagccaggagaagagaaagatccccgtgttccacaacggcagcacccccaccctgggcgagacccccaaggaggccgcccaccacgccggccccgagctgcagagaaccggcagactgttcggcggcctgatcctggacatcaagagaaaggcccccttcttcctgagcgacttcaaggacgccctgagcctgcagtgcctggccagcatcctgttcctgtactgcgcctgcatgagccccgtgatcaccttcggcggcctgctgggcgaggccaccgagggcagaatcagcgccatcgagagcctgttcggcgccagcctgaccggcatcgcctacagcctgttcgccggccagcccctgaccatcctgggcagcaccggccccgtgctggtgttcgagaagatcctgtacaagttctgcagagactaccagctgagctacctgagcctgagaaccagcatcggcctgtggaccagcttcctgtgcatcgtgctggtggccaccgacgccagcagcctggtgtgctacatcaccagattcaccgaggaggccttcgccgccctgatctgcatcatcttcatctacgaggccctggagaagctgttcgacctgggcgagacctacgccttcaacatgcacaacaacctggacaagctgaccagctacagctgcgtgtgcaccgagccccccaaccccagcaacgagaccctggcccagtggaagaaggacaacatcaccgcccacaacatcagctggagaaacctgaccgtgagcgagtgcaagaagctgagaggcgtgttcctgggcagcgcctgcggccaccacggcccctacatccccgacgtgctgttctggtgcgtgatcctgttcttcaccaccttcttcctgagcagcttcctgaagcagttcaagaccaagagatacttccccaccaaggtgagaagcaccatcagcgacttcgccgtgttcctgaccatcgtgatcatggtgaccatcgactacctggtgggcgtgcccagccccaagctgcacgtgcccgagaagttcgagcccacccaccccgagagaggctggatcatcagccccctgggcgacaacccctggtggaccctgctgatcgccgccatccccgccctgctgtgcaccatcctgatcttcatggaccagcagatcaccgccgtgatcatcaacagaaaggagcacaagctgaagaagggcgccggctaccacctggacctgctgatggtgggcgtgatgctgggcgtgtgcagcgtgatgggcctgccctggttcgtggccgccaccgtgctgagcatcagccacgtgaacagcctgaaggtggagagcgagtgcagcgcccccggcgagcagcccaagttcctgggcatcagagagcagagagtgaccggcctgatgatcttcatcctgatgggcctgagcgtgttcatgaccagcgtgctgaagttcatccccatgcccgtgctgtacggcgtgttcctgtacatgggcgtgagcagcctgaagggcatccagctgttcgacagaatcaagctgttcggcatgcccgccaagcaccagcccgacctgatctacctgagatacgtgcccctgtggaaggtgcacatcttcaccgtgatccagctgacctgcctggtgctgctgtgggtgatcaaggtgagcgccgccgccgtggtgttccccatgatggtgctggccctggtgttcgtgagaaagctgatggacctgtgcttcaccaagagagagctgagctggctggacgacctgatgcccgagagcaagaagaagaaggaggacgacaagaagaagaaggagaaggaggaggccgagagaatgctgcaggacgacgacgacaccgtgcacctgcccttcgagggcggcagcctgctgcagatccccgtgaaggccctgaagtacagcgtggaccccagcatcgtgaacatcagcgacgagatggccaagaccgcccagtggaaggccctgagcatgaacaccgagaacgccaaggtgaccagaagcaacatgagccccgacaagcccgtgagcgtgaagatcagcttcgaggacgagcccagaaagaagtacgtggacgccgagaccagcctgtag

SEQ ID NO: 93074 - DNA, 3396 bp, Artificial Sequence
  derived and/or modified sequence
atggaggccgacggcgccggcgagcagatgagacccctgctgaccagaggccccgacgaggaggccgtggtggacctgggcaagaccagcagcaccgtgaacaccaagttcgagaaggaggagctggagagccacagagccgtgtacatcggcgtgcacgtgcccttcagcaaggagagcagaagaagacacagacacagaggccacaagcaccaccacagaagaagaaaggacaaggagagcgacaaggaggacggcagagagagccccagctacgacacccccagccagagagtgcagttcatcctgggcaccgaggacgacgacgaggagcacatcccccacgacctgttcaccgagatggacgagctgtgctacagagacggcgaggagtacgagtggaaggagaccgccagatggctgaagttcgaggaggacgtggaggacggcggcgacagatggagcaagccctacgtggccaccctgagcctgcacagcctgttcgagctgagaagctgcatcctgaacggcaccgtgatgctggacatgagagccagcaccctggacgagatcgccgacatggtgctggacaacatgatcgccagcggccagctggacgagagcatcagagagaacgtgagagaggccctgctgaagagacaccaccaccagaacgagaagagattcaccagcagaatccccctggtgagaagcttcgccgacatcggcaagaagcacagcgacccccacctgctggagagaaacggcatcctggccagcccccagagcgcccccggcaacctggacaacagcaagagcggcgagatcaagggcaacggcagcggcggcagcagagagaacagcaccgtggacttcagcaaggtggacatgaacttcatgagaaagatccccaccggcgccgaggccagcaacgtgctggtgggcgaggtggacttcctggagagacccatcatcgccttcgtgagactggcccccgccgtgctgctgaccggcctgaccgaggtgcccgtgcccaccagattcctgttcctgctgctgggccccgccggcaaggccccccagtaccacgagatcggcagaagcatcgccaccctgatgaccgacgagatcttccacgacgtggcctacaaggccaaggacagaaacgacctgctgagcggcatcgacgagttcctggaccaggtgaccgtgctgccccccggcgagtgggaccccagcatcagaatcgagccccccaagagcgtgcccagccaggagaagagaaagatccccgtgttccacaacggcagcacccccaccctgggcgagacccccaaggaggccgcccaccacgccggccccgagctgcagagaaccggcagactgttcggcggcctgatcctggacatcaagagaaaggcccccttcttcctgagcgacttcaaggacgccctgagcctgcagtgcctggccagcatcctgttcctgtactgcgcctgcatgagccccgtgatcaccttcggcggcctgctgggcgaggccaccgagggcagaatcagcgccatcgagagcctgttcggcgccagcctgaccggcatcgcctacagcctgttcgccggccagcccctgaccatcctgggcagcaccggccccgtgctggtgttcgagaagatcctgtacaagttctgcagagactaccagctgagctacctgagcctgagaaccagcatcggcctgtggaccagcttcctgtgcatcgtgctggtggccaccgacgccagcagcctggtgtgctacatcaccagattcaccgaggaggccttcgccgccctgatctgcatcatcttcatctacgaggccctggagaagctgttcgacctgggcgagacctacgccttcaacatgcacaacaacctggacaagctgaccagctacagctgcgtgtgcaccgagccccccaaccccagcaacgagaccctggcccagtggaagaaggacaacatcaccgcccacaacatcagctggagaaacctgaccgtgagcgagtgcaagaagctgagaggcgtgttcctgggcagcgcctgcggccaccacggcccctacatccccgacgtgctgttctggtgcgtgatcctgttcttcaccaccttcttcctgagcagcttcctgaagcagttcaagaccaagagatacttccccaccaaggtgagaagcaccatcagcgacttcgccgtgttcctgaccatcgtgatcatggtgaccatcgactacctggtgggcgtgcccagccccaagctgcacgtgcccgagaagttcgagcccacccaccccgagagaggctggatcatcagccccctgggcgacaacccctggtggaccctgctgatcgccgccatccccgccctgctgtgcaccatcctgatcttcatggaccagcagatcaccgccgtgatcatcaacagaaaggagcacaagctgaagaagggcgccggctaccacctggacctgctgatggtgggcgtgatgctgggcgtgtgcagcgtgatgggcctgccctggttcgtggccgccaccgtgctgagcatcagccacgtgaacagcctgaaggtggagagcgagtgcagcgcccccggcgagcagcccaagttcctgggcatcagagagcagagagtgaccggcctgatgatcttcatcctgatgggcctgagcgtgttcatgaccagcgtgctgaagttcatccccatgcccgtgctgtacggcgtgttcctgtacatgggcgtgagcagcctgaagggcatccagctgttcgacagaatcaagctgttcggcatgcccgccaagcaccagcccgacctgatctacctgagatacgtgcccctgtggaaggtgcacatcttcaccgtgatccagctgacctgcctggtgctgctgtgggtgatcaaggtgagcgccgccgccgtggtgttccccatgatggtgctggccctggtgttcgtgagaaagctgatggacctgtgcttcaccaagagagagctgagctggctggacgacctgatgcccgagagcaagaagaagaaggaggacgacaagaagaagaaggagaaggaggaggccgagagaatgctgcaggacgacgacgacaccgtgcacctgcccttcgagggcggcagcctgctgcagatccccgtgaaggccctgaagtacagcgtggaccccagcatcgtgaacatcagcgacgagatggccaagaccgcccagtggaaggccctgagcatgaacaccgagaacgccaaggtgaccagaagcaacatgagccccgacaagcccgtgagcgtgaagatcagcttcgaggacgagcccagaaagaagtacgtggacgccgagaccagcctgtag

SEQ ID NO: 93075 - DNA, 2406 bp, Artificial Sequence
  derived and/or modified sequence
gtcatggaggtggtcgaggccgaaaagatagtattactaacttcagcgagatttctgttcctgttgcttggacccgcgggcaaagctccacagtatcacgaaatcggaagatcgattgccactctgatgactgacgagatcttccacgatgtggcttataaggccaaagacagaaatgatcttctgagcggaattgacgagtttctggatcaagtgaccgtgttgccccccggagagtgggaccccagcatccgcatagaacctcctaaatcagttccctcccaagagaaaagaaaaattcctgttttccataatggctccacccccaccctgggagagacacctaaggaggccgcacaccatgcaggccctgagctgcagcggacgggacgtctcttcggaggcctgatcctggatatcaagcgaaaggcccccttcttcctgtcagactttaaggatgcactgtccttacaatgtctagcctcgatcctgttcctgtactgcgcctgtatgtccccggtgatcacatttggagggctcttaggggaggccacagagggaagaatatccgccatagagtctcttttcggggcttctctcaccggcattgcatattccctctttgctggccagccactcacgatcctcggcagtacgggacccgtgttagtcttcgaaaagatcttatacaaattctgcagggactaccagctctcctacctcagtctcaggaccagcataggtctatggacatcgttcctgtgtatcgtgctggtcgcgacagatgcaagcagtctggtgtgctacatcacgcgttttacagaggaggctttcgctgccttgatctgcattatttttatctacgaggctctggaaaagctcttcgatttaggggaaacttacgccttcaatatgcataataacctcgacaaactcacctcttacagctgcgtgtgtacagaaccgccgaacccgtctaatgaaacactggctcagtggaaaaaggataatatcactgctcacaatattagctggaggaatctgactgtgtccgaatgtaagaagctgaggggtgttttcctcgggtctgcatgtggtcatcacgggccatacatccctgatgtgctcttctggtgcgtgatccttttcttcacaactttcttcttaagcagcttcctcaagcagtttaaaaccaagagatacttcccgacaaaggtgcgaagtactatttctgatttcgccgttttcttgacaatagttattatggttactatcgactacctcgttggcgtaccgtcacccaaactacatgtcccagaaaagtttgaacctacgcatccggaaagagggtggattatcagcccattgggggacaatccctggtggaccttgttaatcgcagcaatccccgccctgctttgcactatcctgatatttatggaccaacagatcacggccgtgatcattaaccggaaggagcataagctgaagaagggggccgggtatcatctggatctccttatggttggggtcatgcttggcgtctgttccgtcatgggcctgccttggttcgtcgccgcaacagtgctctctatttcacacgtaaactccctgaaagtagaaagcgagtgctccgcccctggtgaacagcctaaatttttgggtattcgtgagcagagggtgaccgggctcatgatcttcattctgatggggttgtctgtctttatgactagtgtcctgaagttcatccccatgcccgtgctgtacggagtttttctgtacatgggcgtgtcttcattgaaggggatccagctatttgatagaattaagttgtttggaatgccagcaaagcaccagcccgatttgatttaccttcgctatgtccctctgtggaaagtgcacattttcactgtgatccagcttacatgtctcgtccttctatgggtgattaaggtgtcagctgccgccgtcgtctttccaatgatggtgctggcgctggtgttcgtgcgtaaattaatggacttgtgttttacgaagagggagctaagctggctggacgatcttatgcctgaatctaagaagaaaaaagaggatgataaaaaaaaaaaggagaaggaggaggccgaacggatgttgcaggatgacgatgatactgttcacctgcctttcgagggcggaagtctgctccaaattcccgttaaggctctgaaatattccgtcgatccatccatagtcaacatcagcgacgaaatggcgaaaaccgcccaatggaaagcgctgtccatgaacacagaaaacgctaaggtcacccgtagcaatatgtcccctgataaacctgtgagcgtcaagatcagctttgaggatgagcctcggaagaaatatgtcgacgccgaaacttctctgtag

SEQ ID NO: 93076 - DNA, 2403 bp, Artificial Sequence
  derived and/or modified sequence
atggaggtcgtggaagcagagaaaattgtgctcctaacttcggccagattcctgtttcttctgctgggtcctgctggaaaggctccccaataccacgagataggcaggtcaatagctaccctgatgactgacgagatctttcatgacgtggcatacaaggccaaggatcggaatgacctcctcagcgggatcgatgagttcctagaccaggttacagtgcttcccccaggcgagtgggacccgtctatccggattgaacctcctaagtccgtgccttcccaagagaagaggaagataccagttttccataatggctctacaccgactctgggggagaccccaaaagaagctgcccatcatgccgggccagagctgcagagaacggggcgcttatttgggggtttgatcctggacattaagagaaaagcaccattcttcctgtccgattttaaggatgcactttccctgcagtgtctcgccagtattctgtttttgtactgcgcttgcatgagtcctgtgatcacatttgggggccttttaggtgaagctacagaaggtagaatcagcgctatcgaaagccttttcggtgcctctctgaccggaatcgcctattctctcttcgcgggtcagcccctgaccatcttaggtagcactgggccagttctggtgtttgagaaaatactgtacaagttctgtcgcgattaccagttatcatacctctcgctgaggacttccattggactgtggacctccttcctgtgtatcgtgctggtggcaactgacgccagctcactcgtgtgttatataacacgctttaccgaggaggcctttgccgcattgatatgtatcatttttatttacgaagctttagagaagctattcgatttgggagagacatacgccttcaatatgcacaataacctggacaagctaacgagttactcctgcgtctgtacagaaccacccaaccctagcaacgagaccctggctcaatggaagaaggacaatattacagcgcacaatatttcttggcgaaatctgaccgtttcagagtgtaaaaagctgcgcggggtgtttttgggtagtgcttgcgggcaccacgggccctatatccccgatgtgctgttttggtgtgttatcttgttcttcacaaccttttttctgagctccttcctgaaacagtttaaaactaagagatattttcccactaaggtgcgcagcactatcagtgatttcgccgtgtttttgaccattgtgatcatggttaccattgactacctggtgggcgtaccctcccccaaactgcacgttcctgagaagttcgagcctacccatcccgagcgtggatggatcatttcccctctaggcgacaatccgtggtggacacttcttatcgccgccattccagcccttctttgtaccattctgatctttatggatcagcaaattacagccgtgatcataaaccggaaggagcacaagttgaagaaaggcgctggttaccacttagacctcttgatggtgggtgtcatgttaggcgtatgcagcgtgatgggtcttccttggtttgtggcagcaacagtgctgtctatctctcacgtcaatagcttgaaggtggagtctgagtgcagtgctcccggtgagcaacccaagttcttaggaatacgggaacagcgcgtgaccgggctgatgatcttcattctgatggggctgtcggtgtttatgacatctgtgttgaaattcattcctatgcctgttctgtatggagtattcctgtatatgggcgtttcctccttaaagggaatacaactgtttgaccgcatcaagctgtttggcatgcccgcaaaacaccagccagatctgatatatctgagatacgttcccctgtggaaggtgcacattttcactgtgatacaattgacgtgcttggtcctgctgtgggtgattaaagtgtccgctgcagctgtcgtcttccccatgatggtgctagctctagtctttgttcgcaagctgatggatttgtgttttaccaagcgggaattatcctggctggacgaccttatgccagaatccaagaagaaaaaagaagatgataagaaaaagaaggagaaagaagaggccgagaggatgttacaggacgacgatgatacagtgcacctgccgtttgaaggtggcagccttctgcagatccccgtgaaagccctaaagtactctgttgatccatctattgtgaatatctctgacgaaatggctaaaaccgcccagtggaaggctctgtccatgaataccgaaaacgccaaggtgacgcggtccaacatgtcccctgacaaaccagtgtctgtgaaaatctctttcgaagatgagcctaggaaaaaatacgtggatgctgagacttctctctag

SEQ ID NO: 93077 - DNA, 3396 bp, Artificial Sequence
  derived and/or modified sequence
atggaggcagacggtgccggtgagcaaatgcggcccctgctgacaagggggcctgacgaagaagctgtggttgatctgggcaaaactagcagtacggtcaatactaaatttgagaaggaggaattagaatcacaccgggccgtgtacattggggtacatgtgcccttctccaaagaatctagaaggcgtcacagacacagaggacacaagcaccatcaccggagaagaaaagacaaagagtctgataaagaggacggtcgcgaaagcccatcatacgacactccttctcagcgagtgcaatttatactgggtaccgaggatgacgatgaggagcacattcctcacgacttgtttacagaaatggatgagctctgctatcgtgacggggaggaatacgagtggaaagagacagcgcgctggttgaagttcgaagaggacgtggaagatggcggcgataggtggagtaagccttatgtcgccaccctgtctctacactctctgttcgaactccgatcctgtatattgaacggcaccgtcatgttagatatgcgggcttccaccctggacgaaatcgcagatatggtactagataatatgattgccagcggccagttggacgagtctattagagagaacgtgcgcgaggcgctgctcaaacgacaccatcatcagaacgaaaagcggttcacaagcaggatacccttagtaaggtccttcgcagacatcggaaagaagcactctgacccacacctgctcgaaaggaacgggatcctcgcttctccccagtcagcacccggcaacctggacaattccaaatccggcgagattaagggaaatggctccggtgggtcccgggagaattcgaccgtcgatttctcgaaagtggacatgaattttatgcgaaagattccgaccggtgctgaagcttcaaacgtgctcgtcggcgaggtcgacttcctggaacgccctatcattgcctttgtgcgactggcccctgcagttctcctgactggactgactgaagttcctgttccaacccgtttcctgttcctgctgctaggacctgccggaaaggctcctcagtatcatgagatcggaaggtcgatcgctacactgatgacagatgagattttccatgacgttgcctacaaagccaaggataggaatgacctgctgtccgggatcgatgaattcctagaccaggttacagtgctccctccaggtgaatgggatccgtcaatacggatcgagcccccaaagagcgtacctagccaggagaagagaaagattccagtatttcacaacgggtcaaccccaaccctcggtgaaactccaaaggaagccgcgcaccatgccgggcctgagcttcaaagaacagggcgtctgtttgggggtcttattttggacatcaagcggaaagcgccgttttttcttagcgatttcaaagacgccctgtccctgcaatgcctggcaagcatcctgttcctgtattgtgcctgcatgagcccggtcattacattcggcgggctcctgggggaggctaccgagggtcgtatctccgccatcgaatccctcttcggagcaagcctgacaggcatcgcatatagtctcttcgcagggcagccgctgactatactcggaagtactggacccgtgctggtattcgaaaagatcttgtacaagttctgccgggattatcagctgtcctatctgtccctcaggactagtattggattgtggacttctttcctctgcattgtcctggtagccacagacgcctcatccctggtctgttacatcactaggttcaccgaagaggccttcgccgctctcatttgcattatttttatctacgaagccctggaaaagcttttcgatttaggggaaacttacgccttcaatatgcacaataacctagataaacttacaagctactcgtgcgtttgtactgagcccccaaatccgagcaatgaaactctggcccaatggaagaaggataacataactgcccacaacattagctggcggaatctgaccgtgtccgagtgtaagaagcttagaggggtcttcttagggtctgcttgtggccatcatggtccatacatccccgacgtgctgttctggtgtgtgattctcttcttcaccacgttcttccttagctccttcttaaaacaattcaagaccaaaagatactttccaactaaagtgaggtctactatcagcgacttcgcagtatttctcacaattgtgatcatggtgactattgactatttggtaggggttcccagtccaaagctgcatgtgcctgaaaagtttgaacctacacaccccgagaggggttggattatcagtcctctcggagataatccatggtggaccctgcttatcgctgcaattccagcgctgctatgtaccattctgattttcatggatcagcagatcaccgcagtgattatcaatcggaaagaacataaattgaagaagggcgccggatatcatctcgatctgctcatggttggggtgatgctgggagtctgcagtgtgatgggcctgccgtggtttgtggctgctacagtgctttcaatcagccatgtcaattctttaaaggtcgaaagtgagtgctcagcaccgggggagcagcctaagttcctgggaattcgggagcagagagtgactggccttatgattttcatactaatgggactgtcggtcttcatgacatcagtactgaaattcatccccatgcccgtgctgtatggtgtgtttttatacatgggtgtctcctctctgaaaggcatccaactcttcgaccgtatcaaattatttgggatgccagccaaacaccagccggacttaatctacctgcgctacgtccccctgtggaaagtacatatctttaccgtaatccaactgacatgcctcgtgctactgtgggttatcaaagtaagcgctgccgctgtagtctttccaatgatggtcctggcgctggtgttcgtacggaaactgatggacctctgtttcaccaagcgcgaactgtcctggctggacgatctcatgcccgagagtaaaaaaaagaaagaagatgataagaaaaaaaaggaaaaggaagaggctgagcgaatgctgcaggacgatgacgatactgttcacctgccttttgagggcgggagcctgctccagataccagtaaaggccctaaagtactcagtggatccaagcattgtgaatatatcagatgagatggccaaaaccgcccaatggaaagccctgtctatgaacaccgagaacgctaaggttacaaggtcaaatatgtcacctgataaaccagtgtccgtgaagatctccttcgaggacgagccacgaaagaagtatgttgatgccgaaacatctctttag

SEQ ID NO: 93078 - DNA, 2406 bp, Artificial Sequence
  derived and/or modified sequence
gtgatggaggtggtggaggccgagaagatcgtgctgctgaccagcgcccgcttcctgttcctgctgctgggccctgctgggaaggccccccagtaccatgaaattggccgcagcatcgccaccctgatgacagatgagatcttccatgatgtggcctacaaggccaaggacagaaatgacctgctgtctggaattgatgagttcctggaccaggtgacagtgctgcccccaggagagtgggaccccagcatccgcatcgagccccccaagtctgtgcccagccaggagaagaggaagatccctgtgttccacaacggcagcacccccaccctgggggagacccccaaggaggccgcccaccacgccggccctgagctgcagaggacaggccgcctgtttggaggcctcatcctggacatcaagaggaaggcccccttcttcctgagtgacttcaaggatgccctgagcctgcagtgcctggccagcatcctcttcctgtactgtgcctgcatgagccctgtgatcacctttggaggcctgctgggggaggccacagagggccgcatcagcgccatcgagagcctgtttggagccagcctgactggaattgcctacagcctgtttgctggccagcccctgaccatcctgggcagcactggacctgtgctggtgtttgagaagatcctgtacaagttctgccgggactaccagctgagctacctgagcctgcggaccagcatcggcctgtggaccagcttcctgtgcatcgtgctggtggccacagatgccagcagcctggtgtgctacatcacccgcttcacagaggaggcctttgctgccctgatctgcatcatcttcatctatgaggccctggagaagctgtttgacctgggggagacctacgccttcaacatgcacaacaacctggacaagctgaccagctacagctgtgtgtgcacagagccccccaaccccagcaatgagaccctggcccagtggaagaaggacaacatcacagcccacaacatctcctggaggaacctgactgtgtctgagtgcaagaagctgcggggcgtcttcctgggcagcgcctgtggccaccacggcccctacatcccagatgtgctcttctggtgtgtgatcctcttcttcaccaccttcttcctgagcagcttcctgaagcagttcaagaccaagcgctacttccccaccaaggtgcgcagcaccatcagtgactttgctgtgttcctgaccatcgtcatcatggtgaccatcgactacctggtgggcgtgcccagccccaagctgcacgtgcctgagaagtttgagcccacccaccctgagcggggctggatcatcagccccctgggggacaacccctggtggaccctgctgattgctgccatcccagccctgctgtgcaccatcctgatcttcatggaccagcagatcacagctgtgatcatcaacaggaaggagcacaagctgaagaagggggccggctaccacctggacctgctgatggtgggcgtgatgctgggcgtgtgcagcgtgatgggcctgccctggtttgtggccgccaccgtgctgagcatcagccacgtgaacagcctgaaggtggagagtgaatgttctgcccctggagagcagcccaagttcctgggcatccgggagcagagggtgacaggcctgatgatcttcatcctgatgggcctgtctgtgttcatgacctctgtgctgaagttcatccccatgcctgtgctgtatggagtcttcctgtacatgggcgtgagcagcctgaagggcatccagctgtttgaccgcatcaagctgtttggcatgcctgccaagcaccagcctgacctgatctacctgcgctacgtgcccctgtggaaggtgcacatcttcaccgtcatccagctgacctgcctggtgctgctgtgggtgatcaaggtgtctgctgctgctgtggtgttccccatgatggtgctggccctggtgtttgtgaggaagctgatggacctgtgcttcaccaagcgggagctgtcctggctggatgacctgatgcctgagagcaagaagaagaaggaggatgacaagaagaagaaggagaaggaggaggccgagaggatgctgcaggatgatgatgacacagtgcacctgccctttgaaggaggcagcctgctgcagatccctgtgaaggccctgaagtacagcgtggaccccagcatcgtgaacatcagtgatgagatggccaagacagcccagtggaaggccctgtccatgaacacagaaaatgccaaggtgaccaggagcaacatgagcccagacaagcctgtgtctgtgaagatcagctttgaagatgagcccaggaagaagtatgtggatgctgagaccagcctgtag

SEQ ID NO: 93079 - DNA, 2403 bp, Artificial Sequence
  derived and/or modified sequence
atggaggtggtggaggccgagaagatcgtgctgctgaccagcgcccgcttcctgttcctgctgctgggccctgctgggaaggccccccagtaccacgagatcggccgcagcatcgccaccctgatgacagatgagatcttccatgatgtggcctacaaggccaaggacagaaatgacctgctgagcggcattgatgagttcctggaccaggtgacagtgctgcccccaggagagtgggaccccagcatcagaattgagccccccaagtctgtgcccagccaggagaagaggaagatccctgtgttccacaacggcagcacccccaccctgggggagacccccaaggaggccgcccaccacgccggccctgagctgcagaggacaggccgcctgtttggaggcctcatcctggacatcaagaggaaggcccccttcttcctgagtgacttcaaggatgccctgagcctgcagtgcctggccagcatcctcttcctgtactgtgcctgcatgagccctgtgatcaccttcggcggcctgctgggggaggccacagagggccgcatcagcgccatcgagagcctgtttggagccagcctgaccggcatcgcctacagcctgtttgctggccagcccctgaccatcctgggcagcacaggccctgtgctggtgtttgagaagatcctgtacaagttctgccgggactaccagctgagctacctgagcctgcggaccagcatcggcctgtggaccagcttcctgtgcatcgtgctggtggccacagatgccagcagcctggtgtgctacatcacccgcttcacagaggaggcctttgctgccctgatctgcatcatcttcatctatgaggccctggagaagctgtttgacctgggggagacctacgccttcaacatgcacaacaacctggacaagctgaccagctacagctgtgtgtgcacagagccccccaaccccagcaatgagaccctggcccagtggaagaaggacaacatcacagcccacaacatctcctggaggaacctgactgtgtctgagtgcaagaagctgcggggcgtcttcctgggcagcgcctgtggccaccacggcccctacatcccagatgtgctcttctggtgtgtgatcctcttcttcaccaccttcttcctgagcagcttcctgaagcagttcaagaccaagcgctacttccccaccaaggtgcgcagcaccatcagtgactttgctgtgttcctgaccatcgtcatcatggtgaccatcgactacctggtgggcgtgcccagccccaagctgcacgtgcctgagaagtttgagcccacccaccctgagcggggctggatcatcagccccctgggggacaacccctggtggaccctgctgattgctgccatcccagccctgctgtgcaccatcctgatcttcatggaccagcagatcacagctgtgatcatcaacaggaaggagcacaagctgaagaagggagctggctaccacctggacctgctgatggtgggcgtgatgctgggcgtgtgcagcgtgatgggcctgccctggtttgtggccgccaccgtgctgagcatcagccacgtgaacagcctgaaggtggagagcgagtgcagcgcccctggagagcagcccaagttcctgggcatccgggagcagagggtgacaggcctgatgatcttcatcctgatgggcctgagcgtcttcatgacctctgtgctgaagttcatccccatgcctgtgctgtatggagtcttcctgtacatgggcgtgagcagcctgaagggcatccagctgtttgaccgcatcaagctgtttggcatgcctgccaagcaccagcctgacctgatctacctgcgctacgtgcccctgtggaaggtgcacatcttcaccgtcatccagctgacctgcctggtgctgctgtgggtgatcaaggtgtctgctgctgctgtggtgttccccatgatggtgctggccctggtgtttgtgaggaagctgatggacctgtgcttcaccaagcgggagctgtcctggctggatgacctgatgcctgagagcaagaagaagaaggaggatgacaagaagaagaaggagaaggaggaggccgagaggatgctgcaggatgatgatgacacagtgcacctgccctttgagggcggcagcctgctgcagatccctgtgaaggccctgaagtacagcgtggaccccagcatcgtgaacatcagtgatgagatggccaagacagcccagtggaaggccctgtccatgaacacagaaaatgccaaggtgaccaggagcaacatgagcccagacaagcctgtgtctgtgaagatcagctttgaagatgagcccaggaagaagtatgtggatgctgagaccagcctgtag

SEQ ID NO: 93080 - DNA, 3396 bp, Artificial Sequence
  derived and/or modified sequence
atggaggctgatggagctggggagcagatgaggcccctgctgacccggggcccagatgaggaggccgtggtggacctgggcaagaccagcagcacagtgaacaccaagtttgagaaggaggagctggagagccacagagctgtgtacatcggcgtgcacgtgcccttcagcaaggagagcagaagaagacaccgccaccggggccacaagcaccaccacagaagaaggaaggacaaggagagtgacaaggaggatggccgggagagccccagctatgacacccccagccagagggtgcagttcatcctgggcacagaagatgatgatgaggagcacatcccccatgacctcttcacagagatggatgagctgtgctacagagatggagaggagtatgagtggaaggagacagcccgctggctgaagtttgaagaagatgtggaggatggaggagaccgctggagcaagccctacgtggccaccctgagcctgcacagcctgtttgagctgcggagctgcatcctgaatggcaccgtgatgctggacatgagggccagcaccctggatgaaattgctgacatggtgctggacaacatgattgccagcggccagctggatgagagcatcagagaaaatgtgcgggaggccctgctgaagaggcaccaccaccagaatgagaagcgcttcaccagccgcatccccctggtgcgcagctttgctgacatcggcaagaagcacagcgacccccacctgctggagagaaatggcatcctggccagcccccagagcgcccctggcaacctggacaacagcaagtctggagagatcaagggaaatggaagtggcggcagccgggagaacagcacagtggacttcagcaaggtggacatgaacttcatgaggaagatccccactggagctgaggccagcaatgtgctggtgggggaggtggacttcctggagcggcccatcatcgcctttgtgcggctggccccagctgtgctgctgaccggcctgacagaggtgcctgtgcccacccgcttcctgttcctgctgctgggccctgctgggaaggccccccagtaccatgaaattggccgcagcatcgccaccctgatgacagatgagatcttccatgatgtggcctacaaggccaaggacagaaatgacctgctgtctggaattgatgagttcctggaccaggtgacagtgctgcccccaggagagtgggaccccagcatccgcatcgagccccccaagtctgtgcccagccaggagaagaggaagatccctgtgttccacaacggcagcacccccaccctgggggagacccccaaggaggccgcccaccacgccggccctgagctgcagaggacaggccgcctgtttggaggcctcatcctggacatcaagaggaaggcccccttcttcctgagtgacttcaaggatgccctgagcctgcagtgcctggccagcatcctcttcctgtactgtgcctgcatgagccctgtgatcacctttggaggcctgctgggggaggccacagagggccgcatcagcgccatcgagagcctgtttggagccagcctgactggaattgcctacagcctgtttgctggccagcccctgaccatcctgggcagcactggacctgtgctggtgtttgagaagatcctgtacaagttctgccgggactaccagctgagctacctgagcctgcggaccagcatcggcctgtggaccagcttcctgtgcatcgtgctggtggccacagatgccagcagcctggtgtgctacatcacccgcttcacagaggaggcctttgctgccctgatctgcatcatcttcatctatgaggccctggagaagctgtttgacctgggggagacctacgccttcaacatgcacaacaacctggacaagctgaccagctacagctgtgtgtgcacagagccccccaaccccagcaatgagaccctggcccagtggaagaaggacaacatcacagcccacaacatctcctggaggaacctgactgtgtctgagtgcaagaagctgcggggcgtcttcctgggcagcgcctgtggccaccacggcccctacatcccagatgtgctcttctggtgtgtgatcctcttcttcaccaccttcttcctgagcagcttcctgaagcagttcaagaccaagcgctacttccccaccaaggtgcgcagcaccatcagtgactttgctgtgttcctgaccatcgtcatcatggtgaccatcgactacctggtgggcgtgcccagccccaagctgcacgtgcctgagaagtttgagcccacccaccctgagcggggctggatcatcagccccctgggggacaacccctggtggaccctgctgattgctgccatcccagccctgctgtgcaccatcctgatcttcatggaccagcagatcacagctgtgatcatcaacaggaaggagcacaagctgaagaagggggccggctaccacctggacctgctgatggtgggcgtgatgctgggcgtgtgcagcgtgatgggcctgccctggtttgtggccgccaccgtgctgagcatcagccacgtgaacagcctgaaggtggagagtgaatgttctgcccctggagagcagcccaagttcctgggcatccgggagcagagggtgacaggcctgatgatcttcatcctgatgggcctgtctgtgttcatgacctctgtgctgaagttcatccccatgcctgtgctgtatggagtcttcctgtacatgggcgtgagcagcctgaagggcatccagctgtttgaccgcatcaagctgtttggcatgcctgccaagcaccagcctgacctgatctacctgcgctacgtgcccctgtggaaggtgcacatcttcaccgtcatccagctgacctgcctggtgctgctgtgggtgatcaaggtgtctgctgctgctgtggtgttccccatgatggtgctggccctggtgtttgtgaggaagctgatggacctgtgcttcaccaagcgggagctgtcctggctggatgacctgatgcctgagagcaagaagaagaaggaggatgacaagaagaagaaggagaaggaggaggccgagaggatgctgcaggatgatgatgacacagtgcacctgccctttgaaggaggcagcctgctgcagatccctgtgaaggccctgaagtacagcgtggaccccagcatcgtgaacatcagtgatgagatggccaagacagcccagtggaaggccctgtccatgaacacagaaaatgccaaggtgaccaggagcaacatgagcccagacaagcctgtgtctgtgaagatcagctttgaagatgagcccaggaagaagtatgtggatgctgagaccagcctgtag

SEQ ID NO: 93081 - DNA, 2406 bp, Artificial Sequence
  derived and/or modified sequence
gtgatggaggtggtggaggccgagaagatcgtgctgctgaccagcgctcgcttcctgttccttcttctgggaccagccggcaaggccccccaatatcacgagatcggaaggtcaatagctacccttatgactgacgaaatattccatgacgtagcttataaggcgaaagataggaacgaccttctgagcggaatcgacgagttcctcgaccaggtgaccgtgctgccccccggtgaatgggatccatcaatacggattgagccaccaaaaagcgttccttctcaggaaaagcgcaagattcccgtgttccacaatggatcaactcccaccttgggcgagactccaaaggaggccgcacaccatgccggcccagagctccaacggactggcagactattcggcggactcattctcgacattaagcgcaaagctcccttttttctgtccgattttaaggatgccctctctctgcagtgcctggctagcatcctgttcctatactgtgcatgtatgtcacccgtgataaccttcgggggcctactgggagaggcgactgagggaaggatcagtgccatcgagagcctttttggggcttctctcactggtattgcctactcattgttcgctggacagcctctgaccatcttgggttcaacaggtccggtgctggtgttcgagaaaatactttataagttctgtagggattaccagcttagctacctcagtctgcgaacgagtattggactctggacttctttcctctgcatcgtgctcgtggccaccgatgcttccagccttgtttgttatatcactcggtttacagaagaagccttcgcagccctgatctgcattatattcatttacgaagccctagaaaagctattcgatttaggtgagacatatgcatttaacatgcacaataacctggataagttaactagttactcttgtgtgtgcaccgagcccccaaacccctctaatgaaaccctagcacagtggaaaaaggacaacattacggctcataacatttcatggaggaatttaaccgtgagtgagtgcaaaaagcttcggggcgttttcctgggttctgcctgcggccaccatgggccctacatcccagacgttttgttttggtgcgtaatcctgtttttcaccacattttttctgagctcttttttgaagcaattcaagacaaaacgctacttccccactaaggtgcgatcgacaattagcgattttgcggtattcctgacaatcgtcatcatggtcacaatcgactatctggttggcgtgccttcccctaaattacatgtgccggaaaaattcgagccaacacaccctgaacgaggatggatcatttccccgctaggggacaacccttggtggacattgcttatagcagcaatcccagctctgctatgtaccatcttaattttcatggaccagcagatcacagctgtcattatcaacaggaaagagcacaagctaaagaaaggggctggctatcaccttgacctccttatggtgggggtgatgctgggcgtttgcagcgtcatggggctcccctggtttgtggccgcaactgtgctatcaatttcccacgttaattcactgaaagttgagtcagaatgctctgctccaggtgaacaacctaaatttctggggatccgcgagcagagagtcactggactgatgatattcatcctcatgggactttccgtgtttatgacaagtgttttgaagtttatacccatgcccgtgttatacggcgtctttctttacatgggcgtctcctctctgaagggaattcagctgtttgacaggataaagctcttcggcatgccggcaaaacaccagcctgatctgatatacttgcgatatgttcctttgtggaaagtgcacatttttactgtaattcaattaacctgtctggtactgttgtgggtaattaaggtctctgccgccgctgtggtcttccccatgatggtgttggcactagtcttcgtacggaaactcatggatctgtgtttcacaaagagagaattgtcttggctagatgatcttatgccagagtcaaagaagaagaaggaagatgacaaaaaaaaaaaagagaaagaggaggcggagcgaatgctacaggacgacgacgatacagtccatctgcccttcgagggaggtagcttgttgcaaattcccgtgaaagcccttaaatacagcgtggatcctagtatcgttaacatctccgatgagatggcaaaaacagcgcaatggaaggcactgtctatgaatactgaaaatgccaaagtaacaagatccaacatgtcccccgacaagcccgtatccgtgaaaataagcttcgaagacgaaccccggaagaagtatgtcgacgccgagacaagcctgtag

SEQ ID NO: 93082 - DNA, 2403 bp, Artificial Sequence
  derived and/or modified sequence
atggaggtggtggaggccgagaagatcgtgctgctgaccagcgccagattcctgttcctgttgctgggtcctgccggcaaggctccacagtatcatgagatcggtcgtagcattgccactctaatgacagacgaaattttccacgatgtcgcgtacaaggcgaaggatcggaacgacctattgagcggcattgacgagtttttagatcaggttacagtgctgccacccggagaatgggatccctcgattagaatcgagccgccgaaaagtgtcccaagccaagagaagcgaaaaataccggtattccacaacggtagtaccccaactcttggggagactccgaaggaggcggcccatcacgccggacctgaacttcagcgtactggacgtctgtttggaggtctgattctcgatattaagcgcaaggcgcctttctttctttctgatttcaaggatgctttgtcgctccagtgtctggcctcaatccttttcctgtattgcgcatgcatgtcacccgttattacatttggtggcttgctgggggaggcaactgagggacggatctccgccatcgagagtctctttggggcctcgctaactgggatcgcttactcgctgtttgcaggacagccgctgacaatcctgggatcaaccggccccgtcctggtttttgaaaaaatcctctataagttttgtagggactaccagctgagctatctgagcctacggaccagcattggcttgtggaccagttttctgtgtatcgtgctcgtcgccaccgatgcctcttctctcgtgtgttacattaccaggttcacagaggaggcttttgctgcattaatctgcataatttttatctacgaggctttggagaagttgttcgatctaggagaaacctatgcgtttaatatgcacaataacctggataaactgacatcttactcgtgcgtatgtacagaacctcccaacccctctaacgaaacactcgctcagtggaagaaggacaacatcaccgctcacaatatcagttggagaaatctcacggtgagcgaatgcaagaagttacgaggggtgtttctcggatccgcttgtggacatcacggtccctatattccagacgtgctcttttggtgtgtcatcctgttttttacaacattctttctgtcttcattcctcaaacagtttaagaccaagcgctacttcccaacaaaggtgcgcagcacgatctccgatttcgccgtcttcctgaccatcgtgattatggtgacgattgattatttggtgggcgtgcctagcccaaaactccatgtgcccgaaaaattcgagcctacacatcctgagaggggctggatcattagtccccttggagataatccctggtggacactccttattgctgcaattccggctttgctgtgcactattttgatattcatggatcagcagattaccgccgtgattatcaataggaaggagcataaattgaagaaaggcgccggctatcacctggatctccttatggtgggagttatgctcggcgtgtgctccgtaatgggactgccttggttcgtggcagccaccgtgttgagcataagccacgtgaacagtcttaaggtcgaatctgaatgctcagcgcccggagagcagcccaaattcctgggtatccgagaacagagggtcaccggcctgatgatctttatcctcatgggactcagtgtcttcatgacaagcgtgctgaagttcataccgatgcctgtcctgtacggagtttttctttacatgggagttagctcgctcaaaggtatccaactgttcgacaggattaaactgttcggaatgcccgcaaagcatcaaccggacttgatctatttgcggtatgtgccactgtggaaggttcacatattcacagtgatccagcttacctgtctggtgctgttatgggtcatcaaagtctcggctgccgctgtggtgttccctatgatggtgcttgctcttgtctttgtgcgcaaactcatggatttgtgcttcacaaagcgtgagttaagctggctcgacgatctcatgccagagtccaagaaaaaaaaggaagatgataaaaaaaagaaagagaaagaagaagccgagcgcatgttgcaggacgacgacgatactgttcatttgccatttgagggcgggagcctcctgcagatccctgtgaaggctttgaagtattcagtagacccctcaatagtcaacatttccgatgagatggccaagacagcccagtggaaagccctatcaatgaacaccgaaaatgcaaaggtgacaaggtcaaacatgtctcctgataaaccggtcagcgtgaagatcagttttgaggacgagcctaggaagaaatacgtcgatgctgagacctctctctag

SEQ ID NO: 93083 - DNA, 3396 bp, Artificial Sequence
  derived and/or modified sequence
atggaggccgacggcgccggcgagcagatgcggcccctgctgaccagaggccctgacgaagaggcagtggttgaccttggcaaaacatcgtccacagtgaataccaaatttgaaaaagaggaactggagtcccacagagccgtctatatcggggtgcacgtgcccttttctaaggagtccagacgcagacataggcaccgggggcataaacatcatcataggaggcgtaaagataaagaaagcgacaaggaggatgggagggagagtccttcctacgataccccttctcagcgagtgcaatttattctcggaaccgaggatgacgatgaggaacacattccacacgatctcttcacagaaatggacgagttatgttaccgagatggcgaggagtacgaatggaaagaaacagctagatggctcaaattcgaagaggacgtggaagacgggggcgatcggtggagtaagccctatgttgcaaccctgtccttacactcactgttcgaacttaggtcgtgcatcctgaatggcaccgtcatgctggacatgcgggcctccaccctggatgagatagctgacatggtgctggataatatgatcgcctcggggcagttagatgagtcaattcgggagaacgtgagagaagctctgctgaagcgccatcaccaccagaacgagaaacgctttaccagccgcattccgttagtgcgctcattcgcagacatcggtaagaagcactcggacccacacctactggagcggaacggcatcttagcctcccctcagtcagcccctggaaatcttgataattcaaaatccggtgagataaaagggaatggtagcggtgggtcccgcgaaaactcaacagtcgatttctctaaggtggacatgaactttatgagaaagatccccaccggcgctgaggccagtaacgttcttgtgggagaagtggactttctagaaagaccaattattgccttcgtgcgcctcgctcccgccgttctcctgactggcctaactgaagtgccagttcccacccgattcctgtttcttctccttgggcccgctggcaaagcaccacagtaccacgaaatcggtaggagcattgccacattgatgactgacgagatcttccacgatgttgcctataaggctaaggataggaacgacctgctgtctggcatcgatgaattcctggaccaggtcactgttctgcccccaggcgagtgggatcctagtatccgaatagaacctcctaagtctgtccctagtcaggagaaacgaaaaatccctgttttccataatgggtctactccgaccctcggcgagacacctaaagaagccgctcaccacgcaggcccagaacttcagaggacagggaggctcttcggcggcctcattttggatatcaaacgcaaagctccgttttttctgtctgacttcaaggatgcactgtccctccagtgcctggcttccatattatttctttactgtgcatgtatgagcccagtaatcacattcggtgggcttcttggggaggccacagaggggcgcatttctgcgattgaatccttatttggagcatcactaaccgggatcgcctacagcctgtttgccggacagcctctaacgatactgggcagtactgggccggtgctggttttcgagaagattctctacaaattctgtcgggattaccagttgtcttacctttcccttagaacatccatcgggctctggacctccttcctctgcatcgtgctggtagccaccgacgctagctctctcgtgtgctacattaccaggttcacagaagaggcattcgcagctcttatttgcattatctttatttacgaagcgctggaaaaactcttcgaccttggtgaaacttatgcattcaacatgcataataatcttgacaaactgaccagttactcttgtgtatgtactgagccccccaacccctctaacgagactttggcgcagtggaaaaaagacaatattaccgctcataatatttcttggcgcaatttgaccgtctccgagtgcaaaaagctgcgtggggtttttcttggctcggcctgcggccaccatggcccgtatatccctgatgtgcttttctggtgcgtgattctcttcttcacaacctttttcctcagtagtttcctgaagcagttcaagaccaagcgatattttcctaccaaggtgagatccaccatctccgactttgccgtttttctgactatagttatcatggtgacaatcgactatttggttggagtacccagtccaaaactccatgttcccgagaagtttgagcccacccatcccgagaggggatggatcatatccccactgggtgataatccctggtggactttgcttattgctgcaattccggccttgttgtgcaccatattgatattcatggatcagcaaataacagccgttattattaatcggaaggaacacaaactcaagaagggcgccggctaccacctagacctactgatggtgggagtgatgctcggggtgtgcagtgtaatgggcctgccttggttcgtcgcggcaacggtgctgagtatctctcacgtgaattctctgaaggtagagtccgaatgcagcgcccccggtgagcagcctaaattccttggtatcagggaacagcgtgtcaccggcctgatgatcttcattctgatggggctgtcagtgttcatgacgagcgtgctcaaatttatccccatgcctgtgctctacggcgtgtttttgtatatgggagttagctccctgaagggaatccagctgtttgatcgaatcaaattgttcggtatgcccgcaaagcaccaaccggacctcatatatctgagatacgtacctctgtggaaggttcacatattcaccgtcattcagctcacctgtctggtacttctgtgggtaattaaagtcagcgcagcggccgtagtgtttcccatgatggttctagcattagtgttcgtgcgtaaacttatggacttgtgctttaccaaacgggagctgtcgtggttggatgacctaatgccagagagtaagaagaagaaggaggacgacaagaagaagaaggaaaaggaagaggctgagcgaatgttgcaggatgatgacgataccgtgcacctgccattcgaaggtggctccctgttgcagatccccgttaaggccttgaaatacagcgtcgatcctagtattgtgaatatttcggacgagatggctaaaaccgcccagtggaaagcgctgtcgatgaacacggagaacgccaaggttaccagatctaacatgtcaccagacaaaccagtttccgtgaagatcagttttgaggacgagccccgcaaaaagtatgtggatgccgagacttctctttag

SEQ ID NO: 93084 - DNA, 2406 bp, Artificial Sequence
  derived and/or modified sequence
gtaatggaggtggtggaagcagagaaaatcgtcctgctaaccagcgctagatttcttttcctgttgctcgggccagccggtaaagcgcctcagtatcatgagatcggcagatccattgctaccttgatgactgacgagatctttcacgatgtcgcctacaaggctaaggaccgcaatgatttgctgtctggtattgacgaatttctcgaccaggttacagtgctgccacccggagagtgggacccatcaattcgaatcgaaccacctaagagtgtccctagtcaggaaaagcgcaagatccctgtgttccataatggaagcacacctacactgggagagactcctaaggaagccgcacaccacgcgggacccgaattgcagagaaccgggagactattcggcggactgatccttgacatcaagcgtaaagcgccatttttcttatctgacttcaaagacgctctttccctgcagtgcctagccagtatattgttcctgtattgtgcctgcatgtctccagtcattacatttggaggcctcctgggggaggcaacagagggcaggatttccgccattgagagtctgtttggcgcaagcctcaccggaatcgcgtacagcctcttcgccggacagcctctgactattcttggctctaccggaccagttctggttttcgagaagattctctataagttctgccgggattatcagctgtcatatctttcactgagaacaagtattgggctttggacctcctttctgtgcattgtcctcgttgcaaccgacgcctctagcttagtgtgttatataacccggtttacggaggaggcttttgccgctctaatatgtatcatctttatctatgaggcactggagaagttattcgatctgggagagacctacgctttcaatatgcacaacaacctggataagctcacctcgtactcttgcgtttgcaccgaaccaccaaatcccagcaatgaaacccttgcccagtggaagaaggacaacatcaccgcccacaatatctcatggagaaatcttaccgtttcggaatgtaagaagctgcgaggcgtattcctgggcagtgcctgcgggcaccacgggccttacattcccgacgtactgttttggtgcgtaatcctgttcttcactacattcttcttatcctcgtttcttaagcaattcaagacaaagcggtacttccccacgaaggtgagaagcaccatcagcgattttgccgtgttccttaccattgtcatcatggtaacaattgattatttggtaggagttcccagtcccaaacttcatgtgcccgagaagttcgagccaacacatcccgaaagagggtggatcatttcgccgttaggagataatccttggtggacccttctcatcgccgcaattccagccctgctgtgtacaatactgatcttcatggaccaacaaatcactgcggtaattattaaccgaaaggagcataaattgaagaaaggcgcaggttaccaccttgatctactgatggtgggggtgatgctcggtgtgtgcagcgtgatgggactcccatggtttgtggccgctacagtgctgtcaatcagtcacgtcaatagtcttaaggttgagtcggaatgctccgctcccggtgagcagcccaagtttcttgggattagggagcagagggtcacaggattgatgattttcatactgatggggctgtcagtcttcatgacctcggtgctgaaattcattcccatgcccgttctgtacggcgtctttctgtatatgggagtcagcagtctgaaggggatccagctgttcgaccggataaaactgtttgggatgccggctaagcaccagcctgacttaatctatcttcgctacgttcccttgtggaaagtgcatatcttcacagtcattcagctcacgtgcttagtactactttgggtaatcaaggttagcgcggctgcagtggttttccctatgatggtactggcgctggtgttcgttcgaaagctaatggacctttgttttaccaaacgagagctgtcctggctggatgacctaatgccagagtctaaaaaaaagaaggaggatgacaagaagaaaaaggagaaagaagaggccgaacgaatgcttcaggacgacgatgataccgtacacctgccattcgaaggtgggtcgctgttgcagatccccgtaaaggctctgaagtattcagttgatccctccatcgttaacatcagtgatgaaatggccaaaactgcacagtggaaggccttaagtatgaatactgaaaacgcaaaagttactagaagtaacatgtctcccgataagcctgtaagtgtgaaaatttcttttgaggatgaaccaagaaagaaatatgtggacgccgagacctcattatag

SEQ ID NO: 93085 - DNA, 2403 bp, Artificial Sequence
  derived and/or modified sequence
atggaagtggtggaagcagagaagatcgtcctgttaaccagcgctaggtttctgttcctgctacttggccctgctggaaaggcacctcagtaccacgaaatcggaaggtctattgctactctgatgacagatgagattttccacgacgtggcttataaggctaaggatagaaacgatttactgtccggcatagacgaattcttagatcaggtaacggttctcccacctggtgagtgggatcctagcattcggatagaaccgccaaagagcgtgccaagccaggagaaaaggaaaatccccgtgtttcataatggatccacccccaccctgggcgaaacacctaaggaggccgctcatcacgccggtcctgaactgcagcggaccgggaggctgtttggtggcctgatcctggatattaagagaaaggcaccctttttcttgtcagacttcaaggatgccctcagccttcaatgcttggctagtatcctattcctgtactgcgcttgtatgagccctgtgatcacgttcggtggactgctcggcgaggctacagaaggcagaataagcgccatagaatcactgtttggggctagcctgactgggatcgcctattctctgtttgcagggcagccacttactattctcggctcaaccggccctgtcttggtcttcgagaaaattttgtacaagttctgccgcgactatcagctcagctatctgtctctgcgcacttccatcggtctatggaccagcttcctgtgtatcgtgctagtggcaaccgacgcctctagccttgtttgctacatcactaggttcactgaagaagcttttgcagccctgatctgtatcatcttcatctacgaggccctcgagaagctgttcgacctgggcgagacatacgcgttcaacatgcacaacaacctggataagctgacttcatactcttgcgtttgcaccgaacctcccaacccctccaatgaaaccttggcccagtggaagaaggacaatatcacggcccacaatatcagttggcgtaacttaaccgtttcggagtgcaaaaaattacgaggcgtgtttttaggctccgcgtgtggccatcatgggccttatattcccgatgtgctcttctggtgcgtgatactcttttttacaacgttttttctgtctagctttcttaaacagtttaaaaccaagcggtatttccctacgaaggtccggagcacaattagcgacttcgctgtctttctgacgattgtgattatggttactatagactatcttgtcggcgtaccgagcccaaaactgcacgtacctgagaagtttgagcctacacacccagagagaggctggattataagccctctgggcgataacccctggtggactctgttgatcgcagccatccccgctctgctgtgcaccatcctaatttttatggaccagcagatcactgctgtgattattaatcgcaaggagcacaagctgaagaagggagccggataccacctggacctgctcatggtaggagttatgctcggggtgtgttccgttatgggcctaccctggttcgtcgcagccactgtactgagcatctctcacgttaacagcctaaaggttgaaagtgaatgtagcgcgccaggagaacagcctaagttcctgggtattagggaacagcgtgtgaccgggctgatgatcttcattctaatggggctgtcggtgttcatgacaagtgttctgaaatttatccccatgcccgttctgtacggtgtattcctgtatatgggagtgtctagcctaaaggggatccagttattcgatcgcattaaactctttggcatgccagctaagcatcaacctgatctgatctatctgagatatgtccctctgtggaaagtgcatattttcacggtgatacagctgacttgcttagtcctactgtgggtgatcaaggtgtcagccgcagcagtggtcttcccaatgatggtgttagctcttgttttcgtgcggaagctcatggacctctgcttcactaaacgtgagttatcttggctggacgacctgatgcccgagagtaagaagaagaaagaagatgataagaaaaagaaggagaaggaagaggctgaacgcatgctgcaagacgacgatgatactgtgcatcttccatttgaagggggatctcttttacagattcccgtcaaggctctcaagtattccgtcgacccaagtatcgtgaacatttccgatgagatggcaaaaaccgcgcagtggaaggcattgtccatgaataccgaaaatgccaaggtgacaagatctaacatgtcccctgataaaccggtgagtgtgaaaatctcattcgaggatgagcccaggaaaaagtacgtcgatgcggagacctcactctag

SEQ ID NO: 93086 - DNA, 3396 bp, Artificial Sequence
  derived and/or modified sequence
atggaggctgacggagcgggtgaacagatgcggccacttctgacaagggggccagatgaagaggcagttgtggacctcggtaaaacctccagtaccgtgaataccaaattcgagaaggaggagctcgaaagtcatcgcgctgtgtatatcggggtgcacgtccctttcagcaaggaaagcagacgccgacatcgtcaccggggtcacaagcatcaccacaggagacgtaaggataaagagtctgacaaggaggatggccgagagtccccaagctacgacaccccttcccagagagtgcagttcatcttaggcacagaagacgacgatgaggagcatattccccacgacttgtttactgaaatggatgaattgtgttatcgggatggggaggaatatgaatggaaggaaacagctcggtggctgaaatttgaagaggacgtagaggacggaggagataggtggtcaaagccttacgtggccaccctaagtctccatagcctgttcgagctgcgatcctgtatcctgaacggtaccgtaatgctggatatgcgagcttctacgcttgacgaaattgcagacatggtgctagacaacatgatcgccagtgggcagttggatgaatccatcagagaaaacgtaagggaagctctcctgaaaaggcatcaccatcaaaacgaaaaacgattcaccagcaggatccctctggtacgtagcttcgctgatatcgggaaaaagcatagtgatccccacctactggaacggaatggtatactcgcatcccctcagagtgcccctgggaacctggataactccaagtcaggagagataaagggcaacggatccgggggatcccgggaaaactccaccgtggatttttctaaggttgacatgaatttcatgagaaaaattcctaccggggctgaggcctcaaacgtgctagtaggcgaggtagatttcctggagcgtcccatcatagcctttgtacggctggctcctgctgtgcttctgacaggactgaccgaagtcccagtgcctaccagatttctgtttctgcttctgggcccagccggaaaggcccctcagtatcacgagatcggcagatcaatagcaacactgatgacagatgaaatttttcatgatgtggcttacaaagcaaaggacaggaacgatctcctgagtgggatcgacgaatttcttgaccaggtgacagtgctgcctccgggagagtgggacccaagcatccgcatcgaacctcccaaatctgtaccttctcaagaaaaaagaaagatacccgtgttccacaatggctcaacacctactttgggcgaaacccccaaagaagccgcacaccacgcaggacccgagctacagcgaaccggcagactgttcggaggcttgattttagatattaaaaggaaggcacccttctttctgtctgattttaaagatgccctaagcctacaatgcctcgcttctatcctttttctgtactgcgcctgtatgtcccctgttatcacgtttgggggtctgttgggtgaggcaacagagggcaggataagtgctatcgagtctctgttcggcgcatcactgacgggcatagcttacagcctgtttgccggtcagcctctgacgattctgggaagtaccggacccgtgctagtcttcgaaaagatcctttataagttttgtagagattaccagctgtcatacctgtctttgcgtacatcaatcgggttgtggaccagctttctgtgcatagtcctcgtcgcaaccgatgcttcttcccttgtatgttatattacacgcttcacagaggaagcttttgccgcacttatatgcatcatctttatatacgaggccttggaaaagttgttcgacctgggtgaaacctacgcatttaacatgcataataacctggacaagctcacctcctattcctgcgtctgtacagaacctccaaatccctctaatgagaccctcgcacagtggaagaaagataatatcacagctcacaatatatcctggaggaatctgacagtgagcgaatgcaagaaattgcggggagttttcttaggttctgcctgcggtcaccacggtccgtacattccagatgtgttattctggtgtgtcatcctattttttactacctttttcttgagctccttcctcaaacagtttaaaacaaaacgatattttccgacgaaggtgcgcagcacaattagcgatttcgccgtgttcctgactattgttatcatggtcacaattgactatctcgttggtgtgcctagtcccaaactgcacgtgcccgaaaaattcgaaccgacacacccggaacggggatggatcatttcgcctctgggggataacccgtggtggacactgctcattgccgctattcctgccctactgtgtactattctgatctttatggaccaacagattacggcagtgattatcaacaggaaggagcataagttaaaaaaaggagccggataccacttggatctgttgatggttggagtgatgttaggtgtgtgctctgtgatgggactgccctggtttgttgccgcaactgtgctgtctattagtcatgtgaattccctcaaggtggagtctgaatgcagcgcacctggcgaacagccaaaatttctgggcattcgggaacagagggttaccgggcttatgatatttatccttatgggtctgtctgtgttcatgaccagcgtgctcaagttcattcctatgcccgtactgtatggagtgttcttatatatgggggtgtcaagcttgaaggggattcagctcttcgaccggatcaaactcttcggtatgcccgcaaagcatcagcctgatctgatatacctccgttatgtgccactgtggaaagtacatatttttacagtcattcagctgacgtgcctggtgctgctgtgggtcattaaggtctctgcagcagcggtggtgttcccaatgatggtcttagcgctggttttcgtgaggaagctgatggatctctgttttactaaaagggaactcagctggcttgatgacctgatgcccgagagcaaaaagaagaaggaagacgataagaaaaagaaggaaaaagaagaagctgaacgaatgcttcaggatgacgatgacaccgtccatttaccttttgagggtggttctcttcttcagattccagtgaaggctcttaaatattccgttgatccctccattgtgaacatatctgacgagatggcgaaaactgctcagtggaaggctcttagtatgaacactgaaaacgcaaaggtaactcggtccaatatgagtccggataaacctgtgtcggtcaagatttcatttgaagatgagcccagaaagaaatacgtggatgccgaaacttcactgtag

SEQ ID NO: 93087 - DNA, 6447 bp, Artificial Sequence
  derived and/or modified sequence
gtaatggaagtggtggaagcagagaaaatagtactgttgacttcagcaaggtttttgtttttgttattgggtccagcgggcaaggcaccacagtaccatgaaattggacgatcaatagccactctcatgacagatgagattttccatgatgtagcttataaagcaaaagacagaaatgacctcttatctggaattgatgaatttttagatcaagtaactgtcctacctccaggagagtgggatccttctatacgcatagaaccaccaaaaagtgtcccttctcaggaaaagagaaagattcctgtgtttcacaatggatctacccccacactgggtgagactcctaaagaggccgctcatcatgctgggcctgagctacagaggactggacggctttttggtggtttgatacttgacatcaaaaggaaagcaccttttttcttgagtgacttcaaggatgcattaagcctgcagtgcctggcctcgattcttttcctatactgtgcctgtatgtctcctgtaatcacttttggagggctgcttggagaagctacagaaggcagaataagtgcaatagagtctctttttggagcatcattaactgggattgcctattcattgtttgctgggcaacctctaacaatattggggagcacaggtccagttctagtgtttgaaaaaattttatataaattctgcagagattatcaactttcttatctgtctttaagaaccagtattggtctgtggacttcttttttgtgcattgttttggttgcaacagatgcaagcagccttgtgtgttatattactcgatttacagaagaggcttttgcagcccttatttgcatcatattcatctacgaggctttggagaagctctttgatttaggagaaacatatgcatttaatatgcacaacaacttagataaactgaccagctactcatgtgtatgtactgaacctccaaaccccagcaatgaaactctagcacaatggaagaaagataatataacagcacacaatatttcctggagaaatcttactgtttctgaatgtaaaaaacttcgtggtgtattcttggggtcagcttgtggtcatcatggaccttatattccagatgtgctcttttggtgtgtcatcttgtttttcacaacattttttctgtcttcattcctcaagcaatttaagaccaagcgttactttcctaccaaggtgcgatcgacaatcagtgattttgctgtatttctcacaatagtaataatggttacaattgactaccttgtaggagttccatctcctaaacttcatgttcctgaaaaatttgagcctactcatccagagagagggtggatcataagcccactgggagataatccttggtggaccttattaatagctgctattcctgctttgctttgtaccattctcatctttatggatcaacaaatcacagctgtaattataaacagaaaggaacacaaattgaagaaaggagctggctatcaccttgatttgctcatggttggcgttatgttgggagtttgctctgtcatgggacttccatggtttgtggctgcaacagtgttgtcaataagtcatgtcaacagcttaaaagttgaatctgaatgttctgctccaggggaacaacccaagtttttgggaattcgtgaacagcgggttacagggctaatgatttttattctaatgggcctctctgtgttcatgacttcagtcctaaagtttattccaatgcctgttctgtatggtgttttcctttatatgggagtttcctcattaaaaggaatccagttatttgaccgtataaaattatttggaatgcctgctaagcatcagcctgatttgatatacctccgttatgtgccgctctggaaggtccatattttcacagtcattcagcttacttgtttggtccttttatgggtgataaaagtttcagctgctgcagtggtttttcccatgatggttcttgcattagtgtttgtgcgcaaactcatggacctgtgtttcacgaagagagaacttagttggcttgatgatcttatgccagaaagtaagaaaaagaaagaagatgacaaaaagaaaaaagagaaagaggaagctgaacggatgcttcaagatgatgatgatactgtgcaccttccatttgaagggggaagtctcttgcaaattccagtcaaggccctaaaatatagtgttgatccctcaattgttaacatatcagatgaaatggccaaaactgcacagtggaaggcactttccatgaatactgagaatgccaaagtaaccagatctaacatgagtcctgataaacctgtgagtgtgaaaataagttttgaagatgaaccaagaaagaaatacgtggatgctgaaacttcattatagaattgaaccaagaggcattatacatatagatatatacatatgtaatgtgtgcgtatcatgtcactatatataagaatattgtatgtcatgctgtttatgtgtgactaccgggtttttaaaagtagtgtctggagtttgtaatgagcaccgtggagactatgtatttaatgaaatgctctctttgaagtgaggtacatggttcttaactattcaaatatttattctgttagaaaaaaaaattttctgttttgcaatagaaggatgtggagaaatgctttcagtctacttttcttaaatctctgttcatcagtggcaattcgtaaaaaccttaagtgatactttgtttatatgtttataatttttaggtgtttcctgaaattttcacatattatttcacttttgttagtgctttatgggaagaatagggagtctataccagtgctgtgggaaaaatggtaacatttcagggcttctctatttgtgtttcatttctgtagatgtccatcgtgtttcactaactggcgttttcttagccatagagatgactgtagaacaatagaaactttaataatgatagtttttaacttttatgtttaaattttttttaaatcttaaaaccttcatatctaggtatccattgtgacagacaagtaaaattgcaggtgatttgataattaagcacccataccatttataacttctgaatttaaaaagttatacaatgccagtttgcaatagttgattttgatgcctttgtagaatattttttctgaatccttatgctcttttaaagccaatgattcccactctgttctctgccttgtctctctttgtcttaaaatgctttagtttccatcaggttcaagttcttgactattattctcttataagtagtaggcgtaaataatcaggagttagaattctctcagaagggtctatgatcagtattactttattaagaattacctttcattttctctttatgttattctttcacttttgtagattacatttaatagcttgttacctgtgattttattttaaaatatttattttgatatgatgcttaaatattatataaacatttggaaaagtaacaaatagagtaaattgttaatgtaaatagttggtgcttactttcatttatgtttattatcttaaagcaattgatagattttacatctttgatataaagcactgccatatttatattttaaaaggaaattagacattttatatgtagctcagattaatgacatttttattttgtgtattagtttttgcttttctgagctttttaaagtctaacaaatctttttagtcatcttttatatacttttagttccacatgaaataaatgttgttaagcctgtaggactggatgaatggggttgtgaaactgatttgacaagagaataatttacaaaaatcaaatgagtattgagaagccacagaaatatcaaaaatggtgacatcactattaggatgaaaattttatgaaattccaatgctccctttaaccatataattaaattacaaaggtatacataattaatctaataaaggatcatgaggaatgccaaaagctgaaattttagcaagtctggtgttttaaattcattataaactatttattaactaatgtaatgtcctcctctaagaccatattgtaagagtcttgttaaaatgatggattcaacttctgcctcggatgagaggttggaaatgtagctgcttttctttagaaaatatgtagctgtcatcatttggtactgcctaaaaagagttagactctattggcaattgatagagtattacccacggtgcttattattgtttatgagcttccattgtaatgattcctttttatttgtagcagcataattatttccaaagaccccagtatttgctgctatttttaaaactcccctgatgtacctgaacaagaggatttcctcacatcatttccttgtgtctggacatcaggggtaacaactgtacttactttacaggaagaaattttaaaactgaaaactacctgggatcatagtgtttctgtgattttatttaattgtgtatagtaattatccagtgccagaaaaaccgtcacttgcaaaatactttgcactcaaaatgtttttacaatgcttctaaatgttactggtttctgctttcttttgactacttgactgacaaaatgatctgactactccatttaagagcaaaggtaactcatgtttaggtaattaactgcttgttttaagtgattatatttcttccactgtttttgaaaaataatcaaagatagcattcattgagagacagtgacagatataatttactacatatattgatttttaaataaagttgccttaaataagtgtatgtaagcagtagtagttgctatgtactgatttacctcaaggtgcaaaataattaaacctgtacatattccatttacaaaataaattcagccctgcactttctttagatgccttgatttccagaatggagcttagtgctactgaataccctggccacagagccacctcaggatattcttttctccaccctagtttatttatttatagatatctgtttacaaagtctgtagtaaatcctgatgctgaccatctgaaatgtactttttttctgaatgctgtttcaatctaaaatagcagcttttgagaaaacaatgatgtaaattccttatgataaaaggatgattctatatattctttaatgatattaaatatgccgaagccaagcacacagtctttctaaagtgtgtgtatgtttgtgtgaatgtgaatgatactgatcttatatctgttaaaagttgttttaaaaagctgtggcatcccattgttcatatttgccaagtcttctgtaaagatgtctaggacgaaatattttatgtgctaatgcatgtatttgtaaaccagatttgtttaccactcaaaattaacttgttttcttcatccaaaaaagtttatttcttccacgtacttaaattttctgtgtgggtataatatagctttctaatttttttctttcacaaaggcaggttcaaaattctgttgaaagaaaaatgctttctgaaactgaggtataacaccagagcttgctgtttaaaggattatatgatgtacatcagttctataaatgtgctcagcagtttaacatgtgaatcctgttttaaagtgctcagatttcaactgtgtaagccattgatataacgctgtaattaaaaatgtttatatgaaataacttaatgttttaaatttatttatgtagatcacatcatttttatcgtatgcagtgcaaatatgtgaaatgtcttttggtttattccaacaattatttattttagaaagtaagtttaaagactttaaggacattcaaagtttaaaatagtgttcaaattgcaaaatttggcaatcttcatataaattggtttcttttctaacttttcaaaaactaacattaaatgtcaattataggaaaacatagttggaaatgtaatcatccaaagatcatttttaaaatgaaatttaattagcacatattgaacatttgacttaattgttaaaccccagttttgttttgtttttttaatcagatttttgcacactgattagtttttgtgttgtggcttttgttgctttattattcaaggttttttttttttttcttccccatgggggagattgtcttccaatgtttaactacgtttaaataaataaaaattgaattttattgttcatttatataaaatctgataccttgatgtaatttcacaatacagttccaatttttatggcttttataattacaatgatattttcttctataataaaatccaaagtaaacatttaaattgtagaactgatatttttcatttatatgaagtataagcctctactgggtctatattgtgaatcatcctgcctttcaaatttgtttcataattgttagatgaaaactatttttttggagatgttactgaagttgattgagcaataaaagtctacttaatta

SEQ ID NO: 93088 - DNA, 4001 bp, Artificial Sequence
  derived and/or modified sequence
cctactaaagccagcccagcagtcgcagcgcgcacacgcacgccccgcgtctcccgcgcccggcgcccggctctccccacgcgcgcacacctcgcgcacggacgcacccacgtttgtcctcgcgcgccgggggctcggcggcggcggcaggggcagcggcagaagcaggcagaccgcgcggggcagtaccgtagcggccgtcacgggctggccggccggccatggaggctgatggggccggcgagcagatgagaccgctactcacccgggtaacgagcaggggtcctgatgaagaagctgttgtggatcttggcaaaactagctcaactgtgaacaccaagtttgaaaaagaagaactagaaagtcatagagctgtatatattggtgttcacgtcccgtttagtaaagagagtcgtcggcgtcataggcatcgcggacacaaacatcaccaccggagaagaaaagataaagaatcagataaagaagatggacgggaatctccttcttatgatacaccatcccagagagttcagtttatccttggtactgaagatgatgatgaagaacatattccccatgatctcttcacggaaatggatgaactgtgttacagagatggagaagaatatgaatggaaagaaactgctagatggctgaaatttgaagaggatgttgaagatggcggtgaccgatggagtaaaccttatgtggcaactctctctttgcacagtctttttgaactaaggagttgcatcctcaatggaacagtcatgctggatatgagagcaagcactctagatgaaatagcagatatggtattagacaacatgatagcttctggccaattagacgagtccatacgagagaatgtcagagaagctcttctgaagagacatcatcatcagaatgagaaaagattcaccagtcggattcctcttgttcgatcttttgcagatataggcaagaaacattctgaccctcacttgcttgaaaggaatggggaaggcctttcagcctcccgccactctttgcgaacaggtctgtctgcctcaaacctttccttgagaggagaatcacctttatctcttcttcttggtcatcttcttccttcttcaagagctggaacccctgcaggctcaaggtgtacaaccccagtacccacccctcaaaacagtcctccttctagccctagcatcagccgcctgacctccagaagttcccaagagagtcagcgtcaggccccagaactactggtttcacctgccagtgatgatattcccacagtagtaattcatccgcctgaggaagacttagaagcagcgctgaaaggcgaggagcagaagaatgaggaaaatgttgacttaactccaggtattttggcctctccccagtctgctcctggaaacttggacaatagtaaaagtggagaaattaaaggtaatggaagtggtggaagcagagaaaatagtactgttgacttcagcaaggtttttgtttttgttattgggtccagcgggcaaggcaccacagtaccatgaaattggacgatcaatagccactctcatgacagatgagattttccatgatgtagcttataaagcaaaagacagaaatgacctcttatctggaattgatgaatttttagatcaagtaactgtcctacctccaggagagtgggatccttctatacgcatagaaccaccaaaaagtgtcccttctcaggaaaagagaaagattcctgtgtttcacaatggatctacccccacactgggtgagactcctaaagaggccgctcatcatgctgggcctgagctacagaggactggacggctttttggtggtttgatacttgacatcaaaaggaaagcaccttttttcttgagtgacttcaaggatgcattaagcctgcagtgcctggcctcgattcttttcctatactgtgcctgtatgtctcctgtaatcacttttggagggctgcttggagaagctacagaaggcagaataagtgcaatagagtctctttttggagcatcattaactgggattgcctattcattgtttgctgggcaacctctaacaatattggggagcacaggtccagttctagtgtttgaaaaaattttatataaattctgcagagattatcaactttcttatctgtctttaagaaccagtattggtctgtggacttcttttttgtgcattgttttggttgcaacagatgcaagcagccttgtgtgttatattactcgatttacagaagaggcttttgcagcccttatttgcatcatattcatctacgaggctttggagaagctctttgatttaggagaaacatatgcatttaatatgcacaacaacttagataaactgaccagctactcatgtgtatgtactgaacctccaaaccccagcaatgaaactctagcacaatggaagaaagataatataacagcacacaatatttcctggagaaatcttactgtttctgaatgtaaaaaacttcgtggtgtattcttggggtcagcttgtggtcatcatggaccttatattccagatgtgctcttttggtgtgtcatcttgtttttcacaacattttttctgtcttcattcctcaagcaatttaagaccaagcgttactttcctaccaaggtgcgatcgacaatcagtgattttgctgtatttctcacaatagtaataatggttacaattgactaccttgtaggagttccatctcctaaacttcatgttcctgaaaaatttgagcctactcatccagagagagggtggatcataagcccactgggagataatccttggtggaccttattaatagctgctattcctgctttgctttgtaccattctcatctttatggatcaacaaatcacagctgtaattataaacagaaaggaacacaaattgaagaaaggagctggctatcaccttgatttgctcatggttggcgttatgttgggagtttgctctgtcatgggacttccatggtttgtggctgcaacagtgttgtcaataagtcatgtcaacagcttaaaagttgaatctgaatgttctgctccaggggaacaacccaagtttttgggaattcgtgaacagcgggttacagggctaatgatttttattctaatgggcctctctgtgttcatgacttcagtcctaaagtttattccaatgcctgttctgtatggtgttttcctttatatgggagtttcctcattaaaaggaatccagttatttgaccgtataaaattatttggaatgcctgctaagcatcagcctgatttgatatacctccgttatgtgccgctctggaaggtccatattttcacagtcattcagcttacttgtttggtccttttatgggtgataaaagtttcagctgctgcagtggtttttcccatgatggttcttgcattagtgtttgtgcgcaaactcatggacctgtgtttcacgaagagagaacttagttggcttgatgatcttatgccagaaagtaagaaaaagaaagaagatgacaaaaagaaaaaagagaaagaggaagctgaacggatgcttcaagatgatgatgatactgtgcaccttccatttgaagggggaagtctcttgcaaattccagtcaaggccctaaaatatagtgttgatccctcaattgttaacatatcagatgaaatggccaaaactgcacagtggaaggcactttccatgaatactgagaatgccaaagtaaccagatctaacatgagtcctgataaacctgtgagtgtgaaaataagttttgaagatgaaccaagaaagaaatacgtggatgctgaaacttcattatagaattgaaccaagaggcattatacatatagatatatacatatgtaatgtgtgcgtatcatgtcactatatataagaatattgtatgtcatgctgtttatgtgtgactaccgggtttttaaaagtagtgtctggagtttgtaatgagcaccgtggagact

SEQ ID NO: 93089 - DNA, 3933 bp, Artificial Sequence
  derived and/or modified sequence
cctactaaagccagcccagcagtcgcagcgcgcacacgcacgccccgcgtctcccgcgcccggcgcccggctctccccacgcgcgcacacctcgcgcacggacgcacccacgtttgtcctcgcgcgccgggggctcggcggcggcggcaggggcagcggcagaagcaggcagaccgcgcggggcagtaccgtagcggccgtcacgggctggccggccggccatggaggctgatggggccggcgagcagatgagaccgctactcacccggggtcctgatgaagaagctgttgtggatcttggcaaaactagctcaactgtgaacaccaagtttgaaaaagaagaactagaaagtcatagagctgtatatattggtgttcacgtcccgtttagtaaagagagtcgtcggcgtcataggcatcgcggacacaaacatcaccaccggagaagaaaagataaagaatcagataaagaagatggacgggaatctccttcttatgatacaccatcccagagagttcagtttatccttggtactgaagatgatgatgaagaacatattccccatgatctcttcacggaaatggatgaactgtgttacagagatggagaagaatatgaatggaaagaaactgctagatggctgaaatttgaagaggatgttgaagatggcggtgaccgatggagtaaaccttatgtggcaactctctctttgcacagtctttttgaactaaggagttgcatcctcaatggaacagtcatgctggatatgagagcaagcactctagatgaaatagcagatatggtattagacaacatgatagcttctggccaattagacgagtccatacgagagaatgtcagagaagctcttctgaagagacatcatcatcagaatgagaaaagattcaccagtcggattcctcttgttcgatcttttgcagatataggggaaggcctttcagcctcccgccactctttgcgaacaggtctgtctgcctcaaacctttccttgagaggagaatcacctttatctcttcttcttggtcatcttcttccttcttcaagagctggaacccctgcaggctcaaggtgtacaaccccagtacccacccctcaaaacagtcctccttctagccctagcatcagccgcctgacctccagaagttcccaagagagtcagcgtcaggccccagaactactggtttcacctgccagtgatgatattcccacagtagtaattcatccgcctgaggaagacttagaagcagcgctgaaaggcgaggagcagaagaatgaggaaaatgttgacttaactccaggtattttggcctctccccagtctgctcctggaaacttggacaatagtaaaagtggagaaattaaaggtaatggaagtggtggaagcagagaaaatagtactgttgacttcagcaaggttgatatgaatttcatgagaaaaattcctacgggtgctgaggcatccaacgtcctggtgggcgaagtagactttttggaaaggccaataattgcatttgtgagactggctcctgctgtcctccttacagggttgactgaggtccctgttccaaccaggtttttgtttttgttattgggtccagcgggcaaggcaccacagtaccatgaaattggacgatcaatagccactctcatgacagatgagattttccatgatgtagcttataaagcaaaagacagaaatgacctcttatctggaattgatgaatttttagatcaagtaactgtcctacctccaggagagtgggatccttctatacgcatagaaccaccaaaaagtgtcccttctcaggaaaagagaaagattcctgtgtttcacaatggatctacccccacactgggtgagactcctaaagaggccgctcatcatgctgggcctgagctacagaggactggacgagtgcaatagagtctctttttggagcatcattaactgggattgcctattcattgtttgctgggcaacctctaacaatattggggagcacaggtccagttctagtgtttgaaaaaattttatataaattctgcagagattatcaactttcttatctgtctttaagaaccagtattggtctgtggacttcttttttgtgcattgttttggttgcaacagatgcaagcagccttgtgtgttatattactcgatttacagaagaggcttttgcagcccttatttgcatcatattcatctacgaggctttggagaagctctttgatttaggagaaacatatgcatttaatatgcacaacaacttagataaactgaccagctactcatgtgtatgtactgaacctccaaaccccagcaatgaaactctagcacaatggaagaaagataatataacagcacacaatatttcctggagaaatcttactgtttctgaatgtaaaaaacttcgtggtgtattcttggggtcagcttgtggtcatcatggaccttatattccagatgtgctcttttggtgtgtcatcttgtttttcacaacattttttctgtcttcattcctcaagcaatttaagaccaagcgttactttcctaccaaggtgcgatcgacaatcagtgattttgctgtatttctcacaatagtaataatggttacaattgactaccttgtaggagttccatctcctaaacttcatgttcctgaaaaatttgagcctactcatccagagagagggtggatcataagcccactgggagataatccttggtggaccttattaatagctgctattcctgctttgctttgtaccattctcatctttatggatcaacaaatcacagctgtaattataaacagaaaggaacacaaattgaagaaaggagctggctatcaccttgatttgctcatggttggcgttatgttgggagtttgctctgtcatgggacttccatggtttgtggctgcaacagtgttgtcaataagtcatgtcaacagcttaaaagttgaatctgaatgttctgctccaggggaacaacccaagtttttgggaattcgtgaacagcgggttacagggctaatgatttttattctaatgggcctctctgtgttcatgacttcagtcctaaagtttattccaatgcctgttctgtatggtgttttcctttatatgggagtttcctcattaaaaggaatccagttatttgaccgtataaaattatttggaatgcctgctaagcatcagcctgatttgatatacctccgttatgtgccgctctggaaggtccatattttcacagtcattcagcttacttgtttggtccttttatgggtgataaaagtttcagctgctgcagtggtttttcccatgatggttcttgcattagtgtttgtgcgcaaactcatggacctgtgtttcacgaagagagaacttagttggcttgatgatcttatgccagaaagtaagaaaaagaaagaagatgacaaaaagaaaaaagagaaagaggaagctgaacggatgcttcaagatgatgatgatactgtgcaccttccatttgaagggggaagtctcttgcaaattccagtcaaggccctaaaatatagtgttgatccctcaattgttaacatatcagatgaaatggccaaaactgcacagtggaaggcactttccatgaatactgagaatgccaaagtaaccagatctaacatgagtcctgataaacctgtgagtgtgaaaataagttttgaagatgaaccaagaaagaaatacgtggatgctgaaacttcattatagaattgaaccaagaggcattatacatatagatatatacatatgtaatgtgtgcgtatcatgtcactatatataagaatattgtatgtcatgctgtttatgtgtgactaccgggtttttaaaagtagtgtctggagtttgtaatgagcaccgtggagact

SEQ ID NO: 93090 - DNA, 3775 bp, Artificial Sequence
  derived and/or modified sequence
cctactaaagccagcccagcagtcgcagcgcgcacacgcacgccccgcgtctcccgcgcccggcgcccggctctccccacgcgcgcacacctcgcgcacggacgcacccacgtttgtcctcgcgcgccgggggctcggcggcggcggcaggggcagcggcagaagcaggcagaccgcgcggggcagtaccgtagcggccgtcacgggctggccggccggccatggaggctgatggggccggcgagcagatgagaccgctactcacccggggtcctgatgaagaagctgttgtggatcttggcaaaactagctcaactgtgaacaccaagtttgaaaaagaagaactagaaagtcatagagctgtatatattggtgttcacgtcccgtttagtaaagagagtcgtcggcgtcataggcatcgcggacacaaacatcaccaccggagaagaaaagataaagaatcagataaagaagatggacgggaatctccttcttatgatacaccatcccagagagttcagtttatccttggtactgaagatgatgatgaagaacatattccccatgatctcttcacggaaatggatgaactgtgttacagagatggagaagaatatgaatggaaagaaactgctagatggctgaaatttgaagaggatgttgaagatggcggtgaccgatggagtaaaccttatgtggcaactctctctttgcacagtctttttgaactaaggagttgcatcctcaatggaacagtcatgctggatatgagagcaagcactctagatgaaatagcagatatggtattagacaacatgatagcttctggccaattagacgagtccatacgagagaatgtcagagaagctcttctgaagagacatcatcatcagaatgagaaaagattcaccagtcggattcctcttgttcgatcttttgcagatataggcaagaaacattctgaccctcacttgcttgaaaggaatggtattttggcctctccccagtctgctcctggaaacttggacaatagtaaaagtggagaaattaaaggtaatggaagtggtggaagcagagaaaatagtactgttgacttcagcaaggttgatatgaatttcatgagaaaaattcctacgggtgctgaggcatccaacgtcctggtgggcgaagtagactttttggaaaggccaataattgcatttgtgagactggctcctgctgtcctccttacagggttgactgaggtccctgttccaaccaggtttttgtttttgttattgggtccagcgggcaaggcaccacagtaccatgaaattggacgatcaatagccactctcatgacagatgagattttccatgatgtagcttataaagcaaaagacagaaatgacctcttatctggaattgatgaatttttagatcaagtaactgtcctacctccaggagagtgggatccttctatacgcatagaaccaccaaaaagtgtcccttctcaggaaaagagaaagattcctgtgtttcacaatggatctacccccacactgggtgagactcctaaagaggccgctcatcatgctgggcctgagctacagaggactggacggctttttggtggtttgatacttgacatcaaaaggaaagcaccttttttcttgagtgacttcaaggatgcattaagcctgcagtgcctggcctcgattcttttcctatactgtgcctgtatgtctcctgtaatcacttttggagggctgcttggagaagctacagaaggcagaataagtgcaatagagtctctttttggagcatcattaactgggattgcctattcattgtttgctgggcaacctctaacaatattggggagcacaggtccagttctagtgtttgaaaaaattttatataaattctgcagagattatcaactttcttatctgtctttaagaaccagtattggtctgtggacttcttttttgtgcattgttttggttgcaacagatgcaagcagccttgtgtgttatattactcgatttacagaagaggcttttgcagcccttatttgcatcatattcatctacgaggctttggagaagctctttgatttaggagaaacatatgcatttaatatgcacaacaacttagataaactgaccagctactcatgtgtatgtactgaacctccaaaccccagcaatgaaactctagcacaatggaagaaagataatataacagcacacaatatttcctggagaaatcttactgtttctgaatgtaaaaaacttcgtggtgtattcttggggtcagcttgtggtcatcatggaccttatattccagatgtgctcttttggtgtgtcatcttgtttttcacaacattttttctgtcttcattcctcaagcaatttaagaccaagcgttactttcctaccaaggtgcgatcgacaatcagtgattttgctgtatttctcacaatagtaataatggttacaattgactaccttgtaggagttccatctcctaaacttcatgttcctgaaaaatttgagcctactcatccagagagagggtggatcataagcccactgggagataatccttggtggaccttattaatagctgctattcctgctttgctttgtaccattctcatctttatggatcaacaaatcacagctgtaattataaacagaaaggaacacaaattgaagaaaggagctggctatcaccttgatttgctcatggttggcgttatgttgggagtttgctctgtcatgggacttccatggtttgtggctgcaacagtgttgtcaataagtcatgtcaacagcttaaaagttgaatctgaatgttctgctccaggggaacaacccaagtttttgggaattcgtgaacagcgggttacagggctaatgatttttattctaatgggcctctctgtgttcatgacttcagtcctaaagtttattccaatgcctgttctgtatggtgttttcctttatatgggagtttcctcattaaaaggaatccagttatttgaccgtataaaattatttggaatgcctgctaagcatcagcctgatttgatatacctccgttatgtgccgctctggaaggtccatattttcacagtcattcagcttacttgtttggtccttttatgggtgataaaagtttcagctgctgcagtggtttttcccatgatggttcttgcattagtgtttgtgcgcaaactcatggacctgtgtttcacgaagagagaacttagttggcttgatgatcttatgccagaaagtaagaaaaagaaagaagatgacaaaaagaaaaaagagaaagaggaagctgaacggatgcttcaagatgatgatgatactgtgcaccttccatttgaagggggaagtctcttgcaaattccagtcaaggccctaaaatatagtgttgatccctcaattgttaacatatcagatgaaatggccaaaactgcacagtggaaggcactttccatgaatactgagaatgccaaagtaaccagatctaacatgagtcctgataaacctgtgagtgtgaaaataagttttgaagatgaaccaagaaagaaatacgtggatgctgaaacttcattatagaattgaaccaagaggcattatacatatagatatatacatatgtaatgtgtgcgtatcatgtcactatatataagaatattgtatgtcatgctgtttatgtgtgactaccgggtttttaaaagtagtgtctggagtttgtaatgagcaccgtggagact

SEQ ID NO: 93091 - DNA, 3600 bp, Artificial Sequence
  derived and/or modified sequence
cctactaaagccagcccagcagtcgcagcgcgcacacgcacgccccgcgtctcccgcgcccggcgcccggctctccccacgcgcgcacacctcgcgcacggacgcacccacgtttgtcctcgcgcgccgggggctcggcggcggcggcaggggcagcggcagaagcaggcagaccgcgcggggcagtaccgtagcggccgtcacgggctggccggccggccatggaggctgatggggccggcgagcagatgagaccgctactcacccggggtcctgatgaagaagctgttgtggatcttggcaaaactagctcaactgtgaacaccaagtttgaaaaagaagaactagaaagtcatagagctgtatatattggtgttcacgtcccgtttagtaaagagagtcgtcggcgtcataggcatcgcggacacaaacatcaccaccggagaagaaaagataaagaatcagataaagaagatggacgggaatctccttcttatgatacaccatcccagagagttcagtttatccttggtactgaagatgatgatgaagaacatattccccatgatctcttcacggaaatggatgaactgtgttacagagatggagaagaatatgaatggaaagaaactgctagatggctgaaatttgaagaggatgttgaagatggcggtgaccgatggagtaaaccttatgtggcaactctctctttgcacagtctttttgaactaaggagttgcatcctcaatggaacagtcatgctggatatgagagcaagcactctagatgaaatagcagatatggtattagacaacatgatagcttctggccaattagacgagtccatacgagagaatgtcagagaagctcttctgaagagacatcatcatcagaatgagaaaagattcaccagtcggattcctcttgttcgatcttttgcagatataggcaagaaacattctgaccctcacttgcttgaaaggaatggtattttggcctctccccagtctgctcctggaaacttggacaatagtaaaagtggagaaattaaaggtaatggaagtggtggaagcagagaaaatagtactgttgacttcagcaaggttgatatgaatttcatgagaaaaattcctacgggtgctgaggcatccaacgtcctggtgggcgaagtagactttttggaaaggccaataattgcatttgtgagactggctcctgctgtcctccttacagggttgactgaggtccctgttccaaccaggtttttgtttttgttattgggtccagcgggcaaggcaccacagtaccatgaaattggacgatcaatagccactctcatgacagatgagattttccatgatgtagcttataaagcaaaagacagaaatgacctcttatctggaattgatgaatttttagatcaagtaactgtcctacctccaggagagtgggatccttctatacgcatagaaccaccaaaaagtgtcccttctcaggaaaagagaaagattcctgtgtttcacaatggatctacccccacactgggtgagactcctaaagaggccgctcatcatgctgggcctgagctacagaggactggacgagtgcaatagagtctctttttggagcatcattaactgggattgcctattcattgtttgctgggcaacctctaacaatattggggagcacaggtccagttctagtgtttgaaaaaattttatataaattctgcagagattatcaactttcttatctgtctttaagaaccagtattggtctgtggacttcttttttgtgcattgttttggttgcaacagatgcaagcagccttgtgtgttatattactcgatttacagaagaggcttttgcagcccttatttgcatcatattcatctacgaggctttggagaagctctttgatttaggagaaacatatgcatttaatatgcacaacaacttagataaactgaccagctactcatgtgtatgtactgaacctccaaaccccagcaatgaaactctagcacaatggaagaaagataatataacagcacacaatatttcctggagaaatcttactgtttctgaatgtaaaaaacttcgtggtgtattcttggggtcagcttgtggtcatcatggaccttatattccagatgtgctcttttggtgtgtcatcttgtttttcacaacattttttctgtcttcattcctcaagcaatttaagaccaagcgttactttcctaccaaggtgcgatcgacaatcagtgattttgctgtatttctcacaatagtaataatggttacaattgactaccttgtaggagttccatctcctaaacttcatgttcctgaaaaatttgagcctactcatccagagagagggtggatcataagcccactgggagataatccttggtggaccttattaatagctgctattcctgctttgctttgtaccattctcatctttatggatcaacaaatcacagctgtaattataaacagaaaggaacacaaattgaagaaaggagctggctatcaccttgatttgctcatggttggcgttatgttgggagtttgctctgtcatgggacttccatggtttgtggctgcaacagtgttgtcaataagtcatgtcaacagcttaaaagttgaatctgaatgttctgctccaggggaacaacccaagtttttgggaattcgtgaacagcgggttacagggctaatgatttttattctaatgggcctctctgtgttcatgacttcagtcctaaagtttattccaatgcctgttctgtatggtgttttcctttatatgggagtttcctcattaaaaggaatccagttatttgaccgtataaaattatttggaatgcctgctaagcatcagcctgatttgatatacctccgttatgtgccgctctggaaggtccatattttcacagtcattcagcttacttgtttggtccttttatgggtgataaaagtttcagctgctgcagtggtttttcccatgatggttcttgcattagtgtttgtgcgcaaactcatggacctgtgtttcacgaagagagaacttagttggcttgatgatcttatgccagaaagtaagaaaaagaaagaagatgacaaaaagaaaaaagagaaagaggaagctgaacggatgcttcaagatgatgatgatactgtgcaccttccatttgaagggggaagtctcttgcaaattccagtcaaggccctaaaatatagtgttgatccctcaattgttaacatatcagatgaaatggccaaaactgcacagtggaaggcactttccatgaatactgagaatgccaaagtaaccagatctaacatgagtcctgataaacctgtgagtgtgaaaataagttttgaagatgaaccaagaaagaaatacgtggatgctgaaacttcattatagaattgaaccaagaggcattatacatatagatatatacatatgtaatgtgtgcgtatcatgtcactatatataagaatattgtatgtcatgctgtttatgtgtgactaccgggtttttaaaagtagtgtctggagtttgtaatgagcaccgtggagact

SEQ ID NO: 93092 - DNA, 2406 bp, Artificial Sequence
  derived and/or modified sequence
gtgatggaggtggtggaggccgagaagatcgtgctgctgaccagcgccagattcctgttcctgctgctgggccccgccggcaaggccccccagtaccacgagatcggcagaagcatcgccaccctgatgaccgacgagatcttccacgacgtggcctacaaggccaaggacagaaacgacctgctgagcggcatcgacgagttcctggaccaggtgaccgtgctgccccccggcgagtgggaccccagcatcagaatcgagccccccaagagcgtgcccagccaggagaagagaaagatccccgtgttccacaacggcagcacccccaccctgggcgagacccccaaggaggccgcccaccacgccggccccgagctgcagagaaccggcagactgttcggcggcctgatcctggacatcaagagaaaggcccccttcttcctgagcgacttcaaggacgccctgagcctgcagtgcctggccagcatcctgttcctgtactgcgcctgcatgagccccgtgatcaccttcggcggcctgctgggcgaggccaccgagggcagaatcagcgccatcgagagcctgttcggcgccagcctgaccggcatcgcctacagcctgttcgccggccagcccctgaccatcctgggcagcaccggccccgtgctggtgttcgagaagatcctgtacaagttctgcagagactaccagctgagctacctgagcctgagaaccagcatcggcctgtggaccagcttcctgtgcatcgtgctggtggccaccgacgccagcagcctggtgtgctacatcaccagattcaccgaggaggccttcgccgccctgatctgcatcatcttcatctacgaggccctggagaagctgttcgacctgggcgagacctacgccttcaacatgcacaacaacctggacaagctgaccagctacagctgcgtgtgcaccgagccccccaaccccagcaacgagaccctggcccagtggaagaaggacaacatcaccgcccacaacatcagctggagaaacctgaccgtgagcgagtgcaagaagctgagaggcgtgttcctgggcagcgcctgcggccaccacggcccctacatccccgacgtgctgttctggtgcgtgatcctgttcttcaccaccttcttcctgagcagcttcctgaagcagttcaagaccaagagatacttccccaccaaggtgagaagcaccatcagcgacttcgccgtgttcctgaccatcgtgatcatggtgaccatcgactacctggtgggcgtgcccagccccaagctgcacgtgcccgagaagttcgagcccacccaccccgagagaggctggatcatcagccccctgggcgacaacccctggtggaccctgctgatcgccgccatccccgccctgctgtgcaccatcctgatcttcatggaccagcagatcaccgccgtgatcatcaacagaaaggagcacaagctgaagaagggcgccggctaccacctggacctgctgatggtgggcgtgatgctgggcgtgtgcagcgtgatgggcctgccctggttcgtggccgccaccgtgctgagcatcagccacgtgaacagcctgaaggtggagagcgagtgcagcgcccccggcgagcagcccaagttcctgggcatcagagagcagagagtgaccggcctgatgatcttcatcctgatgggcctgagcgtgttcatgaccagcgtgctgaagttcatccccatgcccgtgctgtacggcgtgttcctgtacatgggcgtgagcagcctgaagggcatccagctgttcgacagaatcaagctgttcggcatgcccgccaagcaccagcccgacctgatctacctgagatacgtgcccctgtggaaggtgcacatcttcaccgtgatccagctgacctgcctggtgctgctgtgggtgatcaaggtgagcgccgccgccgtggtgttccccatgatggtgctggccctggtgttcgtgagaaagctgatggacctgtgcttcaccaagagagagctgagctggctggacgacctgatgcccgagagcaagaagaagaaggaggacgacaagaagaagaaggagaaggaggaggccgagagaatgctgcaggacgacgacgacaccgtgcacctgcccttcgagggcggcagcctgctgcagatccccgtgaaggccctgaagtacagcgtggaccccagcatcgtgaacatcagcgacgagatggccaagaccgcccagtggaaggccctgagcatgaacaccgagaacgccaaggtgaccagaagcaacatgagccccgacaagcccgtgagcgtgaagatcagcttcgaggacgagcccagaaagaagtacgtggacgccgagaccagcctgtag

SEQ ID NO: 93093 - protein, 1090 aa, Artificial Sequence
  derived and/or modified sequence
MERFRLEKKLPGPDEEAVVDLGKTSSTVNTKFEKEELESHRAVYIGVHVPFSKESRRRHRHRGHKHHHRRRKDKESDKEDGRESPSYDTPSQRVQFILGTEDDDEEHIPHDLFTEMDELCYRDGEEYEWKETARWLKFEEDVEDGGDRWSKPYVATLSLHSLFELRSCILNGTVMLDMRASTLDEIADMVLDNMIASGQLDESIRENVREALLKRHHHQNEKRFTSRIPLVRSFADIGKKHSDPHLLERNGILASPQSAPGNLDNSKSGEIKGNGSGGSRENSTVDFSKVDMNFMRKIPTGAEASNVLVGEVDFLERPIIAFVRLAPAVLLTGLTEVPVPTRFLFLLLGPAGKAPQYHEIGRSIATLMTDEIFHDVAYKAKDRNDLLSGIDEFLDQVTVLPPGEWDPSIRIEPPKSVPSQEKRKIPVFHNGSTPTLGETPKEAAHHAGPELQRTGRLFGGLILDIKRKAPFFLSDFKDALSLQCLASILFLYCACMSPVITFGGLLGEATEGRISAIESLFGASLTGIAYSLFAGQPLTILGSTGPVLVFEKILYKFCRDYQLSYLSLRTSIGLWTSFLCIVLVATDASSLVCYITRFTEEAFAALICIIFIYEALEKLFDLGETYAFNMHNNLDKLTSYSCVCTEPPNPSNETLAQWKKDNITAHNISWRNLTVSECKKLRGVFLGSACGHHGPYIPDVLFWCVILFFTTFFLSSFLKQFKTKRYFPTKVRSTISDFAVFLTIVIMVTIDYLVGVPSPKLHVPEKFEPTHPERGWIISPLGDNPWWTLLIAAIPALLCTILIFMDQQITAVIINRKEHKLKKGAGYHLDLLMVGVMLGVCSVMGLPWFVAATVLSISHVNSLKVESECSAPGEQPKFLGIREQRVTGLMIFILMGLSVFMTSVLKFIPMPVLYGVFLYMGVSSLKGIQLFDRIKLFGMPAKHQPDLIYLRYVPLWKVHIFTVIQLTCLVLLWVIKVSAAAVVFPMMVLALVFVRKLMDLCFTKRELSWLDDLMPESKKKKEDDKKKKEKEEAERMLQDDDDTVHLPFEGGSLLQIPVKALKYSPDKPVSVKISFEDEPRKKYVDAETSL

SEQ ID NO: 93094 - DNA, 324 bp, Artificial Sequence
  derived and/or modified sequence
atgagacccaaaaccctgagaaactcagcggctcgcagccgaaaagaacctgggttcttgaaccaccatatggagggctcttgtctgcagctcggggagttgtcctctgtaggttattggtggccttttggccatccaggaccagcccagggtcacttacctgtagctgtatgggctagctgggtcgtggctggaatcagcatcgcactgtacttgccgccacatcctgaggggaggtatgaaggcccatttaaacgacacacaaagacctttcgatcagcccaatgtgcggattgccttgttcagtgccccgcatccccttag

SEQ ID NO: 93095 - DNA, 3273 bp, Artificial Sequence
  derived and/or modified sequence
atggagagattcagactggagaagaagctgcccggccccgacgaggaggccgtggtggacctgggcaagaccagcagcaccgtgaacaccaagttcgagaaggaggagctggagagccacagagccgtgtacatcggcgtgcacgtgcccttcagcaaggagagcagaagaagacacagacacagaggccacaagcaccaccacagaagaagaaaggacaaggagagcgacaaggaggacggcagagagagccccagctacgacacccccagccagagagtgcagttcatcctgggcaccgaggacgacgacgaggagcacatcccccacgacctgttcaccgagatggacgagctgtgctacagagacggcgaggagtacgagtggaaggagaccgccagatggctgaagttcgaggaggacgtggaggacggcggcgacagatggagcaagccctacgtggccaccctgagcctgcacagcctgttcgagctgagaagctgcatcctgaacggcaccgtgatgctggacatgagagccagcaccctggacgagatcgccgacatggtgctggacaacatgatcgccagcggccagctggacgagagcatcagagagaacgtgagagaggccctgctgaagagacaccaccaccagaacgagaagagattcaccagcagaatccccctggtgagaagcttcgccgacatcggcaagaagcacagcgacccccacctgctggagagaaacggcatcctggccagcccccagagcgcccccggcaacctggacaacagcaagagcggcgagatcaagggcaacggcagcggcggcagcagagagaacagcaccgtggacttcagcaaggtggacatgaacttcatgagaaagatccccaccggcgccgaggccagcaacgtgctggtgggcgaggtggacttcctggagagacccatcatcgccttcgtgagactggcccccgccgtgctgctgaccggcctgaccgaggtgcccgtgcccaccagattcctgttcctgctgctgggccccgccggcaaggccccccagtaccacgagatcggcagaagcatcgccaccctgatgaccgacgagatcttccacgacgtggcctacaaggccaaggacagaaacgacctgctgagcggcatcgacgagttcctggaccaggtgaccgtgctgccccccggcgagtgggaccccagcatcagaatcgagccccccaagagcgtgcccagccaggagaagagaaagatccccgtgttccacaacggcagcacccccaccctgggcgagacccccaaggaggccgcccaccacgccggccccgagctgcagagaaccggcagactgttcggcggcctgatcctggacatcaagagaaaggcccccttcttcctgagcgacttcaaggacgccctgagcctgcagtgcctggccagcatcctgttcctgtactgcgcctgcatgagccccgtgatcaccttcggcggcctgctgggcgaggccaccgagggcagaatcagcgccatcgagagcctgttcggcgccagcctgaccggcatcgcctacagcctgttcgccggccagcccctgaccatcctgggcagcaccggccccgtgctggtgttcgagaagatcctgtacaagttctgcagagactaccagctgagctacctgagcctgagaaccagcatcggcctgtggaccagcttcctgtgcatcgtgctggtggccaccgacgccagcagcctggtgtgctacatcaccagattcaccgaggaggccttcgccgccctgatctgcatcatcttcatctacgaggccctggagaagctgttcgacctgggcgagacctacgccttcaacatgcacaacaacctggacaagctgaccagctacagctgcgtgtgcaccgagccccccaaccccagcaacgagaccctggcccagtggaagaaggacaacatcaccgcccacaacatcagctggagaaacctgaccgtgagcgagtgcaagaagctgagaggcgtgttcctgggcagcgcctgcggccaccacggcccctacatccccgacgtgctgttctggtgcgtgatcctgttcttcaccaccttcttcctgagcagcttcctgaagcagttcaagaccaagagatacttccccaccaaggtgagaagcaccatcagcgacttcgccgtgttcctgaccatcgtgatcatggtgaccatcgactacctggtgggcgtgcccagccccaagctgcacgtgcccgagaagttcgagcccacccaccccgagagaggctggatcatcagccccctgggcgacaacccctggtggaccctgctgatcgccgccatccccgccctgctgtgcaccatcctgatcttcatggaccagcagatcaccgccgtgatcatcaacagaaaggagcacaagctgaagaagggcgccggctaccacctggacctgctgatggtgggcgtgatgctgggcgtgtgcagcgtgatgggcctgccctggttcgtggccgccaccgtgctgagcatcagccacgtgaacagcctgaaggtggagagcgagtgcagcgcccccggcgagcagcccaagttcctgggcatcagagagcagagagtgaccggcctgatgatcttcatcctgatgggcctgagcgtgttcatgaccagcgtgctgaagttcatccccatgcccgtgctgtacggcgtgttcctgtacatgggcgtgagcagcctgaagggcatccagctgttcgacagaatcaagctgttcggcatgcccgccaagcaccagcccgacctgatctacctgagatacgtgcccctgtggaaggtgcacatcttcaccgtgatccagctgacctgcctggtgctgctgtgggtgatcaaggtgagcgccgccgccgtggtgttccccatgatggtgctggccctggtgttcgtgagaaagctgatggacctgtgcttcaccaagagagagctgagctggctggacgacctgatgcccgagagcaagaagaagaaggaggacgacaagaagaagaaggagaaggaggaggccgagagaatgctgcaggacgacgacgacaccgtgcacctgcccttcgagggcggcagcctgctgcagatccccgtgaaggccctgaagtacagccccgacaagcccgtgagcgtgaagatcagcttcgaggacgagcccagaaagaagtacgtggacgccgagaccagcctgtag

SEQ ID NO: 93096 - DNA, 3273 bp, Artificial Sequence
  derived and/or modified sequence
atggagaggttccgcctggaaaagaagctgcccggccccgacgaagaggccgttgtggacctgggcaagacctcctcaactgtgaatactaagttcgaaaaagaggaactggagtcccacagggctgtttacatcggagtgcacgtaccattctctaaagaatctcgacggagacatagacatagggggcataaacaccatcatagaagaaggaaagacaaggaatccgacaaggaggacgggcgggaaagcccatcctacgatacaccctctcagcgcgtccagtttatcttgggaacagaggacgacgatgaggagcatatcccacacgatttgttcacagagatggatgaactctgctatagggacggtgaggaatacgaatggaaagagaccgcccgatggctgaaatttgaagaggatgtcgaagacggtggcgaccggtggtccaagccatacgtggctacactctcattacactcacttttcgaattaagatcttgcatccttaatggtactgttatgcttgatatgcgggcttccacactcgacgagatcgcagatatggttcttgacaatatgattgcctccgggcaattggacgagagcatccgcgagaatgtgagagaagccctgcttaagcggcatcatcaccagaatgagaaacggtttacaagtagaatacccctggtgcgctcatttgctgatattgggaagaagcacagcgacccccacttactcgaacgtaatggaattctggcctctccacagtctgccccgggcaacttggataactcaaagtccggcgagatcaagggaaacggcagcggcgggagtcgcgaaaattcaaccgtagatttttcgaaagtagatatgaactttatgcgaaagattcccacaggtgccgaagcctcgaacgtgcttgtcggagaggtcgacttcttagagagaccgataattgctttcgttcgcctcgccccggctgtgctcttgaccggcctcacggaggtgccagttcccaccagattcttgttccttttgctcggtcccgcaggtaaggccccccagtaccatgagatcgggcgatccatcgccaccctgatgactgacgagatttttcatgacgtggcctataaagcgaaagaccggaacgaccttctgagtggcatcgatgagtttctcgaccaggtcacagtgcttccccccggcgagtgggaccccagcattaggatcgagccccctaaatccgttccctcacaggaaaaacggaaaatcccggtgttccacaatgggagtacccccactcttggtgagacacctaaggaggcagctcaccacgccggccccgaactgcagagaacagggagactgttcggaggattgattctggatattaagagaaaagccccattcttcctttcggacttcaaggatgccttatccctgcaatgtttagcaagcattcttttcttatactgcgcctgcatgtcgccggtgatcaccttcggaggcctcctgggcgaggccacggaaggacgcatcagtgctattgaaagcctgttcggggcctcactgacagggatagcatacagtctttttgccggccagcctctcacgattctcggaagcaccggacccgttttggtctttgagaagatcctctacaaattttgtcgggattatcagttgagctacctctctctacggactagcattggactctggacctcttttctgtgcatcgtgctcgtagcaacagacgcctcctctttggtgtgctacattacgcgcttcacagaagaggcttttgcggccttgatttgtatcatttttatctacgaagctctcgagaagctgtttgacctaggtgaaacttatgccttcaatatgcataacaacttggataaactaacatcttactcctgtgtgtgtacagagcctcccaatcctagcaacgagactctagcacaatggaaaaaggacaatataacagctcataacatttcgtggcgaaacttgaccgtttccgaatgcaagaagttgcgcggggtcttcctgggtagcgcatgtggccatcacgggccctatatccccgatgtcctgttctggtgtgttatcctgtttttcactactttctttctgtctagttttctgaagcagttcaagactaagaggtactttcccactaaagtgcggtctacaattagcgactttgcggtgttcttgacaatagtgatcatggtcacaatagattatctggtcggcgtgccatctcctaaactgcatgtgcctgaaaagtttgagcccacccaccccgaacgtgggtggataatctctcccctcggagacaatccatggtggaccttgctgatcgccgcaattccagccctgctctgtacgattctgatcttcatggaccagcagataaccgcggtcatcatcaacagaaaggaacacaaactgaagaagggagccggatatcacttagatttactcatggttggcgtgatgttaggcgtttgcagcgtgatgggtctcccgtggtttgtcgcagctaccgtcctaagcatcagccacgtgaattccttgaaagttgaatctgaatgctcagcacccggggaacaacctaagtttctgggtatccgcgaacagagggtgaccgggttgatgatttttatactgatggggctaagtgtcttcatgaccagcgtgctgaaattcattcccatgccggtcctctacggggttttcctctacatgggcgtgagttccctaaagggaatccagctttttgaccgcataaaactgttcgggatgcccgccaagcatcagcccgatctcatctacctgaggtatgtgccactgtggaaggtgcatattttcacagtcatccagcttacctgtctggtgctgctatgggtgattaaggtttctgccgcagcagtggtgtttcccatgatggttctggccctggtgtttgtaagaaagctaatggatttatgcttcactaagcgggaactatcctggttggatgatctcatgccagaatcaaagaagaaaaaagaggatgacaagaagaagaaggagaaagaggaggccgaacgcatgctgcaggacgatgatgatacagtccacctgccgttcgaaggaggctccctgttgcagatacccgttaaggcgctcaaatattcacctgacaaacctgtgtcggtcaagatctcattcgaagatgagccacgcaagaaatacgtagatgctgagacctccctctag

SEQ ID NO: 93097 - DNA, 3273 bp, Artificial Sequence
  derived and/or modified sequence
atggagcgcttccggctggagaagaagctgcccggcccagatgaggaggccgtggtggacctgggcaagaccagcagcacagtgaacaccaagtttgagaaggaggagctggagagccacagagctgtgtacatcggcgtgcacgtgcccttcagcaaggagagcagaagaagacaccgccaccggggccacaagcaccaccacagaagaaggaaggacaaggagagtgacaaggaggatggccgggagagccccagctatgacacccccagccagagggtgcagttcatcctgggcacagaagatgatgatgaggagcacatcccccatgacctcttcacagagatggatgagctgtgctacagagatggagaggagtatgagtggaaggagacagcccgctggctgaagtttgaggaggatgtggaggatggaggagaccgctggagcaagccctacgtggccaccctgagcctgcacagcctgtttgagctgcggagctgcatcctgaatggaacagtgatgctggacatgagggccagcaccctggatgaaattgctgacatggtgctggacaacatgattgccagcggccagctggatgagagcatccgggagaatgtgcgggaggccctgctgaagaggcaccaccaccagaatgagaagcgcttcaccagccgcatccccctggtgcgcagctttgctgacatcggcaagaagcacagcgacccccacctgctggagagaaatggcatcctggccagcccccagagcgcccctggcaacctggacaacagcaagagcggggagatcaagggaaatggcagcggcggcagccgggagaacagcacagtggacttcagcaaggtggacatgaacttcatgaggaagatccccaccggggctgaggccagcaatgtgctggtgggggaggtggacttcctggagcggcccatcatcgcctttgtgcggctggccccagctgtgctgctgaccggcctgacagaggtgcctgtgcccacccgcttcctgttcctgctgctgggccctgctgggaaggccccccagtaccacgagatcggccgcagcatcgccaccctgatgacagatgagatcttccatgatgtggcctacaaggccaaggacagaaatgacctgctgagcggcattgatgagttcctggaccaggtgacagtgctgcccccaggagagtgggaccccagcatcagaattgagccccccaagtctgtgcccagccaggagaagaggaagatccctgtgttccacaacggcagcacccccaccctgggggagacccccaaggaggccgcccaccacgccggccctgagctgcagaggacaggccgcctgtttggaggcctcatcctggacatcaagaggaaggcccccttcttcctgagtgacttcaaggatgccctgagcctgcagtgcctggccagcatcctcttcctgtactgtgcctgcatgagccctgtgatcaccttcggcggcctgctgggggaggccacagagggccgcatcagcgccatcgagagcctgtttggagccagcctgaccggcatcgcctacagcctgtttgctggccagcccctgaccatcctgggcagcacaggccctgtgctggtgtttgagaagatcctgtacaagttctgccgggactaccagctgagctacctgagcctgcggaccagcatcggcctgtggaccagcttcctgtgcatcgtgctggtggccacagatgccagcagcctggtgtgctacatcacccgcttcacagaggaggcctttgctgccctgatctgcatcatcttcatctatgaggccctggagaagctgtttgacctgggggagacctacgccttcaacatgcacaacaacctggacaagctgaccagctacagctgtgtgtgcacagagccccccaaccccagcaatgagaccctggcccagtggaagaaggacaacatcacagcccacaacatctcctggaggaacctgactgtgtctgagtgcaagaagctgcggggcgtcttcctgggcagcgcctgtggccaccacggcccctacatcccagatgtgctcttctggtgtgtgatcctcttcttcaccaccttcttcctgagcagcttcctgaagcagttcaagaccaagcgctacttccccaccaaggtgcgcagcaccatcagtgactttgctgtgttcctgaccatcgtcatcatggtgaccatcgactacctggtgggcgtgcccagccccaagctgcacgtgcctgagaagtttgagcccacccaccctgagcggggctggatcatcagccccctgggggacaacccctggtggaccctgctgattgctgccatcccagccctgctgtgcaccatcctgatcttcatggaccagcagatcacagctgtgatcatcaacaggaaggagcacaagctgaagaagggagctggctaccacctggacctgctgatggtgggcgtgatgctgggcgtgtgcagcgtgatgggcctgccctggtttgtggccgccaccgtgctgagcatcagccacgtgaacagcctgaaggtggagagcgagtgcagcgcccctggagagcagcccaagttcctgggcatccgggagcagagggtgacaggcctgatgatcttcatcctgatgggcctgagcgtcttcatgacctctgtgctgaagttcatccccatgcctgtgctgtatggagtcttcctgtacatgggcgtgagcagcctgaagggcatccagctgtttgaccgcatcaagctgtttggcatgcctgccaagcaccagcctgacctgatctacctgcgctacgtgcccctgtggaaggtgcacatcttcaccgtcatccagctgacctgcctggtgctgctgtgggtgatcaaggtgtctgctgctgctgtggtgttccccatgatggtgctggccctggtgtttgtgaggaagctgatggacctgtgcttcaccaagcgggagctgtcctggctggatgacctgatgcctgagagcaagaagaagaaggaggatgacaagaagaagaaggagaaggaggaggccgagaggatgctgcaggatgatgatgacacagtgcacctgccctttgagggcggcagcctgctgcagatccctgtgaaggccctgaagtacagcccagacaagcctgtgtctgtgaagatcagctttgaagatgagcccaggaagaagtatgtggatgctgagaccagcctgtag

SEQ ID NO: 93098 - DNA, 3273 bp, Artificial Sequence
  derived and/or modified sequence
atggagcggttccggctggagaagaagctgcccggccccgacgaggaagccgtcgtcgatcttgggaagaccagttccactgtgaatactaaatttgagaaagaggagctggaaagtcatcgtgctgtgtacatcggagtccacgtgcctttctcaaaggagagcaggcgccgccatagacacagaggacacaaacaccaccaccgccgcagaaaagacaaggagagtgacaaggaagacgggagagagagccccagctacgacactccttcacagagagtacaatttatcttaggcacagaggacgatgatgaagagcacatacctcatgacctgtttactgaaatggacgagttgtgctatagggatggggaggagtacgagtggaaggaaactgcaaggtggctgaagttcgaggaggatgtagaagacgggggagacaggtggtctaagccctacgtggccactttgtcgctccacagtctcttcgaactaagatcctgtatactcaatggcacagtgatgctggatatgagggcgtctactctggacgagatcgccgatatggtcctggataacatgatcgccagcggccagctggatgaatcaatccgagagaacgtgagggaggctctgctgaaacggcaccaccaccagaatgagaagcgatttacttctaggatacctttggtccggtcattcgccgacattggaaagaagcacagcgaccctcatttattagagcgcaacggtattctggcctcccctcaaagtgccccgggcaacctcgataacagtaagtcaggtgaaatcaaagggaacggttccggtggatcgcgcgaaaacagcactgtggatttcagcaaagtggacatgaatttcatgcgaaagataccaaccggcgccgaagcttccaatgtcctagtgggagaggtggactttttagaaagacccataattgccttcgttaggctggccccagccgtgctcctgaccggtttaacagaagtgcctgttcctacaaggttcctattcctcctgctgggtcctgccggcaaagccccccagtatcatgaaattggtcgttctatcgcgacattgatgaccgacgagatcttccacgacgtggcttataaagcaaaggatcgcaacgaccttttgtcgggaatcgatgaattcttggaccaggtgactgttcttccaccaggagagtgggacccaagcataaggattgaacctccaaaaagcgtgccgtcgcaggagaaacgaaagattccagtgtttcataacgggagtacacccaccttgggggagacccctaaggaagctgcacatcacgcagggcccgagctgcaaagaactggacgcctatttggcgggctgattctcgacataaaacggaaggctccgtttttcttgagtgacttcaaggacgctctttccttacagtgtctagcatctatactgttcctgtactgcgcctgcatgtcacccgtgattacatttggtggcttactcggggaggcgaccgaaggtagaatcagcgctattgagtctctgttcggagcctcacttacggggatcgcctactcactgttcgctggccaaccactaacaatccttggctcgaccggtcccgtgctggtgtttgagaagatcctgtacaaattctgtcgcgattatcaactgtcgtatttaagcctgcggacaagtattggtctctggaccagcttcctgtgtatcgttctggtggcgaccgacgcctctagtctcgtttgctacatcacgagattcacggaagaagcttttgccgcactcatatgtattattttcatctacgaggctttggagaagctgtttgatctgggagagacatacgccttcaatatgcataataatctggataaactcacgtcttactcttgtgtgtgcactgaacctccaaacccaagcaacgagacactggcccaatggaaaaaggacaacatcacggcccataatatatcctggcggaatctgaccgtctcggagtgtaagaaactgaggggggtgtttctgggcagtgcatgtggccaccacgggccttatattccagatgtcctgttctggtgcgtgattttgtttttcactacattcttcctctcttcctttttaaagcagtttaagaccaagcgctacttcccgaccaaggtgaggagtacgatcagcgacttcgcggtgtttctcaccattgttatcatggtaaccatagactatctagtgggcgttccaagccccaagctgcacgtgcccgaaaaattcgaaccgactcatccagaaagaggatggatcatatcacctttgggcgataatccttggtggacgctgttgatagccgctatccccgccctcctctgcacaatcttgatttttatggaccagcagatcacagcggtgatcattaacagaaaggagcacaaactgaagaagggggctggataccatttggacctgctgatggtcggagtgatgctgggggtgtgtagtgttatgggcctgccatggttcgtggccgcgaccgtgctgagcatttcgcacgttaactccctgaaggtcgaaagcgaatgtagcgcacccggggaacagcctaaattcctgggtattagggaacaacgcgtgactgggttgatgatctttatcctgatgggtcttagcgtgttcatgaccagcgttctgaagtttatacccatgcctgtcctgtacggcgtattcttgtacatgggggtgtccagcctcaagggcatccagttattcgatcgcatcaagctgtttggaatgccagctaagcatcagccggacctgatctatctcagatacgtgcctctttggaaagtccacatcttcactgtgatccagcttacatgcctggtgttgttatgggtcatcaaggtgtcggctgcagctgtggtgtttcctatgatggtgttagccctcgtgttcgtgaggaagctcatggatttatgctttaccaaaagggagctgtcctggcttgatgatctcatgccagagtccaagaaaaagaaagaggacgacaagaagaagaaagaaaaggaggaagccgaacggatgttgcaggacgatgatgacacagtgcatttgcccttcgaaggcggctctcttctgcagattcctgtaaaggccctgaaatacagccctgacaagccggtctccgtgaaaatttcattcgaagatgaaccgcggaagaagtatgtggatgcagaaacctctctgtag

SEQ ID NO: 93099 - DNA, 3273 bp, Artificial Sequence
  derived and/or modified sequence
atggagcggttccgtctggaaaaaaaattgcccggtccggatgaggaagccgtggtggacctggggaagacctcatccaccgtgaatacaaagttcgagaaagaagagctggagtcccaccgcgctgtgtacatcggcgttcacgtccctttcagcaaggaaagtcgcagacgacataggcacagagggcacaaacatcatcacaggagacgcaaggacaaagaatcagacaaggaggacggcagggaaagtccaagttacgacactccatctcagcgcgtgcagttcatcctaggcaccgaggatgatgatgaggagcatatcccccacgacttatttactgaaatggatgagctgtgctatcgtgatggagaagagtacgagtggaaggaaactgctaggtggctgaagttcgaggaggatgtagaggatgggggagaccggtggtctaaaccttacgtggctacactttcgctgcacagcctgttcgagctgaggagctgcattctgaatggcactgtcatgctggacatgagagcttcgacgctggatgaaattgcagacatggtcctggacaacatgattgcctctggacagctcgacgagtctattagggagaatgtgagggaggcccttctgaagcgccatcatcaccaaaatgagaagcgctttacctctcgtattcctctcgtgcggagcttcgcggatatcggtaagaagcatagtgacccacaccttctggaacgaaacggtatcctggcatccccccagagcgcccctggtaacctggacaactcaaaatcaggtgaaatcaaaggtaacggaagcgggggatcgagggaaaattctacggtcgatttctcaaaagtggacatgaattttatgaggaaaattccaactggggcagaggcaagtaacgtgctggtgggagaagtggactttctagagagacctatcatcgccttcgtgcgtctggcgccagccgttctgttgacgggtctgacggaggtccctgtaccaacacgcttcctattcttgctgctgggcccagcagggaaggctccccagtatcatgagatcggcagaagtatcgctacgctcatgaccgatgagatttttcacgatgttgcttacaaagccaaagacaggaatgacctgctgtctggaattgacgaattcctggaccaagtgaccgttcttcccccaggtgagtgggacccaagtatcaggatcgagccacctaagtccgtcccctcacaggagaagcggaaaatcccagtgttccacaatggctcaacgccaacactgggagaaacgcccaaggaagcagcccatcacgccggaccagagctacaacggaccggcaggttgtttggcggactgatcctcgacattaagaggaaggcgcctttctttttgtccgattttaaggatgcgctttccctgcagtgcctcgcatcaattctcttcctgtactgcgcttgtatgagtcccgtcattaccttcggaggactcctgggagaggccactgagggtaggatctctgccatcgaaagcctgtttggagcatcactcacgggcatcgcctattcgttgttcgccggtcagccgctgactattctgggcagtaccgggcctgtgctggtgtttgaaaaaattctgtataagttctgcagagactaccagcttagttaccttagtctgcggacgtcgataggactgtggaccagtttcttgtgcatcgtacttgtggccaccgatgctagcagcctggtttgctatattaccagattcaccgaggaggctttcgctgcactcatctgcattatatttatctatgaagctttggaaaagctctttgatctgggggagacttacgcttttaacatgcacaataatctggacaagctgacctcttattcctgcgtgtgcacagaacccccaaaccctagcaatgaaacactagcgcagtggaagaaagacaacatcacggcacacaacatctcctggcggaacttgacggttagcgaatgtaaaaagctacgcggagtgttcctcggctctgcctgcgggcaccacggcccttacattccagatgtgttgttctggtgcgtcattctgttctttaccaccttctttctgtcctctttcctgaagcagttcaagaccaagagatattttccaacaaaagtgcgctcaaccattagcgatttcgccgtgtttctcacaatcgtgatcatggttaccatcgattacctcgtgggcgttcctagtcccaaattgcacgtccccgagaaatttgaacctactcatcccgaaaggggctggattatctcgcctctgggcgataacccttggtggacactgcttatagctgccatcccagcactactgtgtacaattctgatctttatggaccagcagatcactgctgtgattatcaaccgcaaagagcataagttaaaaaagggagctggctaccacctcgacctcttgatggtgggtgtcatgctgggcgtgtgtagtgtgatggggctgccgtggtttgtggcagctactgtcttgtccatatcacacgtcaactccctcaaggtggaatcagagtgtagcgctccaggcgagcagcctaagttcctcgggattagagagcagcgggtgacaggtcttatgattttcatcctgatgggtctctctgtctttatgacttccgtactaaaatttatccccatgcctgtcctctacggtgtgttcctatacatgggcgtaagtagcctgaagggaatccagctgtttgatagaatcaagctcttcggaatgccagctaaacatcagcccgatctgatatatctgcggtatgtgcctctatggaaggtacatattttcacagtgattcagctaacttgcttggtgcttttatgggtgataaaggtgagcgctgcggcagtggttttccccatgatggtgcttgctctcgtgttcgtgcgaaagttgatggatttgtgcttcaccaagcgggagttgtcttggctggatgatctgatgcccgaatcaaaaaagaagaaggaagacgataagaagaagaaggaaaaggaggaggctgagcgcatgttgcaggacgacgatgacactgtgcacctgccatttgaaggtggaagccttctccagatcccagtaaaggcgttgaagtatagcccggataaaccagtgtctgttaagatctcttttgaagacgagcccagaaaaaagtatgttgacgccgaaaccagcctctag

SEQ ID NO: 93100 - DNA, 7385 bp, Artificial Sequence
  derived and/or modified sequence
ctcactgtccctggaatcttcaagggagttactgcattacatcatcagaaacaaggcatttctatattactatggaaagatttcgtctggagaagaagttacctggtcctgatgaagaagctgttgtggatcttggcaaaactagctcaactgtgaacaccaagtttgaaaaagaagaactagaaagtcatagagctgtatatattggtgttcacgtcccgtttagtaaagagagtcgtcggcgtcataggcatcgcggacacaaacatcaccaccggagaagaaaagataaagaatcagataaagaagatggacgggaatctccttcttatgatacaccatcccagagagttcagtttatccttggtactgaagatgatgatgaagaacatattccccatgatctcttcacggaaatggatgaactgtgttacagagatggagaagaatatgaatggaaagaaactgctagatggctgaaatttgaagaggatgttgaagatggcggtgaccgatggagtaaaccttatgtggcaactctctctttgcacagtctttttgaactaaggagttgcatcctcaatggaacagtcatgctggatatgagagcaagcactctagatgaaatagcagatatggtattagacaacatgatagcttctggccaattagacgagtccatacgagagaatgtcagagaagctcttctgaagagacatcatcatcagaatgagaaaagattcaccagtcggattcctcttgttcgatcttttgcagatataggcaagaaacattctgaccctcacttgcttgaaaggaatggtattttggcctctccccagtctgctcctggaaacttggacaatagtaaaagtggagaaattaaaggtaatggaagtggtggaagcagagaaaatagtactgttgacttcagcaaggttgatatgaatttcatgagaaaaattcctacgggtgctgaggcatccaacgtcctggtgggcgaagtagactttttggaaaggccaataattgcatttgtgagactggctcctgctgtcctccttacagggttgactgaggtccctgttccaaccaggtttttgtttttgttattgggtccagcgggcaaggcaccacagtaccatgaaattggacgatcaatagccactctcatgacagatgagattttccatgatgtagcttataaagcaaaagacagaaatgacctcttatctggaattgatgaatttttagatcaagtaactgtcctacctccaggagagtgggatccttctatacgcatagaaccaccaaaaagtgtcccttctcaggaaaagagaaagattcctgtgtttcacaatggatctacccccacactgggtgagactcctaaagaggccgctcatcatgctgggcctgagctacagaggactggacggctttttggtggtttgatacttgacatcaaaaggaaagcaccttttttcttgagtgacttcaaggatgcattaagcctgcagtgcctggcctcgattcttttcctatactgtgcctgtatgtctcctgtaatcacttttggagggctgcttggagaagctacagaaggcagaataagtgcaatagagtctctttttggagcatcattaactgggattgcctattcattgtttgctgggcaacctctaacaatattggggagcacaggtccagttctagtgtttgaaaaaattttatataaattctgcagagattatcaactttcttatctgtctttaagaaccagtattggtctgtggacttcttttttgtgcattgttttggttgcaacagatgcaagcagccttgtgtgttatattactcgatttacagaagaggcttttgcagcccttatttgcatcatattcatctacgaggctttggagaagctctttgatttaggagaaacatatgcatttaatatgcacaacaacttagataaactgaccagctactcatgtgtatgtactgaacctccaaaccccagcaatgaaactctagcacaatggaagaaagataatataacagcacacaatatttcctggagaaatcttactgtttctgaatgtaaaaaacttcgtggtgtattcttggggtcagcttgtggtcatcatggaccttatattccagatgtgctcttttggtgtgtcatcttgtttttcacaacattttttctgtcttcattcctcaagcaatttaagaccaagcgttactttcctaccaaggtgcgatcgacaatcagtgattttgctgtatttctcacaatagtaataatggttacaattgactaccttgtaggagttccatctcctaaacttcatgttcctgaaaaatttgagcctactcatccagagagagggtggatcataagcccactgggagataatccttggtggaccttattaatagctgctattcctgctttgctttgtaccattctcatctttatggatcaacaaatcacagctgtaattataaacagaaaggaacacaaattgaagaaaggagctggctatcaccttgatttgctcatggttggcgttatgttgggagtttgctctgtcatgggacttccatggtttgtggctgcaacagtgttgtcaataagtcatgtcaacagcttaaaagttgaatctgaatgttctgctccaggggaacaacccaagtttttgggaattcgtgaacagcgggttacagggctaatgatttttattctaatgggcctctctgtgttcatgacttcagtcctaaagtttattccaatgcctgttctgtatggtgttttcctttatatgggagtttcctcattaaaaggaatccagttatttgaccgtataaaattatttggaatgcctgctaagcatcagcctgatttgatatacctccgttatgtgccgctctggaaggtccatattttcacagtcattcagcttacttgtttggtccttttatgggtgataaaagtttcagctgctgcagtggtttttcccatgatggttcttgcattagtgtttgtgcgcaaactcatggacctgtgtttcacgaagagagaacttagttggcttgatgatcttatgccagaaagtaagaaaaagaaagaagatgacaaaaagaaaaaagagaaagaggaagctgaacggatgcttcaagatgatgatgatactgtgcaccttccatttgaagggggaagtctcttgcaaattccagtcaaggccctaaaatatagtcctgataaacctgtgagtgtgaaaataagttttgaagatgaaccaagaaagaaatacgtggatgctgaaacttcattatagaattgaaccaagaggcattatacatatagatatatacatatgtaatgtgtgcgtatcatgtcactatatataagaatattgtatgtcatgctgtttatgtgtgactaccgggtttttaaaagtagtgtctggagtttgtaatgagcaccgtggagactatgtatttaatgaaatgctctctttgaagtgaggtacatggttcttaactattcaaatatttattctgttagaaaaaaaaattttctgttttgcaatagaaggatgtggagaaatgctttcagtctacttttcttaaatctctgttcatcagtggcaattcgtaaaaaccttaagtgatactttgtttatatgtttataatttttaggtgtttcctgaaattttcacatattatttcacttttgttagtgctttatgggaagaatagggagtctataccagtgctgtgggaaaaatggtaacatttcagggcttctctatttgtgtttcatttctgtagatgtccatcgtgtttcactaactggcgttttcttagccatagagatgactgtagaacaatagaaactttaataatgatagtttttaacttttatgtttaaattttttttaaatcttaaaaccttcatatctaggtatccattgtgacagacaagtaaaattgcaggtgatttgataattaagcacccataccatttataacttctgaatttaaaaagttatacaatgccagtttgcaatagttgattttgatgcctttgtagaatattttttctgaatccttatgctcttttaaagccaatgattcccactctgttctctgccttgtctctctttgtcttaaaatgctttagtttccatcaggttcaagttcttgactattattctcttataagtagtaggcgtaaataatcaggagttagaattctctcagaagggtctatgatcagtattactttattaagaattacctttcattttctctttatgttattctttcacttttgtagattacatttaatagcttgttacctgtgattttattttaaaatatttattttgatatgatgcttaaatattatataaacatttggaaaagtaacaaatagagtaaattgttaatgtaaatagttggtgcttactttcatttatgtttattatcttaaagcaattgatagattttacatctttgatataaagcactgccatatttatattttaaaaggaaattagacattttatatgtagctcagattaatgacatttttattttgtgtattagtttttgcttttctgagctttttaaagtctaacaaatctttttagtcatcttttatatacttttagttccacatgaaataaatgttgttaagcctgtaggactggatgaatggggttgtgaaactgatttgacaagagaataatttacaaaaatcaaatgagtattgagaagccacagaaatatcaaaaatggtgacatcactattaggatgaaaattttatgaaattccaatgctccctttaaccatataattaaattacaaaggtatacataattaatctaataaaggatcatgaggaatgccaaaagctgaaattttagcaagtctggtgttttaaattcattataaactatttattaactaatgtaatgtcctcctctaagaccatattgtaagagtcttgttaaaatgatggattcaacttctgcctcggatgagaggttggaaatgtagctgcttttctttagaaaatatgtagctgtcatcatttggtactgcctaaaaagagttagactctattggcaattgatagagtattacccacggtgcttattattgtttatgagcttccattgtaatgattcctttttatttgtagcagcataattatttccaaagaccccagtatttgctgctatttttaaaactcccctgatgtacctgaacaagaggatttcctcacatcatttccttgtgtctggacatcaggggtaacaactgtacttactttacaggaagaaattttaaaactgaaaactacctgggatcatagtgtttctgtgattttatttaattgtgtatagtaattatccagtgccagaaaaaccgtcacttgcaaaatactttgcactcaaaatgtttttacaatgcttctaaatgttactggtttctgctttcttttgactacttgactgacaaaatgatctgactactccatttaagagcaaaggtaactcatgtttaggtaattaactgcttgttttaagtgattatatttcttccactgtttttgaaaaataatcaaagatagcattcattgagagacagtgacagatataatttactacatatattgatttttaaataaagttgccttaaataagtgtatgtaagcagtagtagttgctatgtactgatttacctcaaggtgcaaaataattaaacctgtacatattccatttacaaaataaattcagccctgcactttctttagatgccttgatttccagaatggagcttagtgctactgaataccctggccacagagccacctcaggatattcttttctccaccctagtttatttatttatagatatctgtttacaaagtctgtagtaaatcctgatgctgaccatctgaaatgtactttttttctgaatgctgtttcaatctaaaatagcagcttttgagaaaacaatgatgtaaattccttatgataaaaggatgattctatatattctttaatgatattaaatatgccgaagccaagcacacagtctttctaaagtgtgtgtatgtttgtgtgaatgtgaatgatactgatcttatatctgttaaaagttgttttaaaaagctgtggcatcccattgttcatatttgccaagtcttctgtaaagatgtctaggacgaaatattttatgtgctaatgcatgtatttgtaaaccagatttgtttaccactcaaaattaacttgttttcttcatccaaaaaagtttatttcttccacgtacttaaattttctgtgtgggtataatatagctttctaatttttttctttcacaaaggcaggttcaaaattctgttgaaagaaaaatgctttctgaaactgaggtataacaccagagcttgctgtttaaaggattatatgatgtacatcagttctataaatgtgctcagcagtttaacatgtgaatcctgttttaaagtgctcagatttcaactgtgtaagccattgatataacgctgtaattaaaaatgtttatatgaaataacttaatgttttaaatttatttatgtagatcacatcatttttatcgtatgcagtgcaaatatgtgaaatgtcttttggtttattccaacaattatttattttagaaagtaagtttaaagactttaaggacattcaaagtttaaaatagtgttcaaattgcaaaatttggcaatcttcatataaattggtttcttttctaacttttcaaaaactaacattaaatgtcaattataggaaaacatagttggaaatgtaatcatccaaagatcatttttaaaatgaaatttaattagcacatattgaacatttgacttaattgttaaaccccagttttgttttgtttttttaatcagatttttgcacactgattagtttttgtgttgtggcttttgttgctttattattcaaggttttttttttttttcttccccatgggggagattgtcttccaatgtttaactacgtttaaataaataaaaattgaattttattgttcatttatataaaatctgataccttgatgtaatttcacaatacagttccaatttttatggcttttataattacaatgatattttcttctataataaaatccaaagtaaacatttaaattgtagaactgatatttttcatttatatgaagtataagcctctactgggtctatattgtgaatcatcctgcctttcaaatttgtttcataattgttagatgaaaactatttttttggagatgttactgaagttgattgagcaataaaagtctacttaatta

SEQ ID NO: 93101 - DNA, 3407 bp, Artificial Sequence
  derived and/or modified sequence
gctctcctccttcccgctcggtccgccggttcgctcagttctagcttcaggttccacgccgcggcctcgctctcctactaaagccagcccagcagtcgcagcgcgcacacgcacgccccgcgtctcccgcgcccggcgcccggctctccccacgcgcgcacacctcgcgcacggacgcacccacgtttgtcctcgcgcgccgggggctcggcggcggcggcaggggcagcggcagaagcaggcagaccgcgcggggcagtaccgtagcggccgtcacgggctggccggccggccatggaggctgatggggccggcgagcagatgagaccgctactcacccggggtcctgatgaagaagctgttgtggatcttggcaaaactagctcaactgtgaacaccaagtttgaaaaagaagaactagaaagtcatagagctgtatatattggtgttcacgtcccgtttagtaaagagagtcgtcggcgtcataggcatcgcggacacaaacatcaccaccggagaagaaaagataaagaatcagataaagaagatggacgggaatctccttcttatgatacaccatcccagagagttcagtttatccttggtactgaagatgatgatgaagaacatattccccatgatctcttcacggaaatggatgaactgtgttacagagatggagaagaatatgaatggaaagaaactgctagatggctgaaatttgaagaggatgttgaagatggcggtgaccgatggagtaaaccttatgtggcaactctctctttgcacagtctttttgaactaaggagttgcatcctcaatggaacagtcatgctggatatgagagcaagcactctagatgaaatagcagatatggtattagacaacatgatagcttctggccaattagacgagtccatacgagagaatgtcagagaagctcttctgaagagacatcatcatcagaatgagaaaagattcaccagtcggattcctcttgttcgatcttttgcagatataggcaagaaacattctgaccctcacttgcttgaaaggaatggtattttggcctctccccagtctgctcctggaaacttggacaatagtaaaagtggagaaattaaaggtaatggaagtggtggaagcagagaaaatagtactgttgacttcagcaaggttgatatgaatttcatgagaaaaattcctacgggtgctgaggcatccaacgtcctggtgggcgaagtagactttttggaaaggccaataattgcatttgtgagactggctcctgctgtcctccttacagggttgactgaggtccctgttccaaccaggtttttgtttttgttattgggtccagcgggcaaggcaccacagtaccatgaaattggacgatcaatagccactctcatgacagatgagattttccatgatgtagcttataaagcaaaagacagaaatgacctcttatctggaattgatgaatttttagatcaagtaactgtcctacctccaggagagtgggatccttctatacgcatagaaccaccaaaaagtgtcccttctcaggaaaagagaaagattcctgtgtttcacaatggatctacccccacactgggtgagactcctaaagaggccgctcatcatgctgggcctgagctacagaggactggacgagtgcaatagagtctctttttggagcatcattaactgggattgcctattcattgtttgctgggcaacctctaacaatattggggagcacaggtccagttctagtgtttgaaaaaattttatataaattctgcagagattatcaactttcttatctgtctttaagaaccagtattggtctgtggacttcttttttgtgcattgttttggttgcaacagatgcaagcagccttgtgtgttatattactcgatttacagaagaggcttttgcagcccttatttgcatcatattcatctacgaggctttggagaagctctttgatttaggagaaacatatgcatttaatatgcacaacaacttagataaactgaccagctactcatgtgtatgtactgaacctccaaaccccagcaatgaaactctagcacaatggaagaaagataatataacagcacacaatatttcctggagaaatcttactgtttctgaatgtaaaaaacttcgtggtgtattcttggggtcagcttgtggtcatcatggaccttatattccagatgtgctcttttggtgtgtcatcttgtttttcacaacattttttctgtcttcattcctcaagcaatttaagaccaagcgttactttcctaccaaggtgcgatcgacaatcagtgattttgctgtatttctcacaatagtaataatggttacaattgactaccttgtaggagttccatctcctaaacttcatgttcctgaaaaatttgagcctactcatccagagagagggtggatcataagcccactgggagataatccttggtggaccttattaatagctgctattcctgctttgctttgtaccattctcatctttatggatcaacaaatcacagctgtaattataaacagaaaggaacacaaattgaagaaaggagctggctatcaccttgatttgctcatggttggcgttatgttgggagtttgctctgtcatgggacttccatggtttgtggctgcaacagtgttgtcaataagtcatgtcaacagcttaaaagttgaatctgaatgttctgctccaggggaacaacccaagtttttgggaattcgtgaacagcgggttacagggctaatgatttttattctaatgggcctctctgtgttcatgacttcagtcctaaagtttattccaatgcctgttctgtatggtgttttcctttatatgggagtttcctcattaaaaggaatccagttatttgaccgtataaaattatttggaatgcctgctaagcatcagcctgatttgatatacctccgttatgtgccgctctggaaggtccatattttcacagtcattcagcttacttgtttggtccttttatgggtgataaaagtttcagctgctgcagtggtttttcccatgatggttcttgcattagtgtttgtgcgcaaactcatggacctgtgtttcacgaagagagaacttagttggcttgatgatcttatgccagaaagtaagaaaaagaaagaagatgacaaaaagaaaaaagagaaagaggaagctgaacggatgcttcaagatgatgatgatactgtgcaccttccatttgaagggggaagtctcttgcaaattccagtcaaggccctaaaatatagtcctgataaacctgtgagtgtgaaaataagttttgaagatgaaccaagaaagaaatacgtggatgctgaaacttcattatag

SEQ ID NO: 93102 - DNA, 3825 bp, Artificial Sequence
  derived and/or modified sequence
cctactaaagccagcccagcagtcgcagcgcgcacacgcacgccccgcgtctcccgcgcccggcgcccggctctccccacgcgcgcacacctcgcgcacggacgcacccacgtttgtcctcgcgcgccgggggctcggcggcggcggcaggggcagcggcagaagcaggcagaccgcgcggggcagtaccgtagcggccgtcacgggctggccggccggccatggaggctgatggggccggcgagcagatgagaccgctactcacccggggtcctgatgaagaagctgttgtggatcttggcaaaactagctcaactgtgaacaccaagtttgaaaaagaagaactagaaagtcatagagctgtatatattggtgttcacgtcccgtttagtaaagagagtcgtcggcgtcataggcatcgcggacacaaacatcaccaccggagaagaaaagataaagaatcagataaagaagatggacgggaatctccttcttatgatacaccatcccagagagttcagtttatccttggtactgaagatgatgatgaagaacatattccccatgatctcttcacggaaatggatgaactgtgttacagagatggagaagaatatgaatggaaagaaactgctagatggctgaaatttgaagaggatgttgaagatggcggtgaccgatggagtaaaccttatgtggcaactctctctttgcacagtctttttgaactaaggagttgcatcctcaatggaacagtcatgctggatatgagagcaagcactctagatgaaatagcagatatggtattagacaacatgatagcttctggccaattagacgagtccatacgagagaatgtcagagaagctcttctgaagagacatcatcatcagaatgagaaaagattcaccagtcggattcctcttgttcgatcttttgcagatataggggaaggcctttcagcctcccgccactctttgcgaacaggtctgtctgcctcaaacctttccttgagaggagaatcacctttatctcttcttcttggtcatcttcttccttcttcaagagctggaacccctgcaggctcaaggtgtacaaccccagtacccacccctcaaaacagtcctccttctagccctagcatcagccgcctgacctccagaagttcccaagagagtcagcgtcaggccccagaactactggtttcacctgccagtgatgatattcccacagtagtaattcatccgcctgaggaagacttagaagcagcgctgaaaggcgaggagcagaagaatgaggaaaatgttgacttaactccaggtattttggcctctccccagtctgctcctggaaacttggacaatagtaaaagtggagaaattaaaggtaatggaagtggtggaagcagagaaaatagtactgttgacttcagcaaggttgatatgaatttcatgagaaaaattcctacgggtgctgaggcatccaacgtcctggtgggcgaagtagactttttggaaaggccaataattgcatttgtgagactggctcctgctgtcctccttacagggttgactgaggtccctgttccaaccaggtttttgtttttgttattgggtccagcgggcaaggcaccacagtaccatgaaattggacgatcaatagccactctcatgacagatgagattttccatgatgtagcttataaagcaaaagacagaaatgacctcttatctggaattgatgaatttttagatcaagtaactgtcctacctccaggagagtgggatccttctatacgcatagaaccaccaaaaagtgtcccttctcaggaaaagagaaagattcctgtgtttcacaatggatctacccccacactgggtgagactcctaaagaggccgctcatcatgctgggcctgagctacagaggactggacgagtgcaatagagtctctttttggagcatcattaactgggattgcctattcattgtttgctgggcaacctctaacaatattggggagcacaggtccagttctagtgtttgaaaaaattttatataaattctgcagagattatcaactttcttatctgtctttaagaaccagtattggtctgtggacttcttttttgtgcattgttttggttgcaacagatgcaagcagccttgtgtgttatattactcgatttacagaagaggcttttgcagcccttatttgcatcatattcatctacgaggctttggagaagctctttgatttaggagaaacatatgcatttaatatgcacaacaacttagataaactgaccagctactcatgtgtatgtactgaacctccaaaccccagcaatgaaactctagcacaatggaagaaagataatataacagcacacaatatttcctggagaaatcttactgtttctgaatgtaaaaaacttcgtggtgtattcttggggtcagcttgtggtcatcatggaccttatattccagatgtgctcttttggtgtgtcatcttgtttttcacaacattttttctgtcttcattcctcaagcaatttaagaccaagcgttactttcctaccaaggtgcgatcgacaatcagtgattttgctgtatttctcacaatagtaataatggttacaattgactaccttgtaggagttccatctcctaaacttcatgttcctgaaaaatttgagcctactcatccagagagagggtggatcataagcccactgggagataatccttggtggaccttattaatagctgctattcctgctttgctttgtaccattctcatctttatggatcaacaaatcacagctgtaattataaacagaaaggaacacaaattgaagaaaggagctggctatcaccttgatttgctcatggttggcgttatgttgggagtttgctctgtcatgggacttccatggtttgtggctgcaacagtgttgtcaataagtcatgtcaacagcttaaaagttgaatctgaatgttctgctccaggggaacaacccaagtttttgggaattcgtgaacagcgggttacagggctaatgatttttattctaatgggcctctctgtgttcatgacttcagtcctaaagtttattccaatgcctgttctgtatggtgttttcctttatatgggagtttcctcattaaaaggaatccagttatttgaccgtataaaattatttggaatgcctgctaagcatcagcctgatttgatatacctccgttatgtgccgctctggaaggtccatattttcacagtcattcagcttacttgtttggtccttttatgggtgataaaagtttcagctgctgcagtggtttttcccatgatggttcttgcattagtgtttgtgcgcaaactcatggacctgtgtttcacgaagagagaacttagttggcttgatgatcttatgccagaaagtaagaaaaagaaagaagatgacaaaaagaaaaaagagaaagaggaagctgaacggatgcttcaagatgatgatgatactgtgcaccttccatttgaagggggaagtctcttgcaaattccagtcaaggccctaaaatatagtcctgataaacctgtgagtgtgaaaataagttttgaagatgaaccaagaaagaaatacgtggatgctgaaacttcattatagaattgaaccaagaggcattatacatatagatatatacatatgtaatgtgtgcgtatcatgtcactatatataagaatattgtatgtcatgctgtttatgtgtgactaccgggtttttaaaagtagtgtctggagtttgtaatgagcaccgtggagact

SEQ ID NO: 93103 - DNA, 495 bp, Artificial Sequence
  derived and/or modified sequence
atggctgcgttgtcgggagtccgctggttgacccgggctctggtttccgcggggaaccctggggcttggagaggacttagcactagtgcggcggcccatgccgcttcccgttcacaagctgaggacgtccgggtcgagggatcattcccagtgaccatgctgcctggcgacggtgtcggccccgagctgatgcacgccgtgaaagaagtctttaaagcagccgccgtccccgtcgagtttcaggagcaccatctttcggaagtccagaacatggcttcagaagaaaagttagaacaagtccttagctctatgaaagaaaataaggtggccataatcggcaaaatccacaccccgatggagtacaagggcgagctcgcatcttacgatatgagacttaggcgcaagttagatctcttcgcaaatgttgtccacgtaaagagtctccccggatatgatagcgcccagcagagtcggcctggagatcatagtaggtag

SEQ ID NO: 93104 - DNA, 501 bp, Artificial Sequence
  derived and/or modified sequence
gcgggaaacatggcggcattgagcggagtccgctggctgacccgagcgctggtctccgccgggaaccctggggcatggagaggtctgagtacctcggccgcggcgcacgctgcatcgcggagccaggccgaggacgtgagggtggagggctcctttcccgtgaccatgcttccgggagacggtgtggggcctgagctgatgcacgccgtcaaggaggtgttcaaggctgccgctgtcccagtggagttccaggagcaccacctgagtgaggtgcagaatatggcatctgaggagaagctggagcaggtgctgagttccatgaaggagaacaaagtggccatcattggaaagattcataccccgatggagtataagggggagctagcctcctatgatatgcggctgaggcgtaagttggacttatttgccaacgtagtccatgtgaagtcacttcctgggtatgactcggcacaacaatctagacctggtgatcattcgaga

SEQ ID NO: 93105 - DNA, 495 bp, Artificial Sequence
  derived and/or modified sequence
atggccgccctgtctggagtgcgctggctgacccgggccctggtgtctgctggcaaccctggggcctggaggggcctgagcaccagcgctgctgcccacgccgccagccgcagccaggctgaagatgtgcgggtggagggcagcttccctgtgaccatgctgcctggagatggagtgggccctgagctgatgcatgctgtgaaggaggtgttcaaggctgctgctgtgcctgtggagttccaggagcaccacctgtctgaggtgcagaacatggccagcgaggagaagctggagcaggtgctgagctccatgaaggagaacaaggtggccatcatcggcaagatccacacccccatggagtacaagggggagctggccagctatgacatgaggctgcggaggaagctggacctgtttgccaacgtggtgcacgtgaagagcctgcccggctatgattctgcccagcagagcaggcctggggaccacagcaggtag

SEQ ID NO: 93106 - DNA, 495 bp, Artificial Sequence
  derived and/or modified sequence
atggccgccctgagcggcgtgcggtggctgacccgggccctggtgtcagcaggtaatccaggtgcgtggcgaggcctgagtacgtcggcagcagctcacgccgcgagccggagccaggccgaggatgtgcgtgtagagggcagcttccccgtgaccatgctgcctggcgacggagttgggccagaactgatgcatgctgtcaaagaagtgtttaaggccgctgcagttccagtggagtttcaggaacaccacctatctgaagtgcagaacatggcctctgaagaaaagctggaacaggtcctctcatctatgaaagaaaataaagtggctattatcgggaagattcatacgccgatggagtacaaaggcgaattagcttcctacgacatgcggttgaggcgaaaactggatctgttcgctaacgtggtccacgtgaagtcactgcccgggtatgattccgcccaacagagcagacctggcgatcatagcagatag

SEQ ID NO: 93107 - DNA, 495 bp, Artificial Sequence
  derived and/or modified sequence
atggctgccctttccggagtccggtggctcacgagggctctggtgtcagccggtaacccaggcgcttggagaggcctctccactagcgccgctgctcacgctgcgagtcgctctcaggcggaggatgtgcgagtcgaaggatcgttccccgtgaccatgctccccggagacggtgtgggacccgagctcatgcatgctgtgaaggaggtgttcaaagcagctgcagtccctgttgagttccaagagcatcacctcagcgaagtccagaacatggcctctgaggaaaaactggagcaggtcctctcttcaatgaaggaaaataaggtggctattattggcaaaattcacacaccgatggagtataagggagaactggcctcatacgacatgaggctcagaaggaaacttgacctgtttgcaaatgtagttcacgttaaatcactcccgggatatgacagtgctcaacagagtcgccctggtgaccacagtaggtag

SEQ ID NO: 93108 - DNA, 495 bp, Artificial Sequence
  derived and/or modified sequence
atggccgccctgagcggcgtgagatggctgaccagagccctggtgagcgccggcaaccccggcgcctggagaggcctgagcaccagcgccgccgcccacgccgccagcagaagccaggccgaggacgtgagagtggagggcagcttccccgtgaccatgctgcccggcgacggcgtgggccccgagctgatgcacgccgtgaaggaggtgttcaaggccgccgccgtgcccgtggagttccaggagcaccacctgagcgaggtgcagaacatggccagcgaggagaagctggagcaggtgctgagcagcatgaaggagaacaaggtggccatcatcggcaagatccacacccccatggagtacaagggcgagctggccagctacgacatgagactgagaagaaagctggacctgttcgccaacgtggtgcacgtgaagagcctgcccggctacgacagcgcccagcagagcagacccggcgaccacagcagatag

SEQ ID NO: 93109 - protein, 382 aa, Artificial Sequence
  derived and/or modified sequence
MRPGTALQAVLLAVLLVGLRAATGRLLSASDLDLRGGQPVCRGGTQRPCYKVIYFHDTSRRLNFEEAKEACRRDGGQLVSIESEDEQKLIEKFIENLLPSDGDFWIGLRRREEKQSNSTACQDLYAWTDGSISQFRNWYVDEPSCGSEVCVVMYHQPSAPAGIGGPYMFQWNDDRCNMKNNFICKYSDEKPAVPSREAEGEETELTTPVLPEETQEEDAKKTFKESREAALNLAYILIPSIPLLLLLVVTTVVCWVWICRKRKREQPDPSTKKQHTIWPSPHQGNSPDLEVYNVIRKQSEADLAETRPDLKNISFRVCSGEATPDDMSCDYDNMAVNPSESGFVTLVSVESGFVTNDIYEFSPDQMGRSKESGWVENEIYGY

SEQ ID NO: 93110 - DNA, 1149 bp, Artificial Sequence
  derived and/or modified sequence
atgagacccggcaccgccctgcaggccgtgctgctggccgtgctgctggtgggcctgagagccgccaccggcagactgctgagcgccagcgacctggacctgagaggcggccagcccgtgtgcagaggcggcacccagagaccctgctacaaggtgatctacttccacgacaccagcagaagactgaacttcgaggaggccaaggaggcctgcagaagagacggcggccagctggtgagcatcgagagcgaggacgagcagaagctgatcgagaagttcatcgagaacctgctgcccagcgacggcgacttctggatcggcctgagaagaagagaggagaagcagagcaacagcaccgcctgccaggacctgtacgcctggaccgacggcagcatcagccagttcagaaactggtacgtggacgagcccagctgcggcagcgaggtgtgcgtggtgatgtaccaccagcccagcgcccccgccggcatcggcggcccctacatgttccagtggaacgacgacagatgcaacatgaagaacaacttcatctgcaagtacagcgacgagaagcccgccgtgcccagcagagaggccgagggcgaggagaccgagctgaccacccccgtgctgcccgaggagacccaggaggaggacgccaagaagaccttcaaggagagcagagaggccgccctgaacctggcctacatcctgatccccagcatccccctgctgctgctgctggtggtgaccaccgtggtgtgctgggtgtggatctgcagaaagagaaagagagagcagcccgaccccagcaccaagaagcagcacaccatctggcccagcccccaccagggcaacagccccgacctggaggtgtacaacgtgatcagaaagcagagcgaggccgacctggccgagaccagacccgacctgaagaacatcagcttcagagtgtgcagcggcgaggccacccccgacgacatgagctgcgactacgacaacatggccgtgaaccccagcgagagcggcttcgtgaccctggtgagcgtggagagcggcttcgtgaccaacgacatctacgagttcagccccgaccagatgggcagaagcaaggagagcggctgggtggagaacgagatctacggctactag

SEQ ID NO: 93111 - DNA, 1149 bp, Artificial Sequence
  derived and/or modified sequence
atgcgacccgggaccgccctgcaggctgtgctattggcggtgctgcttgtgggcctgcgcgccgctacaggccgattgctcagtgcatctgatctggatctcagaggagggcaacctgtgtgccgaggaggcactcagcgcccatgttacaaggtgatatattttcacgacacatctaggcgactcaattttgaagaagcgaaagaagcgtgcaggcgcgatgggggccagctcgtgtcaattgaatcagaggatgagcaaaaactgatcgagaagttcatcgaaaacctgctgccaagtgatggagacttctggatcggcctgcgacggagggaggagaaacaatcaaactcaacagcctgccaggacctgtacgcatggaccgacggctccatcagccaatttcggaattggtacgtcgatgaaccatcctgcggaagtgaggtgtgcgtcgttatgtatcaccaacctagcgctccagctgggatcggcggcccctacatgtttcagtggaacgatgaccgatgtaacatgaagaacaattttatctgtaagtactccgacgagaagccagcagttcctagtcgcgaagcagagggagaggagactgagctgacaacacccgtgctacccgaagagacccaggaggaggacgccaagaaaacctttaaagaaagccgagaggcagccctgaacttagcttatattctgattccttccattccactgctgcttctgctggttgttactactgtggtgtgttgggtgtggatctgcagaaagagaaaaagggaacagccagacccatctacaaaaaagcagcacactatctggccgagcccgcatcagggcaatagcccggatcttgaggtgtataacgtgatacggaaacagagcgaagccgatctggcagagacccggccagatttaaagaacattagctttcgagtctgctccggggaagccacgcccgacgatatgtcttgcgactacgacaatatggccgtaaacccttccgagtctggatttgtgactttggtgagtgtagaatctggcttcgttacgaatgacatctacgagttcagtccagaccagatgggtcggtctaaggaaagcgggtgggtcgagaatgagatctatgggtactag

SEQ ID NO: 93112 - DNA, 1836 bp, Artificial Sequence
  derived and/or modified sequence
agtgacgtcccagggggcggaggggcgaccgactgactccgcgccctcccccccgcctcccgtgcggtccgtcggtggcctagagatgctgctgccgcggttgcagttgtcgcgcacgcctctgcccgccagcccgctccaccgccgtagcgcccgagtgtcggggggcgcacccgagtcgggccatgaggccgggaaccgcgctacaggccgtgctgctggccgtgctgctggtggggctgcgggccgcgacgggtcgcctgctgagtgcctcggatttggacctcagaggagggcagccagtctgccggggagggacacagaggccttgttataaagtcatttacttccatgatacttctcgaagactgaactttgaggaagccaaagaagcctgcaggagggatggaggccagctagtcagcatcgagtctgaagatgaacagaaactgatagaaaagttcattgaaaacctcttgccatctgatggtgacttctggattgggctcaggaggcgtgaggagaaacaaagcaatagcacagcctgccaggacctttatgcttggactgatggcagcatatcacaatttaggaactggtatgtggatgagccatcctgcggcagcgaggtctgcgtggtcatgtaccatcagccatcggcacccgctggcatcggaggcccctacatgttccagtggaatgatgaccggtgcaacatgaagaacaatttcatttgcaaatattctgatgagaaaccagcagttccttctagagaagctgaaggtgaggaaacagagctgacaacacctgtacttccagaagaaacacaggaagaagatgccaaaaaaacatttaaagaaagtagagaagctgccttgaatctggcctacatcctaatccccagcattccccttctcctcctccttgtggtcaccacagttgtatgttgggtttggatctgtagaaaaagaaaacgggagcagccagaccctagcacaaagaagcaacacaccatctggccctctcctcaccagggaaacagcccggacctagaggtctacaatgtcataagaaaacaaagcgaagctgacttagctgagacccggccagacctgaagaatatttcattccgagtgtgttcgggagaagccactcccgatgacatgtcttgtgactatgacaacatggctgtgaacccatcagaaagtgggtttgtgactctggtgagcgtggagagtggatttgtgaccaatgacatttatgagttctccccagaccaaatggggaggagtaaggagtctggatgggtggaaaatgaaatatatggttattaggacatataaaaaactgaaactgacaacaatggaaaagaaatgataagcaaaatcctcttattttctataaggaaaatacacagaaggtctatgaacaagcttagatcaggtcctgtggatgagcatgtggtccccacgacctcctgttggacccccacgttttggctgtatcctttatcccagccagtcatccagctcgaccttatgagaaggtaccttgcccaggtctggcacatagtagagtctcaataaatgtcacttggttggttgtatctaacttttaagggacagagctttacctggcagtgataaagatgggctgtggagcttggaaaaccacctctgttttccttgctctatacagcagcacatattatcatacagacagaaaatccagaatcttttcaaagcccacatatggtagcacaggctggcctgtgcatcggcaattctcatatctgtttttttcaaagaataataaaatcaaataaagagcaggaaa

SEQ ID NO: 93113 - DNA, 1149 bp, Artificial Sequence
  derived and/or modified sequence
atgaggcctggaacagccctgcaggccgtgctgctggccgtgctgctggtgggcctgcgggccgccaccggccgcctgctgagcgccagtgacctggacctgcggggcggccagcctgtgtgccggggcggcacccagaggccctgctacaaggtgatctacttccatgacaccagccggcggctgaactttgaggaggccaaggaggcctgcagaagagatggcggccagctggtgtccattgaaagtgaagatgagcagaagctgattgagaagttcatcgagaacctgctgcccagtgatggagacttctggattggcctgcggcggcgggaggagaagcagagcaacagcacagcctgccaggacctgtatgcctggacagatggcagcatcagccagttcaggaactggtacgtggatgagcccagctgtggcagcgaggtgtgtgtggtgatgtaccaccagcccagcgccccagctggcattggaggcccctacatgttccagtggaatgatgaccgctgcaacatgaagaacaacttcatctgcaagtacagtgatgagaagccagctgtgcccagccgggaggccgagggggaggagacagagctgaccacccctgtgctgcctgaggagacccaggaggaggatgccaagaagaccttcaaggagagccgggaggccgccctgaacctggcctacatcctgatccccagcatccccctgctgctgctgctggtggtgaccaccgtggtgtgctgggtgtggatctgcaggaagaggaagcgggagcagcctgaccccagcaccaagaagcagcacaccatctggcccagcccccaccagggcaacagcccagacctggaggtgtacaacgtcatcaggaagcagagcgaggccgacctggccgagaccaggccagacctgaagaacatctccttccgggtgtgcagcggggaggccaccccagatgacatgagctgtgactatgacaacatggctgtgaaccccagcgagagcggctttgtgaccctggtgtctgtggagagcggctttgtgaccaatgacatctatgagttctccccagaccagatgggccgcagcaaggagagcggctgggtggagaatgagatctacggctactag

SEQ ID NO: 93114 - DNA, 1149 bp, Artificial Sequence
  derived and/or modified sequence
atgcggcccggcaccgccctgcaggccgtgctgctggccgtgctgttggtaggcctccgagccgccacaggtagacttctgtcagcctccgacttagacctgaggggaggccagccagtgtgtcgaggtggaactcagcgaccttgctacaaggtcatctattttcacgacacatcccgccgcctgaattttgaagaggccaaagaagcatgcaggcgggacggggggcagttagtctccatcgagagtgaggacgaacaaaagctgatcgaaaaattcattgagaatctcctcccatcagacggtgatttttggattggactgcggagacgggaggaaaaacagagcaatagcacggcctgccaggacctatacgcttggaccgacggtagtattagccaattccgcaactggtacgtggatgagccatcctgtggcagcgaagtatgtgtggtcatgtatcatcagccatccgctccagccggaattggcggaccttacatgttccaatggaacgacgatagatgtaacatgaaaaacaatttcatttgcaaatattctgatgagaagcccgctgtgccctctcgagaggctgagggggaagagactgagctcacgacccctgtactgcccgaagagacgcaggaggaagacgctaagaaaacctttaaggagtcccgcgaagcagctctgaatctcgcttatatactgataccttccatacctttactgctgcttctcgtggtcacaacagtcgtatgttgggtgtggatctgtaggaagagaaaaagggaacagcccgatccttcgactaaaaagcagcacaccatctggccatctccgcatcaagggaatagcccagatctggaggtgtataatgtgatacgcaaacaatccgaagctgatctggccgagacccgccctgaccttaagaacatctctttcagagtatgctctggggaggccacccctgatgacatgagctgtgattacgataacatggccgtgaatccctctgaatcgggcttcgtcaccctggtttcagtggagtctggcttcgtgacaaatgatatctacgagttttctcccgatcagatgggtagaagcaaagagtccggttgggtagaaaatgaaatatacgggtattag

SEQ ID NO: 93115 - DNA, 1149 bp, Artificial Sequence
  derived and/or modified sequence
atgcgacccggaacagctctgcaagccgttctgctcgcagtgcttctggtggggctccgggctgcgacaggacgcctgctgagcgcatcagatcttgacctgagaggaggccaacctgtctgtagaggcggtacccaaaggccctgctacaaagtcatctacttccatgatacctcaaggaggctcaacttcgaagaagctaaggaggcctgtcgtcgggacggcggacagcttgtctctattgaaagtgaggatgaacaaaaactcattgagaaatttattgagaacctcctgcccagcgatggtgacttctggataggcctgcgccgaagggaggagaagcagagtaacagtaccgcctgtcaagacttatatgcttggacggacggttccattagtcaatttcggaattggtacgtggacgaaccttcatgtggaagtgaagtctgtgttgtcatgtatcatcaaccctccgctcccgcaggtattggtggcccttatatgttccagtggaacgacgatcggtgcaatatgaagaataacttcatatgcaagtacagcgatgaaaaaccagcagttcccagtcgtgaagcagaaggtgaagagacagagctgaccactcccgtgctccctgaggaaacccaggaggaggacgccaagaagacctttaaagaatctagggaggctgctctcaacctggcgtacatactcataccatccatacccctcctgctgcttctggtggtgaccaccgttgtgtgctgggtgtggatatgcagaaagagaaaaagggaacagcccgatccatcaactaagaagcagcacactatctggccctcccctcaccagggaaactcacccgatctcgaggtgtacaacgttattcgaaagcagagtgaagccgatctagccgaaacaaggcccgacctcaaaaacatttcctttagggtttgttccggggaagctactccagatgacatgagttgtgattacgataacatggcggtgaacccctccgagagcgggttcgtgaccttggttagtgtggaaagcggattcgtgaccaacgacatctatgagttctctcccgatcaaatgggcaggtctaaggagagcggctgggtcgaaaatgaaatttacggctactag

SEQ ID NO: 93116 - protein, 229 aa, Artificial Sequence
  derived and/or modified sequence
MVTSGLGSGGVRRNKAIAQPARTFMLGLMAAYHNLEKPAVPSREAEGEETELTTPVLPEETQEEDAKKTFKESREAALNLAYILIPSIPLLLLLVVTTVVCWVWICRKRKREQPDPSTKKQHTIWPSPHQGNSPDLEVYNVIRKQSEADLAETRPDLKNISFRVCSGEATPDDMSCDYDNMAVNPSESGFVTLVSVESGFVTNDIYEFSPDQMGRSKESGWVENEIYGY

SEQ ID NO: 93117 - DNA, 690 bp, Artificial Sequence
  derived and/or modified sequence
atggtgaccagcggcctgggcagcggcggcgtgagaagaaacaaggccatcgcccagcccgccagaaccttcatgctgggcctgatggccgcctaccacaacctggagaagcccgccgtgcccagcagagaggccgagggcgaggagaccgagctgaccacccccgtgctgcccgaggagacccaggaggaggacgccaagaagaccttcaaggagagcagagaggccgccctgaacctggcctacatcctgatccccagcatccccctgctgctgctgctggtggtgaccaccgtggtgtgctgggtgtggatctgcagaaagagaaagagagagcagcccgaccccagcaccaagaagcagcacaccatctggcccagcccccaccagggcaacagccccgacctggaggtgtacaacgtgatcagaaagcagagcgaggccgacctggccgagaccagacccgacctgaagaacatcagcttcagagtgtgcagcggcgaggccacccccgacgacatgagctgcgactacgacaacatggccgtgaaccccagcgagagcggcttcgtgaccctggtgagcgtggagagcggcttcgtgaccaacgacatctacgagttcagccccgaccagatgggcagaagcaaggagagcggctgggtggagaacgagatctacggctactag

SEQ ID NO: 93118 - DNA, 690 bp, Artificial Sequence
  derived and/or modified sequence
atggttacgtctggccttggaagcggaggagtgcggcggaacaaagctatcgcccagcccgcacggacatttatgctgggcctcatggcagcctaccacaatcttgagaagcccgccgtgccttcacgcgaagccgaaggggaagagaccgaactcacaacacccgttttgccggaagaaacacaggaagaggacgctaagaaaaccttcaaggagtcgcgcgaggccgcccttaatctggcatatattctgatacctagtatacccttactgctgctgttagttgtcaccaccgtggtttgttgggtgtggatatgtcgtaaacggaagcgtgaacagcccgatccctccacgaagaaacagcatactatctggccatccccccaccaaggcaactcaccggatctcgaagtgtataatgttattcggaagcagagtgaagcagacttggctgaaacacgcccagaccttaaaaatatcagcttccgtgtatgttccggagaagctacaccggacgatatgagttgcgattacgataacatggctgtgaatcccagcgagagcggatttgtcacacttgtgtccgtcgagtccggctttgtgacaaatgatatttacgagtttagtccagaccaaatgggccggagcaaagaaagcggctgggtggagaatgagatttatggctactag

SEQ ID NO: 93119 - DNA, 2172 bp, Artificial Sequence
  derived and/or modified sequence
gtgcggtccgtcggtggcctagagatgctgctgccgcggttgcagttgtcgcgcacgcctctgcccgccagcccgctccaccgccgtagcgcccgagtgtcggggggcgcacccgagtcgggccatgaggccgggaaccgcgctacaggccgtgctgctggccgtgctgctggtggggctgcgggccgcgacgggtcgcctgctgagtgggcagccagtctgccggggagggacacagaggccttgttataaagtcatttacttccatgatacttctcgaagactgaactttgaggaagccaaagaagcctgcaggagggatggaggccagctagtcagcatcgagtctgaagatgaacagaaactgatagaaaagttcattgaaaacctcttgccatctgatggtgacttctggattgggctcaggaggcgtgaggagaaacaaagcaatagcacagcctgccaggacctttatgcttggactgatggcagcatatcacaatttagagaaaccagcagttccttctagagaagctgaaggtgaggaaacagagctgacaacacctgtacttccagaagaaacacaggaagaagatgccaaaaaaacatttaaagaaagtagagaagctgccttgaatctggcctacatcctaatccccagcattccccttctcctcctccttgtggtcaccacagttgtatgttgggtttggatctgtagaaaaagaaaacgggagcagccagaccctagcacaaagaagcaacacaccatctggccctctcctcaccagggaaacagcccggacctagaggtctacaatgtcataagaaaacaaagcgaagctgacttagctgagacccggccagacctgaagaatatttcattccgagtgtgttcgggagaagccactcccgatgacatgtcttgtgactatgacaacatggctgtgaacccatcagaaagtgggtttgtgactctggtgagcgtggagagtggatttgtgaccaatgacatttatgagttctccccagaccaaatggggaggagtaaggagtctggatgggtggaaaatgaaatatatggttattaggacatataaaaaactgaaactgacaacaatggaaaagaaatgataagcaaaatcctcttattttctataaggaaaatacacagaaggtctatgaacaagcttagatcaggtcctgtggatgagcatgtggtccccacgacctcctgttggacccccacgttttggctgtatcctttatcccagccagtcatccagctcgaccttatgagaaggtaccttgcccaggtctggcacatagtagagtctcaataaatgtcacttggttggttgtatctaacttttaagggacagagctttacctggcagtgataaagatgggctgtggagcttggaaaaccacctctgttttccttgctctatacagcagcacatattatcatacagacagaaaatccagaatcttttcaaagcccacatatggtagcacaggctggcctgtgcatcggcaattctcatatctgtttttttcaaagaataataaaatcaaataaagagcaggaaacagagtgttagtctgtgtctacagcccttcctctgcatgtggccacaggggacctttttttgtttctcctgacatccagacttggaaatatctaactacttgcaaaactaaaaatgaggccaggcgcagtggctgacgcctgtaatcccagaaccttgggagaccaagattggaggatagcttgagttcaggagttccagaccttcctgggcaaaatagtgagactctgactctacaaaaaatttaaaaattagcagggcatggtggcatgcgcctgcagtcccagctactcaggaggccgaggtgggggaattgcttgagcccaggaggttgaggctgcagtgagctaggatcacgccactgctctcctgcgtgggcaacagaatgagaccctgtctctaaacaaaaatattttttaaagaaactaaaaatgaaatttgagtctcagcttctaggcttatgtactcccatccctgatactacacgttgttctgtttgcatgtttgttactgcagcatcaacataacatgactaataatgatgacagttctaccttttgttgacagacctcattgtttc

SEQ ID NO: 93120 - DNA, 690 bp, Artificial Sequence
  derived and/or modified sequence
atggtgaccagcggcctgggcagcggcggcgtgagaagaaacaaggccatcgcccagcctgcccggaccttcatgctgggcctgatggccgcctaccacaacctggagaagccagctgtgcccagccgggaggccgagggggaggagacagagctgaccacccctgtgctgcctgaggagacccaggaggaggatgccaagaagaccttcaaggagagccgggaggccgccctgaacctggcctacatcctgatccccagcatccccctgctgctgctgctggtggtgaccaccgtggtgtgctgggtgtggatctgcaggaagaggaagcgggagcagcctgaccccagcaccaagaagcagcacaccatctggcccagcccccaccagggcaacagcccagacctggaggtgtacaacgtcatcaggaagcagagcgaggccgacctggccgagaccaggccagacctgaagaacatctccttccgggtgtgcagcggggaggccaccccagatgacatgagctgtgactatgacaacatggctgtgaaccccagcgagagcggctttgtgaccctggtgtctgtggagagcggctttgtgaccaatgacatctatgagttctccccagaccagatgggccgcagcaaggagagcggctgggtggagaatgagatctacggctactag

SEQ ID NO: 93121 - DNA, 690 bp, Artificial Sequence
  derived and/or modified sequence
atggtgaccagcggcctgggcagcggcggcgtgcggcggaacaaggctattgcacaaccggcgaggacattcatgctaggactcatggcggcctaccacaatctcgagaagcccgccgtaccatcccgggaagccgaaggcgaagagacggaattgacaactcccgtcttgccggaagagacgcaggaggaggacgccaaaaagacttttaaagagtcgagagaagcggccctcaatttggcatatatcttaattccttctatccccctgttgctgctgcttgtggtgaccaccgtggtgtgttgggtgtggatttgtcggaaacgaaaacgggaacagccagatcctagcacgaaaaagcagcatacgatttggccttccccccaccaggggaatagtcctgatctcgaagtttacaacgtgatccgcaagcaaagtgaagccgatctcgccgagacacggcctgacttgaaaaacatctcgttccgagtgtgttctggggaggccaccccagatgatatgtcctgtgactatgataacatggcagtgaacccatccgagagcggcttcgtgaccctggtttctgtagaaagtggcttcgtgacaaacgacatctatgaattttcacccgaccaaatgggccggagtaaggagagtggttgggtggaaaatgaaatctacggttactag

SEQ ID NO: 93122 - DNA, 690 bp, Artificial Sequence
  derived and/or modified sequence
atggtgacttccgggctaggttcaggaggcgtccgccgaaataaggcaatagcgcagcctgctcgaacattcatgctgggcctgatggcagcgtatcacaacctggagaagccggctgtgccgagccgagaggcggagggcgaagaaacagaacttaccacccctgtccttcctgaggaaacacaagaggaggacgcaaagaagactttcaaagaaagccgtgaggcggctttgaacttagcttacatattaattccgtcgatacccctactgctactgctagtggttaccacagtggtctgctgggtgtggatctgtcgtaagcgcaagagggaacaacctgacccctctacaaagaaacagcacaccatctggccctcaccacatcagggtaatagccctgacttggaagtctacaacgtcatccgtaagcagtccgaagccgatctggcagaaactcgacccgacctgaagaatatctcatttagggtgtgttctggagaagctacccctgacgatatgtcctgcgactatgacaacatggcagtcaacccatcggagagcggcttcgtgacccttgtgtctgttgaatctgggtttgtgacgaacgacatttatgagtttagtcctgaccagatgggacggtctaaggaaagtggctgggtggagaacgaaatttatggctattag

SEQ ID NO: 93123 - DNA, 2822 bp, Artificial Sequence
  derived and/or modified sequence
ctggtttatcaggggatccccaaagaaagcaaggggaccaaggccgggactgctggggtgaaggtccgggaggctgagcacaggccatggaaaggaatgacatcatcaacttcaaggctttggagaaagagctgcaggctgcactcactgctgatgagaagtacaaacgggagaatgctgccaagttacgggctccaggaggaggagaggctcctgcaggagctgctggagctgtaccaggttgactgatgcggcaagctaccctcagaggtcccagtggtcactggaggcagttttttggttgttgtcttgggggttctgcaggaccataataagaaacccacacctggttcccttctcaacttggaattttcagagcaaaaacaggaatcaagtcttccccacttctccagtccctcagtgtctcgctgttttgaactgtgtgtatccatggacagtcaagagctcaggaagttgagagcggttttgtttcccacccttagagtctgccaagcctctagcccactggccttgagagatgagtgtgtgcccaaccaaatgctggctataccagttacagcctccactcataaaagggaaaaagcaaaatctttatggtaaacaaacactgatctccacagctcttaacaagaatgtttatagccccaaaccaatgaatggacatgtaatcaacaaatgatcaaatactacatcatttgaggtgttgaattttcccctagagactcagttcttgtgcaggttgggcctgggaaagtcccaagccatcagctcaggtccagccagcctcccggatggccagatatgcaggagggtgggtttccttcatcccccaggttgatgaaagacttttccaccaggctggcagggcagggcctggagcactgaggcagagatctccctgcccgagcacctcggcccgcccttctcattccggtttcctttgacccattcttgggtgagcgccagtgttctagaaaggggagtaaaggccaggttctagaatggctttccccccccaccctgagatcaggtctggaatgttagaagggcatcttgtacatccactgggaataaattgccttgcacttggcggcttcctctgcagattgttgctgcttttcctggctgcataatcctttcctcatctagaggcttccgcttagcagagctttctaggagccctatgagcctttaatgccctggttttgccctgcccctctgacccctgcctccttcaggtatgcacctggccctcaccactgtgctcctgtgggcatgggggctccaggcctttgaaattgtggagaaggaaaacatttttcagaggaccccctgccctgctttcctgatgtttgaaaatgcagcctacctggccgacatgagctttgagcttccctgtcactgcaaacccgaagaggtgccagctgtagtctggttctaccaaaagcacctaggtagcagccacaccaaagtgctgacggactttgatgggcgggtgctgacggaggcagcccaggtacgtgtgggcagcgacatgctgacccgcttcagcatccgcatgttcagcttgttggttttcagggctcagtctgaggactcaggcctgtacttctgcggcacccgcaagggggactacttttacgcctacgatgtggacatccagaacagtgagggaatggtggccactttccaggacaagggccaggagccctttgcagatgaatactatgggcacctccatgtcttcaccaccttctgggaatggaccccctgtgaccgctgcggagtgcgtggggagcagtggcgcatcggcctctgctacctgcagagcccagacctctccccacgctacctcaaggccgtgcccgatgtggtgtcttgtggctcaagggctgtgccaaggaagctgcggaccaaggccagggaccacacgcctgaggtgctggttcggagctgcttagtaccctgtgagaagacaaagaccatccgggagggcgtgctggccatcattaactatgtgtccaaagtgggcagccggccctgggtgccccaggtgcccattcagttccaccagcagagactgggccatggactcatcatctcctgtcctggggcccggccagagcatgcagtggcctgggacaaagaccgccagcacctctaccgcacacagtacctgaagggtgtcaacaggtccatgagggtgttcattgaccacggcaaccagctccacatccgcttcacccagctggatgaccggggcatctactattgctggaggcagggtgtgctagttgctggcttccggctgggtgtgacatctcatgggcactacccagcctcgttctcagatcctgagactcgctcggctgtggagctcaccctgataggctacctgctcatcacagcagtctttgtcaccattcacttctgtcgttgctgctgctacttatttcactgttgtcccagcttctccccctaggagctctcttcagctctgaagaccagttgtccttcaatgtgtttgttaaatgataccagatgtctctgggtgggtaccctgggttgggacaggtggtaggaacatgtggacaaatctgttacagcctgctccccattttcatgggcaggtctgggacctgatctgagaagtggaggggcctgaggctggtgggagattggggactgagctcaggatggaagtagggcacatgtgtttcctgacttcacatttaggtcagagaaggaaagtgtgaactcagatttatccagtggtaaacactgatcagtgttgaatcatg

SEQ ID NO: 93124 - protein, 481 aa, Artificial Sequence
  derived and/or modified sequence
MMLKSITESFATAIHGLKVGHLTDRVIQRSKRMILDTLGAGFLGTTTEVFHIASQYSKIYSSNISSTVWGQPDIRLPPTYAAFVNGVAIHSMDFDDTWHPATHPSGAVLPVLTALAEALPRSPKFSGLDLLLAFNVGIEVQGRLLHFAKEANDMPKRFHPPSVVGTLGSAAAASKFLGLSSTKCREALAIAVSHAGAPMANAATQTKPLHIGNAAKHGIEAAFLAMLGLQGNKQVLDLEAGFGAFYANYSPKVLPSIASYSWLLDQQDVAFKRFPAHLSTHWVADAAASVRKHLVAERALLPTDYIKRIVLRIPNVQYVNRPFPVSEHEARHSFQYVACAMLLDGGITVPSFHECQINRPQVRELLSKVELEYPPDNLPSFNILYCEISVTLKDGATFTDRSDTFYGHWRKPLSQEDLEEKFRANASKMLSWDTVESLIKIVKNLEDLEDCSVLTTLLKGPSPPEVASNSPACNNSITNLS

SEQ ID NO: 93125 - protein, 481 aa, Artificial Sequence
  derived and/or modified sequence
FPLKSITESFATAIHGLKVGHLTDRVIQRSKRMILDTLGAGFLGTTTEVFHIASQYSKIYSSNISSTVWGQPDIRLPPTYAAFVNGVAIHSMDFDDTWHPATHPSGAVLPVLTALAEALPRSPKFSGLDLLLAFNVGIEVQGRLLHFAKEANDMPKRFHPPSVVGTLGSAAAASKFLGLSSTKCREALAIAVSHAGAPMANAATQTKPLHIGNAAKHGIEAAFLAMLGLQGNKQVLDLEAGFGAFYANYSPKVLPSIASYSWLLDQQDVAFKRFPAHLSTHWVADAAASVRKHLVAERALLPTDYIKRIVLRIPNVQYVNRPFPVSEHEARHSFQYVACAMLLDGGITVPSFHECQINRPQVRELLSKVELEYPPDNLPSFNILYCEISVTLKDGATFTDRSDTFYGHWRKPLSQEDLEEKFRANASKMLSWDTVESLIKIVKNLEDLEDCSVLTTLLKGPSPPEVASNSPACNNSITNLS

SEQ ID NO: 93126 - DNA, 1446 bp, Artificial Sequence
  derived and/or modified sequence
atgatgctgaagagcatcaccgagagcttcgccaccgccatccacggcctgaaggtgggccacctgaccgacagagtgatccagagaagcaagagaatgatcctggacaccctgggcgccggcttcctgggcaccaccaccgaggtgttccacatcgccagccagtacagcaagatctacagcagcaacatcagcagcaccgtgtggggccagcccgacatcagactgccccccacctacgccgccttcgtgaacggcgtggccatccacagcatggacttcgacgacacctggcaccccgccacccaccccagcggcgccgtgctgcccgtgctgaccgccctggccgaggccctgcccagaagccccaagttcagcggcctggacctgctgctggccttcaacgtgggcatcgaggtgcagggcagactgctgcacttcgccaaggaggccaacgacatgcccaagagattccacccccccagcgtggtgggcaccctgggcagcgccgccgccgccagcaagttcctgggcctgagcagcaccaagtgcagagaggccctggccatcgccgtgagccacgccggcgcccccatggccaacgccgccacccagaccaagcccctgcacatcggcaacgccgccaagcacggcatcgaggccgccttcctggccatgctgggcctgcagggcaacaagcaggtgctggacctggaggccggcttcggcgccttctacgccaactacagccccaaggtgctgcccagcatcgccagctacagctggctgctggaccagcaggacgtggccttcaagagattccccgcccacctgagcacccactgggtggccgacgccgccgccagcgtgagaaagcacctggtggccgagagagccctgctgcccaccgactacatcaagagaatcgtgctgagaatccccaacgtgcagtacgtgaacagacccttccccgtgagcgagcacgaggccagacacagcttccagtacgtggcctgcgccatgctgctggacggcggcatcaccgtgcccagcttccacgagtgccagatcaacagaccccaggtgagagagctgctgagcaaggtggagctggagtacccccccgacaacctgcccagcttcaacatcctgtactgcgagatcagcgtgaccctgaaggacggcgccaccttcaccgacagaagcgacaccttctacggccactggagaaagcccctgagccaggaggacctggaggagaagttcagagccaacgccagcaagatgctgagctgggacaccgtggagagcctgatcaagatcgtgaagaacctggaggacctggaggactgcagcgtgctgaccaccctgctgaagggccccagcccccccgaggtggccagcaacagccccgcctgcaacaacagcatcaccaacctgagctag

SEQ ID NO: 93127 - DNA, 1446 bp, Artificial Sequence
  derived and/or modified sequence
ttccccctgaagagcatcaccgagagcttcgccaccgccatccacggcctgaaggtgggccacctgaccgacagagtgatccagagaagcaagagaatgatcctggacaccctgggcgccggcttcctgggcaccaccaccgaggtgttccacatcgccagccagtacagcaagatctacagcagcaacatcagcagcaccgtgtggggccagcccgacatcagactgccccccacctacgccgccttcgtgaacggcgtggccatccacagcatggacttcgacgacacctggcaccccgccacccaccccagcggcgccgtgctgcccgtgctgaccgccctggccgaggccctgcccagaagccccaagttcagcggcctggacctgctgctggccttcaacgtgggcatcgaggtgcagggcagactgctgcacttcgccaaggaggccaacgacatgcccaagagattccacccccccagcgtggtgggcaccctgggcagcgccgccgccgccagcaagttcctgggcctgagcagcaccaagtgcagagaggccctggccatcgccgtgagccacgccggcgcccccatggccaacgccgccacccagaccaagcccctgcacatcggcaacgccgccaagcacggcatcgaggccgccttcctggccatgctgggcctgcagggcaacaagcaggtgctggacctggaggccggcttcggcgccttctacgccaactacagccccaaggtgctgcccagcatcgccagctacagctggctgctggaccagcaggacgtggccttcaagagattccccgcccacctgagcacccactgggtggccgacgccgccgccagcgtgagaaagcacctggtggccgagagagccctgctgcccaccgactacatcaagagaatcgtgctgagaatccccaacgtgcagtacgtgaacagacccttccccgtgagcgagcacgaggccagacacagcttccagtacgtggcctgcgccatgctgctggacggcggcatcaccgtgcccagcttccacgagtgccagatcaacagaccccaggtgagagagctgctgagcaaggtggagctggagtacccccccgacaacctgcccagcttcaacatcctgtactgcgagatcagcgtgaccctgaaggacggcgccaccttcaccgacagaagcgacaccttctacggccactggagaaagcccctgagccaggaggacctggaggagaagttcagagccaacgccagcaagatgctgagctgggacaccgtggagagcctgatcaagatcgtgaagaacctggaggacctggaggactgcagcgtgctgaccaccctgctgaagggccccagcccccccgaggtggccagcaacagccccgcctgcaacaacagcatcaccaacctgagctag

SEQ ID NO: 93128 - DNA, 1446 bp, Artificial Sequence
  derived and/or modified sequence
atgatgttgaagagtataaccgaatcattcgccacagccatccatggcttaaaagtagggcacttgacagatcgtgtgatacaacgtagtaaacgaatgatccttgacaccctgggagccggatttttaggtaccacaaccgaagtgtttcacattgcctctcaatactctaaaatctacagctcaaacatcagcagcactgtgtggggccagcccgacattaggctgcctcccacttacgctgctttcgtgaacggagtcgccatccactccatggactttgacgacacctggcaccctgccactcaccccagcggagcagtcctgcccgtcttaacagctctggctgaggccctgccgagaagccccaaattttccggtctggacctgcttctggcattcaacgtgggcatagaagtgcagggtcggctgcttcacttcgcaaaagaagccaacgacatgccaaagcgttttcatccccctagcgttgtaggcacgctcggaagcgccgccgcagcatccaagttcctcgggctatcctcaactaagtgtagagaggctctggctatcgccgtatcacatgcgggcgctccgatggctaacgccgctacccagacaaagcccttacatatcggcaatgcagcaaaacacggtattgaagcggctttcttggctatgctcggactgcaggggaataaacaagtgctggatctcgaggctggattcggagctttctacgctaattacagccccaaagtgctaccctctatcgcctcgtattcctggctgcttgaccagcaggatgtggctttcaagaggttccctgcccatttgagcacgcactgggtcgctgatgccgcggctagtgtgcgaaaacaccttgtggctgaacgcgcgctgctgcccacagattatataaagaggatagttctgcgaatccctaacgttcagtatgtaaataggcccttcccagtatccgagcacgaagcaagacacagcttccaatacgttgcttgcgcgatgttgcttgatggaggtattacagtgccaagcttccatgagtgtcagattaatagaccacaggtgcgggagctcttgagcaaggtggaactggagtatccgccagacaatttgccttcatttaacatactttactgtgaaatcagtgtgacattaaaggacggagccacattcaccgaccggtctgacaccttttatggccactggaggaagcccctgagccaggaagacctggaagaaaaattcagggctaatgcttccaaaatgctgtcctgggataccgttgagagccttatcaagatcgtgaaaaatctcgaggatctggaagactgttctgttctgaccactttgttgaaggggccatcccccccagaagtggcctctaacagcccagcctgcaacaattctattactaatctctcctag

SEQ ID NO: 93129 - DNA, 1446 bp, Artificial Sequence
  derived and/or modified sequence
tttcctttgaagagcattaccgagagctttgctaccgccatccacggtttaaaggttggccacctcactgatcgagtcattcagcgctcaaagcggatgattctggatacgctcggggccggctttctgggcactactacagaggtgtttcacattgccagtcagtactccaagatttacagtagtaacatatcatctactgtctggggccagcctgacatccgattaccccccacctatgcagccttcgtgaacggcgtagctatacacagcatggattttgacgacacatggcaccccgccacgcacccttctggcgccgtgcttcccgttctgactgctctggcagaggccttgccgcgaagccccaaattttcaggtctcgacctgctcttggccttcaacgtggggatcgaagtccagggacggctgctgcactttgccaaagaggccaacgacatgcctaagcggttccatcctcctagcgttgttggcacattgggatcggcagccgccgcatctaagtttctgggtctgtcttctacaaaatgtagggaggcattagccatcgctgtgagccatgctggggccccaatggctaacgctgccacccaaacaaaacccctccacatcggtaatgccgcaaaacatggaattgaagccgctttccttgccatgctgggccttcaaggtaacaaacaagtcctcgatctcgaggccgggtttggggcattctacgcgaactattcaccaaaggtgcttccatcgatcgcctcatactcttggctcctggaccagcaggacgtggcctttaagcggtttcccgcccatctgtccactcattgggtggctgacgcagccgcaagtgttcgcaagcatcttgtggccgaaagagccttactcccgactgactatataaagcgcattgtcctgagaatccccaacgtgcagtacgttaatagaccatttcctgtttctgaacatgaagccaggcattcttttcagtacgtggcttgcgcaatgctgctcgatggcggcatcacagtgccatcatttcacgagtgtcagatcaaccggccccaggtcagggagctcttgtccaaggtggagctcgaatatccaccggacaacctcccatcgttcaatatcttatactgtgagattagtgtgaccttgaaagacggcgctacatttacagataggtctgataccttctatggccactggagaaaacccctgtcgcaggaagacctggaggagaaattccgagctaacgcaagcaagatgctgagctgggatacagtggagagccttatcaagatcgtgaagaatctggaggatctggaagattgctctgtattaaccacactgctgaaaggacctagccccccagaggtggcgagcaattcgccagcgtgcaacaactccattaccaatttatcttag

SEQ ID NO: 93130 - DNA, 1446 bp, Artificial Sequence
  derived and/or modified sequence
atgatgctgaagagcatcacagagagctttgccacagccatccacggcctgaaggtgggccacctgacagacagagtcatccagaggagcaagaggatgatcctggacaccctgggcgccggcttcctgggcaccaccacagaggtgttccacatcgccagccagtacagcaagatctacagcagcaacatcagcagcacagtgtggggccagcctgacatccggctgccccccacctatgctgcctttgtgaatggagtggccatccacagcatggactttgatgacacctggcacccagccacccaccccagcggggctgtgctgcctgtgctgacagccctggccgaggccctgcccaggagccccaagttcagcggcctggacctgctgctggccttcaacgtgggcatcgaggtgcagggccgcctgctgcactttgccaaggaggccaatgacatgcccaagcgcttccacccccccagcgtggtgggcaccctgggcagcgctgctgctgccagcaagttcctgggcctgagcagcaccaagtgccgggaggccctggccatcgctgtgtcccatgctggggcccccatggccaatgctgccacccagaccaagcccctgcacatcggaaatgctgccaagcatggaattgaagctgccttcctggccatgctgggcctgcagggcaacaagcaggtgctggacctggaggccggctttggagccttctacgccaactacagccccaaggtgctgcccagcatcgccagctacagctggctgctggaccagcaggatgtggccttcaagcgcttccctgcccacctgagcacccactgggtggctgatgctgctgcctctgtgaggaagcacctggtggccgagcgggccctgctgcccacagactacatcaagagaattgtgctgcgcatccccaacgtgcagtatgtgaaccggcccttccctgtgtctgagcacgaggcccggcacagcttccagtatgtggcctgtgccatgctgctggatggcggcatcaccgtgcccagcttccacgagtgccagatcaaccggccccaggtgcgggagctgctgagcaaggtggagctggagtaccccccagacaacctgcccagcttcaacatcctgtactgtgagatctctgtgaccctgaaggatggagccaccttcacagacagaagtgacaccttctacggccactggaggaagcccctgagccaggaggacctggaggagaagttccgggccaatgccagcaagatgctgtcctgggacacagtggagagcctcatcaagatcgtgaagaacctggaggacctggaggactgcagcgtgctgaccaccctgctgaagggccccagccccccagaggtggccagcaacagccctgcctgcaacaacagcatcaccaacctgtcctag

SEQ ID NO: 93131 - DNA, 1446 bp, Artificial Sequence
  derived and/or modified sequence
ttccccctgaagagcatcacagagagctttgccacagccatccacggcctgaaggtgggccacctgacagacagagtcatccagaggagcaagaggatgatcctggacaccctgggcgccggcttcctgggcaccaccacagaggtgttccacatcgccagccagtacagcaagatctacagcagcaacatcagcagcacagtgtggggccagcctgacatccggctgccccccacctatgctgcctttgtgaatggagtggccatccacagcatggactttgatgacacctggcacccagccacccaccccagcggggctgtgctgcctgtgctgacagccctggccgaggccctgcccaggagccccaagttcagcggcctggacctgctgctggccttcaacgtgggcatcgaggtgcagggccgcctgctgcactttgccaaggaggccaatgacatgcccaagcgcttccacccccccagcgtggtgggcaccctgggcagcgctgctgctgccagcaagttcctgggcctgagcagcaccaagtgccgggaggccctggccatcgctgtgtcccatgctggggcccccatggccaatgctgccacccagaccaagcccctgcacatcggaaatgctgccaagcatggaattgaagctgccttcctggccatgctgggcctgcagggcaacaagcaggtgctggacctggaggccggctttggagccttctacgccaactacagccccaaggtgctgcccagcatcgccagctacagctggctgctggaccagcaggatgtggccttcaagcgcttccctgcccacctgagcacccactgggtggctgatgctgctgcctctgtgaggaagcacctggtggccgagcgggccctgctgcccacagactacatcaagagaattgtgctgcgcatccccaacgtgcagtatgtgaaccggcccttccctgtgtctgagcacgaggcccggcacagcttccagtatgtggcctgtgccatgctgctggatggcggcatcaccgtgcccagcttccacgagtgccagatcaaccggccccaggtgcgggagctgctgagcaaggtggagctggagtaccccccagacaacctgcccagcttcaacatcctgtactgtgagatctctgtgaccctgaaggatggagccaccttcacagacagaagtgacaccttctacggccactggaggaagcccctgagccaggaggacctggaggagaagttccgggccaatgccagcaagatgctgtcctgggacacagtggagagcctcatcaagatcgtgaagaacctggaggacctggaggactgcagcgtgctgaccaccctgctgaagggccccagccccccagaggtggccagcaacagccctgcctgcaacaacagcatcaccaacctgtcctag

SEQ ID NO: 93132 - DNA, 2165 bp, Artificial Sequence
  derived and/or modified sequence
ccagcaaacaaattactcctctggttcactcctcctgaactgaacctcttctttacaacgaaatgatgctcaagtctatcacagaaagctttgccacagcaatccatggcttgaaagtgggacacctgacagatcgtgttattcagaggagcaagaggatgattctagacactctgggtgctgggttcctgggaaccactacggaagtgtttcacatagccagccaatatagcaagatctacagttccaacatatccagcactgtttggggtcagccagacatcaggctcccgcccacatatgctgcttttgtgaacggtgtggctattcactccatggattttgatgacacgtggcaccctgccacccacccttctggggctgtccttcctgtcctcacagctttagcagaagccctgccaaggagtccaaagttttctggccttgacctgctgctggctttcaatgttggtattgaagtgcaaggccgattactgcatttcgccaaggaggccaatgacatgccaaagagattccatcccccttccgtggtaggaacgttgggtagtgctgctgctgcatccaagtttttaggacttagctcgacaaagtgccgagaagctctggccattgctgtttcccatgctggggcacccatggccaatgctgccacccagaccaagcccctccacattggcaatgctgccaagcatgggatagaagctgcatttttggcaatgttgggtctccaaggaaacaagcaggtcttggacttggaggcaggatttggggccttttatgccaactattccccaaaagtccttccaagcatagcttcctacagttggctgctggaccagcaggacgtggcctttaagcgttttcctgcacatttatctacccactgggtggcagacgcagctgcatctgtgagaaagcaccttgtagcagagagagccctgcttccaactgactacattaagagaattgtgctcaggataccaaatgtccagtatgtaaacaggccctttccagtttcggagcatgaagcccgtcattcattccagtatgtggcctgtgccatgctgcttgatggtggcatcactgtcccctcattccatgaatgccagatcaacaggccacaggtgagagagctgctcagtaaggtggagctggagtaccctccggacaacttgccaagcttcaacatactgtactgtgaaataagtgtcaccctcaaggatggagccaccttcacagatcgctctgataccttctatgggcactggagaaaaccactgagccaggaggacctagaggaaaagttcagagccaatgcctccaagatgctgtcctgggacacagtggaaagccttataaagatagtcaaaaatctagaagacctagaagactgttctgtgttaactacacttctcaaaggaccctctccaccagaggtagcttcaaactctccagcatgtaataattctatcacaaatctctcctgaggcttaccaacatctaaatgactttgcatttggggagattcaatgatttggtttgtaaagcaagggtctgctgcttggttttcccaggaaaaatgaacaaagatggagagagtccagaaacagaactacatatatctggaaggagccttctcctgaaaattttgcaggacagttccacttacctaaatcaagatgaaacacacacacaaaaatgagtttgtaagcattcacaagggtgaaattcaactcacctgtgatttacttataaaattaatctcttcataggaattatgtgtggacttcatgagcctcaaggttttagagggatgtgaacctgcatgtatattttctgacagtggagagggctctggtgcattgtgtcaccaacagatctcctagaccatggcttattaccaagccctccacagtgcaaggggtgctactggggaatgggtgggtttaaatcctgcctctgccattcactagatgtagccttgagcatgttaccattagccctctgcctcagtttccctatttgtcaagccgaagtaaaaagcagtctggaaaaatcgcattttggctctagaacccatggtcttaagcactgcaatatatcacctttcagtataaaaatatttgaatcagagttgcaataaa

SEQ ID NO: 93133 - DNA, 1446 bp, Artificial Sequence
  derived and/or modified sequence
ttccctttaaagtctatcacagaaagctttgccacagcaatccatggcttgaaagtgggacacctgacagatcgtgttattcagaggagcaagaggatgattctagacactctgggtgctgggttcctgggaaccactacggaagtgtttcacatagccagccaatatagcaagatctacagttccaacatatccagcactgtttggggtcagccagacatcaggctcccgcccacatatgctgcttttgtgaacggtgtggctattcactccatggattttgatgacacgtggcaccctgccacccacccttctggggctgtccttcctgtcctcacagctttagcagaagccctgccaaggagtccaaagttttctggccttgacctgctgctggctttcaatgttggtattgaagtgcaaggccgattactgcatttcgccaaggaggccaatgacatgccaaagagattccatcccccttccgtggtaggaacgttgggtagtgctgctgctgcatccaagtttttaggacttagctcgacaaagtgccgagaagctctggccattgctgtttcccatgctggggcacccatggccaatgctgccacccagaccaagcccctccacattggcaatgctgccaagcatgggatagaagctgcatttttggcaatgttgggtctccaaggaaacaagcaggtcttggacttggaggcaggatttggggccttttatgccaactattccccaaaagtccttccaagcatagcttcctacagttggctgctggaccagcaggacgtggcctttaagcgttttcctgcacatttatctacccactgggtggcagacgcagctgcatctgtgagaaagcaccttgtagcagagagagccctgcttccaactgactacattaagagaattgtgctcaggataccaaatgtccagtatgtaaacaggccctttccagtttcggagcatgaagcccgtcattcattccagtatgtggcctgtgccatgctgcttgatggtggcatcactgtcccctcattccatgaatgccagatcaacaggccacaggtgagagagctgctcagtaaggtggagctggagtaccctccggacaacttgccaagcttcaacatactgtactgtgaaataagtgtcaccctcaaggatggagccaccttcacagatcgctctgataccttctatgggcactggagaaaaccactgagccaggaggacctagaggaaaagttcagagccaatgcctccaagatgctgtcctgggacacagtggaaagccttataaagatagtcaaaaatctagaagacctagaagactgttctgtgttaactacacttctcaaaggaccctctccaccagaggtagcttcaaactctccagcatgtaataattctatcacaaatctctcctga

SEQ ID NO: 93134 - DNA, 1446 bp, Artificial Sequence
  derived and/or modified sequence
atgatgctgaagagcatcaccgagagcttcgccaccgccatccacggattaaaggttggtcaccttacggatcgcgtcatccagcgcagcaaacgcatgattctggatacattgggggccggatttctgggcactacaaccgaggtcttccatatcgcttcacagtattccaagatatattcctccaacatcagctcaacggtctgggggcaacccgatattagactcccccctacatatgcagcctttgtcaatggtgtcgccattcactctatggatttcgacgacacttggcatccagctacccatccttcaggcgccgtgctacccgtgttaaccgcactagccgaggcattaccacgcagccctaaattcagcggcctggacctgcttcttgctttcaatgtagggatagaggttcagggtcggctgctgcattttgccaaagaggctaatgacatgcctaagcgttttcatccgccctcagtcgttggtactctggggtccgcagccgccgccagcaagttcctggggctcagctcgaccaagtgtcgggaggcccttgcaatcgccgtgagtcacgccggggcccctatggcaaatgccgccactcagactaaacctctccacattggcaatgctgccaagcacggcatcgaagcagcctttttggcgatgctagggctccaggggaataaacaggtacttgatctagaggccggattcggagcattctatgccaactacagcccaaaggttcttccctctattgccagctactcgtggctccttgatcagcaagacgtggctttcaaacggttccctgcccatctttccacccactgggtggcagatgcggccgcatcagtgcggaaacatctcgtagccgaaagagcactgctgcccactgattatattaagcgcatcgtgctacgcattcctaacgttcaatacgtcaatagacccttcccagtctccgagcacgaggcaaggcatagctttcaatatgtggcatgtgccatgctgctggatggcgggattacagtgcccagctttcacgagtgccagatcaatcggcctcaggtaagggagctgctgagcaaggtggaactagaatatccccccgacaatctgcctagctttaacatactttactgcgagatctctgttacccttaaagacggtgcaacctttacagaccggtctgacacattttacgggcactggcggaaacctctatctcaggaggatctggaggaaaaattccgcgcaaacgccagcaaaatgctgtcttgggacaccgtggaatcactcatcaaaatcgtgaagaacctggaggatcttgaagactgctctgtactaactacactcctaaaaggccctagtccacccgaagttgcatctaatagcccagcatgcaataactccattactaacctctcttag

SEQ ID NO: 93135 - DNA, 1446 bp, Artificial Sequence
  derived and/or modified sequence
ttccccctgaagagcatcaccgagagcttcgccaccgccatccacgggctgaaggtggggcatctgaccgatcgcgtgatccagcgctccaaaagaatgatcttagacactctgggcgcaggattcttgggcactactacagaggtgtttcacattgcctcccagtactcaaaaatctactcttccaacatctcttctacagtgtggggtcagccagacatacgcctgcccccaacctatgccgcatttgtcaacggcgtggccatccactccatggatttcgacgatacatggcatcctgcaacgcatccttctggagctgtgctgcccgtgctgactgccctggccgaggctctgccacgttcccctaagttttccggactggacttactcctggcatttaacgtcggaattgaggttcagggccggctgctgcacttcgctaaagaagccaatgatatgccaaagaggtttcatcctccctctgtggtcggaacgttaggctcagcagctgcagcgagcaaattcctgggcctatctagcacgaaatgccgtgaagctctcgcaattgctgtgagccacgccggggcccctatggcgaatgcagcgacccagactaagcctctgcacatagggaatgccgccaagcacggaattgaagcggccttcctggcaatgctgggattgcaaggaaacaagcaggtactcgacttggaagccggatttggtgctttttatgcaaactactcaccgaaagttctgccttccatcgctagctattcttggctgctcgatcagcaggacgtagcatttaaaaggttccccgcacacttgagcactcactgggtggctgatgctgccgcatccgtgcgcaagcacttggtcgccgaacgcgccttgctacctaccgactatataaagcgcattgtccttcgaataccaaacgtgcagtacgtgaacagaccctttccagtatccgaacatgaggccagacactctttccagtatgtagcttgcgccatgctcctggatggaggaatcaccgtgccttccttccatgaatgtcaaatcaataggcctcaagtacgtgaattgctttccaaagtggagctggaatacccccccgacaacttgcctagctttaatatcctctattgcgagatttctgtcacgctgaaagacggagccacattcactgacaggtcagacaccttttacggccattggcgtaaacctctgagccaagaagatctcgaggagaagtttcgcgcaaacgccagcaagatgctgtcgtgggatacagttgagtcgctgataaagattgtgaaaaatcttgaagatctcgaggattgtagcgtgttaactaccctcctaaaaggcccttcccctcctgaggtggcgtcaaacagcccggcttgtaataactcaatcactaacttaagttag

SEQ ID NO: 93136 - DNA, 1446 bp, Artificial Sequence
  derived and/or modified sequence
atgatgctgaaatcaattacagaaagctttgcgacggctattcatgggttaaaagtgggacatctcactgacagagtaatccagcggtccaaacggatgatcttggacacgctgggtgccggattcttgggtacaactacagaagtgttccatattgcgtcccagtacagcaaaatctattccagtaatatttcctctactgtttgggggcagcccgatatccggctccctccaacatatgcggctttcgtgaacggagttgccatacactccatggatttcgacgacacttggcaccccgcaacccacccatccggcgctgtgttgccggtcctcacggccttggccgaggccttgccccgttctcccaaattttccggcttggacctgctcctcgcgtttaacgtgggtatcgaagtgcaggggaggctcttacacttcgctaaggaggccaacgatatgccgaaaaggttccatcctccatccgttgtcggcactttgggatcagccgctgcggctagcaaatttcttgggctcagttcaactaaatgtagagaggcgctggccatcgcagtcagccatgcaggggctccaatggccaacgccgctacacaaacaaaaccgctgcacataggcaatgccgctaaacatggaatagaggccgcattcctggccatgctcggattgcaaggtaacaagcaggtcctcgatctggaggccggattcggggctttttatgccaattactcgcctaaagtcctgccctctatagcatcttactcctggttactcgaccagcaggacgtagcatttaaaaggttccctgcgcatcttagtacacactgggtggctgacgccgcagcaagtgtaaggaaacatctggtagccgaacgcgcattgctccccaccgactatatcaagcgtatagtgcttcgcattcctaacgtccaatacgtgaacagaccatttccagtgtcggagcatgaggctcggcactcattccagtacgtcgcatgcgccatgctcctcgacggagggatcacagtgccctcatttcacgagtgccaaatcaataggcctcaggttagggagctgttgtctaaagttgagctggaatacccaccagataatctccctagcttcaatatcctctattgcgagatctccgtgaccctgaaggatggggctaccttcaccgacagatctgacactttctatggtcactggcggaaacccttgtcgcaggaggatctggaagaaaagtttagggccaacgccagcaagatgctgtcctgggataccgtcgaatctctgatcaagatagtgaagaacctggaggacctcgaggattgcagcgtgctgacaacgttactcaagggtccatctcctccagaagtggcgtcaaacagtcccgcttgcaataactccattaccaatttatcatag

SEQ ID NO: 93137 - DNA, 1446 bp, Artificial Sequence
  derived and/or modified sequence
tttccactgaagtccatcacagagagtttcgccacagccatacatggcctgaaggttgggcacctgacagaccgggtcatccagcggagtaaacgaatgatcctcgacacactgggcgctggttttctgggtaccaccaccgaagtcttccatatcgcctcacagtactccaagatctactcgagcaatatcagctccacagtgtggggccagcccgacataaggctgcctcccacttacgccgcttttgtcaatggcgtggcgatacatagtatggacttcgacgatacgtggcatcctgccacgcacccaagcggggcagttctaccggtattaacagccctcgctgaggccttgcccagatcacccaaattttctggactggatctgctgctggcatttaatgtggggatcgaggtccagggaaggttgctccatttcgctaaggaagcaaacgatatgccgaagcgctttcaccctccaagcgtcgtggggaccctgggatcggccgctgctgcttccaagtttctgggtctgtctagtaccaagtgccgcgaagctctggctatcgccgtatcccatgcaggagccccaatggccaacgccgctacccagacgaagccacttcatattggcaacgctgcaaaacacggtatcgaagcagcgtttctggctatgctgggccttcagggcaataagcaggttctggatctcgaggccggtttcggcgcattttatgctaactactcacctaaggtactgccctcgatagccagttattcttggctcttagatcagcaagatgtcgcttttaagagatttccagcacatttaagtacacattgggtagccgacgccgcagcttccgtgaggaaacacctggtcgcggagagagccctcttgcccactgactacatcaaacgcatcgtcttgcgaattccaaacgtgcaatacgtaaacaggcctttccccgtatctgagcacgaggcacgccatagctttcagtacgttgcatgtgctatgttgctcgatggtggaatcacagtaccttccttccacgagtgccagattaatagaccgcaggtcagagagctgcttagcaaagtggaactggagtatcctcctgataacctgccatctttcaatattctctattgtgaaatttcagttaccctgaaagatggcgcaacttttactgacagatcagatactttttatgggcattggcgcaagcctctgtcacaagaagatcttgaggagaagtttagggccaatgcttccaagatgctgagttgggacacggtcgaatctctgattaaaattgtgaagaaccttgaggatctggaggattgctcagtactcaccaccctgctgaaagggccatcaccaccagaggtcgcaagcaactctccagcctgtaataacagcatcacgaacctctcttag

SEQ ID NO: 93138 - protein, 640 aa, Artificial Sequence
  derived and/or modified sequence
MESGTSSPQPPQLDPLDAFPQKGLEPGDIAVLVLYFLFVLAVGLWSTVKTKRDTVKGYFLAGGDMVWWPVGASLFASNVGSGHFIGLAGSGAATGISVSAYELNGLFSVLMLAWIFLPIYIAGQVDMYAGAIFIQQSLHLDLYLAIVGLLAITAVYTVAGGLAAVIYTDALQTLIMLIGALTLMGYSFAAVGGMEGLKEKYFLALASNRSENSSCGLPREDAFHIFRDPLTSDLPWPGVLFGMSIPSLWYWCTDQVIVQRTLAAKNLSHAKGGALMAAYLKVLPLFIMVFPGMVSRILFPDQVACADPEICQKICSNPSGCSDIAYPKLVLELLPTGLRGLMMAVMVAALMSSLTSIFNSASTIFTMDLWNHLRPRASEKELMIVGRVFVLLLVLVSILWIPVVQASQGGQLFIYIQSISSYLQPPVAVVFIMGCFWKRTNEKGAFWGLISGLLLGLVRLVLDFIYVQPRCDQPDERPVLVKSIHYLYFSMILSTVTLITVSTVSWFTEPPSKEMVSHLTWFTRHDPVVQKEQAPPAAPLSLTLSQNGMPEASSSSSVQFEMVQENTSKTHSCDMTPKQSKVVKAILWLCGIQEKGKEELPARAEAIIVSLEENPLVKTLLDVNLIFCVSCAIFIWGYFA

SEQ ID NO: 93139 - DNA, 1923 bp, Artificial Sequence
  derived and/or modified sequence
atggagagcggcaccagcagcccccagcccccccagctggaccccctggacgccttcccccagaagggcctggagcccggcgacatcgccgtgctggtgctgtacttcctgttcgtgctggccgtgggcctgtggagcaccgtgaagaccaagagagacaccgtgaagggctacttcctggccggcggcgacatggtgtggtggcccgtgggcgccagcctgttcgccagcaacgtgggcagcggccacttcatcggcctggccggcagcggcgccgccaccggcatcagcgtgagcgcctacgagctgaacggcctgttcagcgtgctgatgctggcctggatcttcctgcccatctacatcgccggccaggtggacatgtacgccggcgccatcttcatccagcagagcctgcacctggacctgtacctggccatcgtgggcctgctggccatcaccgccgtgtacaccgtggccggcggcctggccgccgtgatctacaccgacgccctgcagaccctgatcatgctgatcggcgccctgaccctgatgggctacagcttcgccgccgtgggcggcatggagggcctgaaggagaagtacttcctggccctggccagcaacagaagcgagaacagcagctgcggcctgcccagagaggacgccttccacatcttcagagaccccctgaccagcgacctgccctggcccggcgtgctgttcggcatgagcatccccagcctgtggtactggtgcaccgaccaggtgatcgtgcagagaaccctggccgccaagaacctgagccacgccaagggcggcgccctgatggccgcctacctgaaggtgctgcccctgttcatcatggtgttccccggcatggtgagcagaatcctgttccccgaccaggtggcctgcgccgaccccgagatctgccagaagatctgcagcaaccccagcggctgcagcgacatcgcctaccccaagctggtgctggagctgctgcccaccggcctgagaggcctgatgatggccgtgatggtggccgccctgatgagcagcctgaccagcatcttcaacagcgccagcaccatcttcaccatggacctgtggaaccacctgagacccagagccagcgagaaggagctgatgatcgtgggcagagtgttcgtgctgctgctggtgctggtgagcatcctgtggatccccgtggtgcaggccagccagggcggccagctgttcatctacatccagagcatcagcagctacctgcagccccccgtggccgtggtgttcatcatgggctgcttctggaagagaaccaacgagaagggcgccttctggggcctgatcagcggcctgctgctgggcctggtgagactggtgctggacttcatctacgtgcagcccagatgcgaccagcccgacgagagacccgtgctggtgaagagcatccactacctgtacttcagcatgatcctgagcaccgtgaccctgatcaccgtgagcaccgtgagctggttcaccgagccccccagcaaggagatggtgagccacctgacctggttcaccagacacgaccccgtggtgcagaaggagcaggccccccccgccgcccccctgagcctgaccctgagccagaacggcatgcccgaggccagcagcagcagcagcgtgcagttcgagatggtgcaggagaacaccagcaagacccacagctgcgacatgacccccaagcagagcaaggtggtgaaggccatcctgtggctgtgcggcatccaggagaagggcaaggaggagctgcccgccagagccgaggccatcatcgtgagcctggaggagaaccccctggtgaagaccctgctggacgtgaacctgatcttctgcgtgagctgcgccatcttcatctggggctacttcgcctag

SEQ ID NO: 93140 - DNA, 1923 bp, Artificial Sequence
  derived and/or modified sequence
atggagtctggaacaagcagcccgcaacctccacaactggatcctctcgacgcctttcctcaaaaagggcttgaacccggtgacatagctgttcttgtgctgtacttcctgttcgtcttggcggtgggcctgtggtccacagttaagacaaaacgcgatacagtgaaaggctatttcctggctggaggtgacatggtatggtggccggtgggggccagtttattcgcaagcaacgtggggtcggggcatttcattggccttgccgggagtggcgctgcaactggtataagtgtgtcggcttacgaactgaacggactcttcagtgtcctgatgctggcttggatctttctgcctatctacatcgccgggcaggtagacatgtatgccggggcaatcttcattcagcagagcctccatctggacttatacctagccattgtaggtttgctcgcaattacggcagtttatactgtcgctggcggtcttgcagcggttatctataccgacgcactgcagacactcataatgctcattggggccttaactctgatgggctattcttttgctgccgtcgggggaatggaggggctcaaagagaaatactttttggccttagccagcaataggtcagaaaactctagctgcggcctgccgagagaagatgcctttcacatattcagagatccccttacaagcgacttgccgtggcccggtgtgctgtttgggatgtccataccttccctctggtattggtgcacagaccaggtcatagtccaacgtaccctcgccgcaaaaaatctttctcacgctaaaggcggcgccctcatggcagcgtatttaaaagtgctgccactgtttatcatggtcttcccgggtatggtcagcagaatcttattcccagatcaggtcgcctgcgcagaccctgagatctgccagaaaatttgctcaaaccccagcgggtgtagcgacattgcctatcccaagttagtccttgagcttctgcctaccgggctccggggccttatgatggctgtcatggtcgcagccctgatgtcatcactgactagtatcttcaatagcgcgtcaactatcttcactatggatctttggaatcatctgcgcccacgggccagtgaaaaggagcttatgatcgtggggagagtttttgtgctgctcttggtgttggtgagtatcttgtggatcccagtcgtgcaggcaagtcaaggcggccaactgttcatctatatccagtcgatcagcagctatctacaaccacccgtggctgtagttttcatcatggggtgcttctggaagcgtaccaacgagaagggggcattttgggggctaatctccggcctgctcctgggactcgtcaggctcgtgttggacttcatctacgtccagcctagatgcgaccaacccgacgagcgcccagtcctagtgaaaagtattcattatctctactttagcatgattctgagtactgtgaccctcataacagtctccacagtgtcctggtttacagaacctcctagtaaagagatggtgtcgcatctgacatggtttacccgacacgaccccgtagtccagaaggagcaagctcccccagccgctcccctcagccttaccctgagccaaaacgggatgccggaagcatccagtagcagctcagtccagtttgagatggttcaggaaaacacatccaaaacccactcctgtgacatgactcctaaacaatctaaggtggtcaaagctatcctgtggctgtgcggtatccaggagaaagggaaggaggagctgccagctcgagcagaagcaataattgtctccctggaggagaatcccctcgtgaagacgctgctggatgtgaacctcattttctgcgtttcttgtgcgatttttatttgggggtattttgcgtag

SEQ ID NO: 93141 - DNA, 1923 bp, Artificial Sequence
  derived and/or modified sequence
atggagagcggcaccagcagcccccagcccccccagctggaccccctggatgccttcccccagaagggcctggagcccggggacattgctgtgctggtgctgtacttcctgtttgtgctggccgtgggcctgtggagcacagtgaagaccaagagggacacagtgaagggctacttcctggccggcggggacatggtgtggtggcctgtgggcgccagcctgtttgccagcaatgtgggcagcggccacttcatcggcctggccggcagcggggccgccaccggcatctctgtgtctgcctatgagctgaatggcctcttctctgtgctgatgctggcctggatcttcctgcccatctacatcgccggccaggtggacatgtatgctggggccatcttcatccagcagagcctgcacctggacctgtacctggccatcgtgggcctgctggccatcacagctgtgtacacagtggccggcggcctggccgccgtcatctacacagatgccctgcagaccctcatcatgctgattggagccctgaccctgatgggctacagctttgctgctgtgggcggcatggagggcctgaaggagaagtacttcctggccctggccagcaacagaagtgagaacagcagctgtggcctgccccgggaggatgccttccacatcttccgggaccccctgaccagtgacctgccctggccaggagtgctgtttggcatgagcatccccagcctgtggtactggtgcacagaccaggtgattgtgcagaggaccctggccgccaagaacctgagccacgccaagggcggggccctgatggccgcctacctgaaggtgctgcccctcttcatcatggtgtttcctggcatggtgagccgcatcctcttcccagaccaggtggcctgtgccgaccctgagatctgccagaagatctgcagcaaccccagcggctgcagcgacatcgcctaccccaagctggtgctggagctgctgcccaccggcctgcggggcctgatgatggctgtgatggtggccgccctgatgagcagcctgaccagcatcttcaacagcgccagcaccatcttcaccatggacctgtggaaccacctgcggccccgggccagcgagaaggagctgatgattgtgggccgggtgtttgtgctgctgctggtgctggtgtccatcctgtggatccctgtggtgcaggccagccagggcggccagctgttcatctacatccagagcatcagcagctacctgcagccccctgtggccgtggtgttcatcatgggctgcttctggaagaggaccaatgaaaaaggagccttctggggcctcatcagcggcctgctgctgggcctggtgcggctggtgctggacttcatctacgtgcagccccgctgtgaccagccagatgagaggcctgtgctggtgaagagcatccactacctgtacttctccatgatcctgagcacagtgaccctcatcaccgtgtccacagtgtcctggttcacagagccccccagcaaggagatggtgagccacctgacctggttcaccaggcatgaccctgtggtgcagaaggagcaggcccctcctgctgcccccctgagcctgaccctgagccagaatggcatgcctgaggccagcagcagcagctctgtgcagtttgagatggtgcaggagaacaccagcaagacccacagctgtgacatgacccccaagcagagcaaggtggtgaaggccatcctgtggctgtgtggcatccaggagaagggcaaggaggagctgcctgcccgggcagaggccatcatcgtgtccctggaggagaaccccctggtgaagaccctgctggatgtgaacctgatcttctgtgtgtcctgtgccatcttcatctggggctactttgcctag

SEQ ID NO: 93142 - DNA, 1923 bp, Artificial Sequence
  derived and/or modified sequence
atggagagcggcaccagcagcccccagcccccccagctggaccccctagacgcattcccccaaaaagggctggagccaggcgacattgcggtgttggtgctatactttttattcgtcttggcggtgggtctgtggagcactgtgaaaacaaagcgtgacacagttaaaggctatttccttgccggcggagatatggtgtggtggcccgtcggagcctctctgttcgcctccaacgttgggagtggacacttcattgggttggcaggatctggcgctgctacagggatctccgtgtcagcatacgagttgaacggcttgttctccgtgctcatgctggcttggatcttcctccccatctacatcgcaggtcaggttgacatgtacgcgggagctatcttcattcagcaaagcctgcacttagacttatatctagccatagtggggctgctggcgatcaccgctgtgtataccgtggctggcggccttgctgcggttatctacacagatgccctgcagacactgattatgctgattggtgctttgacattgatggggtacagttttgcagctgttggtggcatggagggcttgaaggagaagtattttttggcacttgctagcaatcgctccgagaacagctcatgtgggctgccccgagaagatgccttccatatatttagagaccccctgacctcagatctgccttggccaggggtactgttcggtatgtcaattccctctctctggtattggtgtaccgaccaggtcatagtccagcgcactctcgctgctaagaatttatcacatgctaagggcggagcccttatggccgcatatctaaaagttttaccgctgtttataatggttttccccggtatggtaagccgaatcctgttccccgaccaggtcgcctgcgccgaccccgagatttgtcaaaagatctgttcaaaccctagcggttgctcagatatagcctatcctaaactggtgctggaacttctgcctaccggcctgaggggcctaatgatggccgttatggtcgctgcgctgatgagctccctgacgtccatctttaacagcgctagtaccatattcaccatggacctatggaatcaccttaggccacgcgcatcagaaaaggagttgatgattgtgggcagagtttttgtactgcttctcgtgctggtaagcatcttatggatccctgtcgtgcaagcatctcaggggggtcagctgttcatctacattcagagcatttctagttatctgcagccacccgtcgccgtcgtgtttatcatgggctgcttctggaaacgcaccaacgaaaaaggagccttttggggattgattagcggattgctgctgggactggtgagactcgtgttggactttatttacgtacagccccggtgtgatcagcccgacgagaggcctgtgttggtgaaatctatccactacctctatttttccatgatcctgagcactgtgacgctgattaccgtgtccaccgtatcatggttcactgagcccccttcaaaggagatggtcagtcacctcacatggtttacgagacacgaccctgtagtgcaaaaggagcaggccccccctgccgcccccctcagcctgactttgtctcagaacggcatgccagaggcgtccagctcaagcagcgtgcagttcgaaatggtacaggagaacacgagcaaaactcatagttgtgatatgacacccaagcagtctaaagttgtaaaagcgatcctctggctctgcggtattcaggaaaaaggaaaagaagaattacccgcccgagctgaagccatcatcgtcagtctcgaggagaatccactggttaaaacactgcttgacgtcaatctgatattctgtgtatcatgcgccattttcatttgggggtatttcgcatag

SEQ ID NO: 93143 - DNA, 1923 bp, Artificial Sequence
  derived and/or modified sequence
atggaaagtggtactagctctccccaaccaccacagctggaccccctcgacgctttccctcaaaagggtctggagcctggcgatattgccgtgctcgttctctactttcttttcgtactggctgtggggctgtggtccacagtgaagactaagcgcgatactgtcaaaggatacttcctcgccggaggcgatatggtgtggtggccagtaggcgcatctctcttcgccagtaatgttgggtccggtcacttcatcggcctcgctggatccggtgcagccacggggatttccgtgtccgcctatgagttaaacggcctgttcagtgtacttatgctcgcttggatcttcctccctatctatattgccggacaagttgatatgtacgctggggctatctttattcagcaaagtttgcacttggatctgtacttggccatcgtagggctccttgccattacagccgtgtatacggtggccggtgggttagccgcagtaatctacacagatgctctgcagacactgattatgctgatcggagccctgacactgatggggtacagttttgccgcagtcgggggaatggaagggttaaaagagaaatattttttagcgctcgccagtaatcggtctgaaaattcaagctgtgggttacctcgagaagatgcatttcatatcttcagggaccccctgacatccgatctgccctggcctggtgttctgttcggaatgtctatcccttccctttggtactggtgtaccgatcaagttatcgtccagcgtaccctggccgctaagaatctttcccacgccaagggaggtgcattgatggccgcttatctaaaggtgctgcctttgttcattatggtttttcctggcatggtttctagaatattatttccagatcaggtggcctgcgcagatccagaaatctgccaaaagatctgttcaaaccccagcggctgctccgacatcgcctatccaaagctggtgctcgaactgcttccaaccggtctcagagggcttatgatggctgtgatggtggcagctctgatgagttctttaacctctatttttaattctgcaagtactatttttaccatggacctttggaaccacctcagaccaagagcctcagagaaagagctaatgatcgtgggaagagtgttcgtcctgctgctagtgctcgtgtccatactctggattcctgtggttcaagctagccaaggtggacagcttttcatttacattcagagtatcagctcgtatctccagcctccagttgccgtagtgttcatcatgggatgtttttggaagagaaccaacgagaagggagctttttggggactaatctctggccttcttttgggcctcgtccgtcttgtacttgactttatttacgtgcagccgaggtgtgatcaacctgacgagagacctgtgctggtaaagagtattcactatctatacttctccatgattttatctacagtaaccctgatcacagtgtccaccgtctcgtggttcaccgaacccccttctaaagagatggtgtctcacctgacttggtttactaggcatgaccctgtggttcaaaaagaacaagctccacccgcagcgcctttgagtcttaccctctcacagaatgggatgcctgaggccagctcatcctccagcgtacagtttgagatggtccaggaaaacacatcaaagacacactcatgtgacatgactccgaagcagtccaaggtggtgaaagctattctgtggttgtgtggaatccaagaaaagggcaaggaagaactgccagccagggctgaagccattatcgtgtccctggaagagaatcccctggtaaaaacactccttgacgtgaatctgattttctgtgtatcctgtgctatctttatttggggatattttgcatag

SEQ ID NO: 93144 - DNA, 2263 bp, Artificial Sequence
  derived and/or modified sequence
gggacagtggaagactggctgaggctggagtttggagtttgacccgcttggaggctctctcagcagcgggcatataggaggaagggtcactgctgtctccggaagctcttggctgcaaagagagaggatcccgggtatctccctccttacaaccaccgccacctcctagtgccttagaagccactgacagcccccagggcaggtgagccctgcatctggaataaggatccagaggtctcgttcaggaccatggagagcggcaccagcagccctcagcctccacagttagatcccctggatgcgtttccccagaagggcttggagcctggggacatcgcggtgctagttctgtacttcctctttgtcctggctgttggactatggtccacagtgaagaccaaaagagacacagtgaaaggctacttcctggctggaggggacatggtgtggtggccagtgggtgcatccttgtttgccagcaatgttggaagtggacatttcattggcctggcagggtcaggtgctgctacgggcatttctgtatcagcttatgaacttaatggcttgttttctgtgctgatgttggcctggatcttcctacccatctacattgctggtcaggtagacatgtatgcaggtgccatcttcatccagcagtctttgcacctggatctgtacctggccatagttgggctactggccatcactgctgtatacacggttgctggtggcctggctgctgtgatctacacggatgccctgcagacgctgatcatgcttataggagcgctcaccttgatgggctacagttttgccgcggttggtgggatggaaggactgaaggagaagtacttcttggccctggctagcaaccggagtgagaacagcagctgcgggctgccccgggaagatgccttccatattttccgagatccgctgacatctgatctcccgtggccgggggtcctatttggaatgtccatcccatccctctggtactggtgcacggatcaggtgattgtccagcggactctggctgccaagaacctgtcccatgccaaaggaggtgctctgatggctgcatacctgaaggtgctgcccctcttcataatggtgttccctgggatggtcagccgcatcctcttcccagatcaagtggcctgtgcagatccagagatctgccagaagatctgcagcaacccctcaggctgttcggacatcgcgtatcccaaactcgtgctggaactcctgcccacagggctccgtgggctgatgatggctgtgatggtggcggctctcatgtcctccctcacctccatctttaacagtgccagcaccatcttcaccatggacctctggaatcacctccggcctcgggcatctgagaaggagctcatgattgtgggcagggtgtttgtgctgctgctggtcctggtctccatcctctggatccctgtggtccaggccagccagggcggccagctcttcatctatatccagtccatcagctcctacctgcagccgcctgtggcggtggtcttcatcatgggatgtttctggaagaggaccaatgaaaagggtgccttctggggcctgatctcgggcctgctcctgggcttggttaggctggtcctggactttatttacgtgcagcctcgatgcgaccagccagatgagcgcccggtcctggtgaagagcattcactacctctacttctccatgatcctgtccacggtcaccctcatcactgtctccaccgtgagctggttcacagagccaccctccaaggagatggtcagccacctgacctggtttactcgtcacgaccccgtggtccagaaggaacaagcaccaccagcagctcccttgtctcttaccctctctcagaacgggatgccagaggccagcagcagcagcagcgtccagttcgagatggttcaagaaaacacgtctaaaacccacagctgtgacatgaccccaaagcagtccaaagtggtgaaggccatcctgtggctctgtggaatacaggagaagggcaaggaagagctcccggccagagcagaagccatcatagtttccctggaagaaaaccccttggtgaagaccctcctggacgtcaacctcattttctgcgtgagctgcgccatctttatctggggctattttgcttagtgtggggtgaacccaggggtccaaactctgtttctcttcagtgctccatttttttaatgaaagaaaaaataataaagcttttgtttaccac

SEQ ID NO: 93145 - protein, 605 aa, Artificial Sequence
  derived and/or modified sequence
MESGTSSPQPPQLDPLDAFPQKGLEPGDIAVLVLYFLFVLAVGLWSTVKTKRDTVKGYFLAGGDMVWWPGLFSVLMLAWIFLPIYIAGQVDMYAGAIFIQQSLHLDLYLAIVGLLAITAVYTVAGGLAAVIYTDALQTLIMLIGALTLMGYSFAAVGGMEGLKEKYFLALASNRSENSSCGLPREDAFHIFRDPLTSDLPWPGVLFGMSIPSLWYWCTDQVIVQRTLAAKNLSHAKGGALMAAYLKVLPLFIMVFPGMVSRILFPDQVACADPEICQKICSNPSGCSDIAYPKLVLELLPTGLRGLMMAVMVAALMSSLTSIFNSASTIFTMDLWNHLRPRASEKELMIVGRVFVLLLVLVSILWIPVVQASQGGQLFIYIQSISSYLQPPVAVVFIMGCFWKRTNEKGAFWGLISGLLLGLVRLVLDFIYVQPRCDQPDERPVLVKSIHYLYFSMILSTVTLITVSTVSWFTEPPSKEMVSHLTWFTRHDPVVQKEQAPPAAPLSLTLSQNGMPEASSSSSVQFEMVQENTSKTHSCDMTPKQSKVVKAILWLCGIQEKGKEELPARAEAIIVSLEENPLVKTLLDVNLIFCVSCAIFIWGYFA

SEQ ID NO: 93146 - DNA, 1818 bp, Artificial Sequence
  derived and/or modified sequence
atggagagcggcaccagcagcccccagcccccccagctggaccccctggacgccttcccccagaagggcctggagcccggcgacatcgccgtgctggtgctgtacttcctgttcgtgctggccgtgggcctgtggagcaccgtgaagaccaagagagacaccgtgaagggctacttcctggccggcggcgacatggtgtggtggcccggcctgttcagcgtgctgatgctggcctggatcttcctgcccatctacatcgccggccaggtggacatgtacgccggcgccatcttcatccagcagagcctgcacctggacctgtacctggccatcgtgggcctgctggccatcaccgccgtgtacaccgtggccggcggcctggccgccgtgatctacaccgacgccctgcagaccctgatcatgctgatcggcgccctgaccctgatgggctacagcttcgccgccgtgggcggcatggagggcctgaaggagaagtacttcctggccctggccagcaacagaagcgagaacagcagctgcggcctgcccagagaggacgccttccacatcttcagagaccccctgaccagcgacctgccctggcccggcgtgctgttcggcatgagcatccccagcctgtggtactggtgcaccgaccaggtgatcgtgcagagaaccctggccgccaagaacctgagccacgccaagggcggcgccctgatggccgcctacctgaaggtgctgcccctgttcatcatggtgttccccggcatggtgagcagaatcctgttccccgaccaggtggcctgcgccgaccccgagatctgccagaagatctgcagcaaccccagcggctgcagcgacatcgcctaccccaagctggtgctggagctgctgcccaccggcctgagaggcctgatgatggccgtgatggtggccgccctgatgagcagcctgaccagcatcttcaacagcgccagcaccatcttcaccatggacctgtggaaccacctgagacccagagccagcgagaaggagctgatgatcgtgggcagagtgttcgtgctgctgctggtgctggtgagcatcctgtggatccccgtggtgcaggccagccagggcggccagctgttcatctacatccagagcatcagcagctacctgcagccccccgtggccgtggtgttcatcatgggctgcttctggaagagaaccaacgagaagggcgccttctggggcctgatcagcggcctgctgctgggcctggtgagactggtgctggacttcatctacgtgcagcccagatgcgaccagcccgacgagagacccgtgctggtgaagagcatccactacctgtacttcagcatgatcctgagcaccgtgaccctgatcaccgtgagcaccgtgagctggttcaccgagccccccagcaaggagatggtgagccacctgacctggttcaccagacacgaccccgtggtgcagaaggagcaggccccccccgccgcccccctgagcctgaccctgagccagaacggcatgcccgaggccagcagcagcagcagcgtgcagttcgagatggtgcaggagaacaccagcaagacccacagctgcgacatgacccccaagcagagcaaggtggtgaaggccatcctgtggctgtgcggcatccaggagaagggcaaggaggagctgcccgccagagccgaggccatcatcgtgagcctggaggagaaccccctggtgaagaccctgctggacgtgaacctgatcttctgcgtgagctgcgccatcttcatctggggctacttcgcctag

SEQ ID NO: 93147 - DNA, 1818 bp, Artificial Sequence
  derived and/or modified sequence
atggaatccggaacttcgtctccacagcctccacagttagaccccttggacgcttttccacaaaagggattggagcctggcgacatagcagttttagtcctgtattttctgttcgttctggccgtgggtctctggagtaccgtgaagacaaaacgggatacagttaaggggtatttcttggccggcggtgacatggtttggtggccagggctgttcagcgtgctgatgctagcttggatctttcttccgatctatattgcagggcaagttgatatgtatgccggagccatctttatccagcagtctctgcacctggatctttatcttgccatagtagggctgcttgctatcaccgccgtgtacacagtggctggtggcctggccgctgtaatatatacagacgcactgcagaccttgattatgttgataggagccctcacccttatgggttactccttcgcggctgtgggaggcatggagggtctgaaggagaaatacttcctagctctcgcatcaaatcggagcgaaaactcgtcttgtggacttccaagggaggacgccttccatatattccgcgatcctttaacttccgacttaccttggcccggtgtcctgtttggcatgagcattccctccctgtggtactggtgtacagatcaggtcattgtacagcgaactctggcagccaagaacctgagtcatgccaaggggggtgcactgatggccgcctatttaaaggtgttgcctctctttattatggtctttcctggaatggtctcaaggattctgttcccagaccaggtggcttgtgctgaccccgagatttgccagaagatttgctccaacccatcaggctgcagcgacatcgcctaccccaaattggtgttggagttgctgccaactggcctccgaggccttatgatggcagtaatggtcgcagcactcatgagcagtctgacaagtattttcaactcagcctctactatttttacaatggatctatggaatcatcttaggccaagagcctcagagaaagaactcatgatcgtggggcgcgtctttgtcctgctcctggtcttggtctccattctgtggattcctgtggtgcaagcttcacagggcggccagctgttcatttacattcaatcgatatcgtcataccttcagccccctgtagcagttgtgttcattatgggatgcttttggaagcgaactaacgaaaagggtgccttttgggggttgataagcgggctccttctgggcctggtcaggctggtgctggactttatttacgtacagccgcgctgcgaccagccagatgagagacctgtacttgtgaaatctatccattacttatatttctccatgatcctcagtacagttacgctgattaccgtgagcaccgtctcctggtttacggaacccccatcaaaggaaatggtgagccacctcacttggtttacaaggcatgatccagttgttcaaaaggagcaggctccacctgccgccccactgagcttgaccctgagccagaatgggatgcccgaagcttcttctagttctagcgtgcagtttgagatggtacaggaaaacacctcgaagacccacagctgtgacatgacgcctaaacagtccaaagtcgtgaaagcaatcctgtggctgtgcggcatccaagaaaagggaaaagaagaattgccggctagagccgaggctattatcgtgtcgctagaagagaatccccttgtgaagaccctgctggacgttaacctgatcttttgtgtgtcctgtgcaattttcatatgggggtactttgcctag

SEQ ID NO: 93148 - DNA, 1818 bp, Artificial Sequence
  derived and/or modified sequence
atggagagcggcaccagcagcccccagcccccccagctggaccccctggatgccttcccccagaagggcctggagcccggggacattgctgtgctggtgctgtacttcctgtttgtgctggccgtgggcctgtggagcacagtgaagaccaagagggacacagtgaagggctacttcctggccggcggggacatggtgtggtggccaggcctcttctctgtgctgatgctggcctggatcttcctgcccatctacatcgccggccaggtggacatgtatgctggggccatcttcatccagcagagcctgcacctggacctgtacctggccatcgtgggcctgctggccatcacagctgtgtacacagtggccggcggcctggccgctgtgatctacacagatgccctgcagaccctcatcatgctgattggagccctgaccctgatgggctacagctttgctgctgtgggcggcatggagggcctgaaggagaagtacttcctggccctggccagcaacagaagtgagaacagcagctgtggcctgcccagagaagatgccttccacatcttccgggaccccctgaccagtgacctgccctggccaggagtgctgtttggcatgagcatccccagcctgtggtactggtgcacagaccaggtgattgtgcagaggaccctggccgccaagaacctgagccacgccaagggcggggccctgatggccgcctacctgaaggtgctgcccctcttcatcatggtgtttcctggcatggtgagccgcatcctcttcccagaccaggtggcctgtgccgaccctgagatctgccagaagatctgcagcaaccccagcggctgcagcgacatcgcctaccccaagctggtgctggagctgctgcccaccggcctgcggggcctgatgatggctgtgatggtggccgccctgatgagcagcctgaccagcatcttcaacagcgccagcaccatcttcaccatggacctgtggaaccacctgcggccccgggccagcgagaaggagctgatgattgtgggccgggtgtttgtgctgctgctggtgctggtgtccatcctgtggatccctgtggtgcaggccagccagggcggccagctgttcatctacatccagagcatcagcagctacctgcagccccctgtggccgtggtgttcatcatgggctgcttctggaagaggaccaatgagaagggggccttctggggcctcatcagcggcctgctgctgggcctggtgcggctggtgctggacttcatctacgtgcagccccgctgtgaccagccagatgagaggcctgtgctggtgaagagcatccactacctgtacttctccatgatcctgagcacagtgaccctcatcaccgtgtccacagtgtcctggttcacagagccccccagcaaggagatggtgagccacctgacctggttcaccaggcatgaccctgtggtgcagaaggagcaggcccccccagctgcccccctgagcctgaccctgagccagaatggcatgcctgaggccagcagcagcagctctgtgcagtttgagatggtgcaggagaacaccagcaagacccacagctgtgacatgacccccaagcagagcaaggtggtgaaggccatcctgtggctgtgtggcatccaggagaagggcaaggaggagctgcctgcccgggcagaggccatcatcgtgtccctggaggagaaccccctggtgaagaccctgctggatgtgaacctgatcttctgtgtgtcctgtgccatcttcatctggggctactttgcctag

SEQ ID NO: 93149 - DNA, 1818 bp, Artificial Sequence
  derived and/or modified sequence
atggagagcggcaccagcagcccccagcccccccagctggaccccctagacgcattcccacaaaaaggtctagagccaggggatatcgcagtcttagtgctctatttcttgtttgttctagccgtaggtctgtggtctactgtgaaaaccaaacgggatacggttaagggctactttctcgccgggggagatatggtttggtggccaggtctgtttagtgttttaatgctggcttggatctttttgccaatatacatcgctggacaagttgatatgtatgccggagccatcttcatccagcaatccctacaccttgacctctatcttgccatcgtcggactcttagcgatcaccgctgtttacactgtagccggaggactggcggctgtcatttacacagacgccttgcagaccctgattatgttaatcggggctctgactctgatggggtactcatttgcggcagtgggaggcatggagggcctcaaggaaaagtatttcttagccctcgccagcaatagatccgagaattcatcttgtggcctgcctcgggaggacgcgttccacattttcagagatcctctgacatccgacctgccatggcccggtgtcctgtttggcatgtctatacccagcctctggtattggtgtactgatcaggtcatagtgcagcgcaccctggccgccaaaaacctcagccatgctaagggcggggccctgatggccgcctatcttaaagttctgccactgtttataatggtgttccctggaatggtgagtcgcatcttgttccctgaccaggtggcatgcgccgaccccgagatctgccagaagatttgctccaatccttccggatgttcagatatcgcttatcccaaactggtgcttgaactgttgcctactggactgcggggattgatgatggccgtcatggtcgccgctcttatgtcctccctcacttcaatctttaactccgcctctactatttttacaatggacctgtggaaccatctccgtccaagagcctccgagaaagaactgatgattgtaggaagggtctttgtgcttctgctggtcttagtgtcgatcctgtggattccagttgtgcaggcttcgcagggcggccaattgttcatctatatacagagtatctccagctaccttcaaccgcccgtggccgtagtgtttataatgggctgcttttggaaacggacaaatgaaaagggggctttctgggggctcatctcaggcttgttactgggcctggtacgactggtgctggattttatttacgtgcaacccagatgtgatcaacccgacgaaagacccgtgctcgtaaaaagtatccattacttgtacttcagcatgatactcagcacagtaaccctgattacagtctcgacagtctcatggttcacggagcctccttctaaggagatggtcagccatctcacctggttcacaaggcacgacccagttgtgcagaaagagcaggctccaccagctgccccactcagtctcaccttgagccagaatggtatgcccgaagcgtctagctcttcatctgtgcagttcgaaatggttcaggaaaatacctcaaagacacattcgtgtgacatgactccaaagcaaagcaaagtggtcaaggcgattctgtggctgtgcggaatccaagagaaaggtaaggaggagctgccagcacgggctgaggcgattatcgtctccctcgaagaaaatcctttggttaagacactgctggatgtcaacctgatcttctgcgtctcatgcgcaatcttcatctgggggtactttgcctag

SEQ ID NO: 93150 - DNA, 1818 bp, Artificial Sequence
  derived and/or modified sequence
atggagagtggaacgagttccccccagcctccgcagctggacccacttgatgccttcccacagaaaggcctggagcctggtgatattgcagtgctcgtgctatatttcctgttcgtcctggcagtgggcctgtggtccacagtgaagacaaaacgagatacagtgaaagggtatttccttgctggcggagacatggtctggtggccgggtctcttctctgtgctcatgctggcatggattttcctgccgatatatatcgctggtcaggtagacatgtatgcgggagcaatcttcatccaacagagtttgcacctggatctttatctagccatagtgggtctacttgcaattacagccgtgtatacggtcgcgggagggctggctgcagtcatctatactgatgccctccaaactttgattatgcttatcggcgcactgaccctgatggggtattccttcgctgctgttggtggcatggaggggctgaaggagaagtattttttggcgctcgcatctaaccgcagtgagaattcttcctgtggtcttccaagagaggatgccttccacattttccgcgatcccttgacaagcgatctaccctggccaggggtgctgtttggaatgtctatacccagcctgtggtactggtgtacggaccaggtgatagtccagcggacgctcgccgctaagaacctgtcgcatgccaaaggtggcgcattgatggcagcctacttgaaggtgttgcccctcttcattatggtgttcccagggatggtcagtcggattttgtttccagaccaggtagcatgcgctgaccccgagatatgccagaagatatgtagtaatccaagcggttgtagcgatatcgcttacccaaaactcgtgctcgagctgttacccactggattaaggggcctgatgatggcggttatggtggccgctctgatgagttctctgacatccatctttaacagtgcctccacaatcttcaccatggacctgtggaaccacctgagaccgagggcgagcgaaaaagagctgatgattgtaggaagagtcttcgtgctactgctggtgctggtcagcatactctggatccccgtcgtccaggcgtcgcagggcggacaactgttcatttacatccagagtatcagctcttaccttcaaccaccagttgccgtggttttcattatgggctgcttttggaaaaggacgaacgaaaagggtgcgttctggggacttatctctggactgctcctcggcctggtacgccttgtgctggacttcatctatgtgcaacccaggtgcgaccaaccggacgagaggccagttcttgtgaagagtatccactacctgtattttagtatgatcctctcaacagtgacgctcataaccgtgtcaacagtcagctggtttactgagccgccttcaaaggaaatggtatcccatctgacatggtttaccagacacgaccctgtggtacaaaaagaacaagctcccccagccgctcctttgagtttgaccctgagtcagaacggcatgcccgaagcctcctcgtcctcttctgtacagttcgagatggtccaggaaaacacaagcaagacccactcttgcgacatgacacctaaacagtcaaaagtcgttaaggccatcttgtggttatgcggtatacaggagaagggaaaggaggagctacccgctcgcgcagaggccatcatcgtgagcctcgaagagaatcctctcgtgaaaaccctgctcgacgtgaacctgattttctgtgtaagctgtgctatcttcatctgggggtattttgcctag

SEQ ID NO: 93151 - DNA, 2156 bp, Artificial Sequence
  derived and/or modified sequence
gggacagtggaagactggctgaggctggagtttggagtttgacccgcttggaggctctctcagcagcgggcatataggaggaagggtcactgctgtctccggaagctcttggctgcaaagagagaggatcccgggtatctccctccttacaaccaccgccacctcctagtgccttagaagccactgacagcccccagggcaggtgagccctgcatctggaataaggatccagaggtctcgttcaggaccatggagagcggcaccagcagccctcagcctccacagttagatcccctggatgcgtttccccagaagggcttggagcctggggacatcgcggtgctagttctgtacttcctctttgtcctggctgttggactatggtccacagtgaagaccaaaagagacacagtgaaaggctacttcctggctggaggggacatggtgtggtggccaggcttgttttctgtgctgatgttggcctggatcttcctacccatctacattgctggtcaggtagacatgtatgcaggtgccatcttcatccagcagtctttgcacctggatctgtacctggccatagttgggctactggccatcactgctgtatacacggttgctggtggcctggctgctgtgatctacacggatgccctgcagacgctgatcatgcttataggagcgctcaccttgatgggctacagttttgccgcggttggtgggatggaaggactgaaggagaagtacttcttggccctggctagcaaccggagtgagaacagcagctgcgggctgccccgggaagatgccttccatattttccgagatccgctgacatctgatctcccgtggccgggggtcctatttggaatgtccatcccatccctctggtactggtgcacggatcaggtgattgtccagcggactctggctgccaagaacctgtcccatgccaaaggaggtgctctgatggctgcatacctgaaggtgctgcccctcttcataatggtgttccctgggatggtcagccgcatcctcttcccagatcaagtggcctgtgcagatccagagatctgccagaagatctgcagcaacccctcaggctgttcggacatcgcgtatcccaaactcgtgctggaactcctgcccacagggctccgtgggctgatgatggctgtgatggtggcggctctcatgtcctccctcacctccatctttaacagtgccagcaccatcttcaccatggacctctggaatcacctccggcctcgggcatctgagaaggagctcatgattgtgggcagggtgtttgtgctgctgctggtcctggtctccatcctctggatccctgtggtccaggccagccagggcggccagctcttcatctatatccagtccatcagctcctacctgcagccgcctgtggcggtggtcttcatcatgggatgtttctggaagaggaccaatgaaaagggtgccttctggggcctgatctcgggcctgctcctgggcttggttaggctggtcctggactttatttacgtgcagcctcgatgcgaccagccagatgagcgcccggtcctggtgaagagcattcactacctctacttctccatgatcctgtccacggtcaccctcatcactgtctccaccgtgagctggttcacagagccaccctccaaggagatggtcagccacctgacctggtttactcgtcacgaccccgtggtccagaaggaacaagcaccaccagcagctcccttgtctcttaccctctctcagaacgggatgccagaggccagcagcagcagcagcgtccagttcgagatggttcaagaaaacacgtctaaaacccacagctgtgacatgaccccaaagcagtccaaagtggtgaaggccatcctgtggctctgtggaatacaggagaagggcaaggaagagctcccggccagagcagaagccatcatagtttccctggaagaaaaccccttggtgaagaccctcctggacgtcaacctcattttctgcgtgagctgcgccatctttatctggggctattttgcttagtgtggggtgaacccaggggtccaaactctgtttctcttcagtgctccatttttttaatgaaagaaaaaataataaagcttttgtttacc

SEQ ID NO: 93152 - DNA, 1836 bp, Artificial Sequence
  derived and/or modified sequence
atggtgtggtggcccgtgggcgccagcctgttcgccagcaacgtgggcagcggccacttcatcggcctggccggcagcggcgccgccaccggcatcagcgtgagcgcctacgagctgaacggcctgttcagcgtgctgatgctggcctggatcttcctgcccatctacatcgccggccaggtgaccaccatgcccgagtacctgagaaagagattcggcggcatcagaatccccatcatcctggccgtgctgtacctgttcatctacatcttcaccaagatcagcgtggacatgtacgccggcgccatcttcatccagcagagcctgcacctggacctgtacctggccatcgtgggcctgctggccatcaccgccgtgtacaccgtggccggcggcctggccgccgtgatctacaccgacgccctgcagaccctgatcatgctgatcggcgccctgaccctgatgggctacagcttcgccgccgtgggcggcatggagggcctgaaggagaagtacttcctggccctggccagcaacagaagcgagaacagcagctgcggcctgcccagagaggacgccttccacatcttcagagaccccctgaccagcgacctgccctggcccggcgtgctgttcggcatgagcatccccagcctgtggtactggtgcaccgaccaggtgatcgtgcagagaaccctggccgccaagaacctgagccacgccaagggcggcgccctgatggccgcctacctgaaggtgctgcccctgttcatcatggtgttccccggcatggtgagcagaatcctgttccccgaccaggtggcctgcgccgaccccgagatctgccagaagatctgcagcaaccccagcggctgcagcgacatcgcctaccccaagctggtgctggagctgctgcccaccggcctgagaggcctgatgatggccgtgatggtggccgccctgatgagcagcctgaccagcatcttcaacagcgccagcaccatcttcaccatggacctgtggaaccacctgagacccagagccagcgagaaggagctgatgatcgtgggcagagtgttcgtgctgctgctggtgctggtgagcatcctgtggatccccgtggtgcaggccagccagggcggccagctgttcatctacatccagagcatcagcagctacctgcagccccccgtggccgtggtgttcatcatgggctgcttctggaagagaaccaacgagaagggcgccttctggggcctgatcagcggcctgctgctgggcctggtgagactggtgctggacttcatctacgtgcagcccagatgcgaccagcccgacgagagacccgtgctggtgaagagcatccactacctgtacttcagcatgatcctgagcaccgtgaccctgatcaccgtgagcaccgtgagctggttcaccgagccccccagcaaggagatggtgagccacctgacctggttcaccagacacgaccccgtggtgcagaaggagcaggccccccccgccgcccccctgagcctgaccctgagccagaacggcatgcccgaggccagcagcagcagcagcgtgcagttcgagatggtgcaggagaacaccagcaagacccacagctgcgacatgacccccaagcagagcaaggtggtgaaggccatcctgtggctgtgcggcatccaggagaagggcaaggaggagctgcccgccagagccgaggccatcatcgtgagcctggaggagaaccccctggtgaagaccctgctggacgtgaacctgatcttctgcgtgagctgcgccatcttcatctggggctacttcgcctag

SEQ ID NO: 93153 - DNA, 1836 bp, Artificial Sequence
  derived and/or modified sequence
atggtctggtggcccgtcggcgcgtcccttttcgcctccaatgtggggtccggccacttcattgggctggctgggagtggagccgctaccggaatcagcgtctccgcctatgaattgaatgggctgtttagcgtgcttatgctcgcctggatcttcctgccaatttacatcgccgggcaagtgacaactatgcctgagtatctgaggaagcgcttcggcggcatccggatacccattatcctggccgtcctgtacctctttatttatatttttacaaaaatcagtgtcgatatgtatgcaggcgccatctttatccaacagtcactgcacctcgatctgtacctggccatcgtgggactgttagcaattacggcggtttacaccgtggccggaggccttgcggcagtgatctatacagatgccctacagactttaatcatgttgatcggcgctctcacactgatgggctacagttttgcagctgttggtgggatggaggggctgaaagagaagtacttcctcgcattagcttcaaataggagtgagaactccagttgtggtcttcctagagaagatgcatttcacatattcagagaccctctcactagcgatctcccatggcccggtgtactgtttggcatgagcatccctagcctttggtactggtgcaccgaccaggtcatagtgcaaaggacactcgccgccaagaacttgagccacgctaaagggggtgcccttatggcagcctatctgaaggtgctacctctgtttatcatggtctttccgggaatggtgtctcggattctcttccccgaccaagtggcgtgcgcagatccagagatttgccagaaaatttgcagcaacccgtccggctgctccgatatcgcctacccaaaactcgtgctggaactgctgcccactggcctgcgtggcctgatgatggccgttatggtggcagccttgatgagctctctcaccagtatttttaatagtgcttccaccattttcaccatggacctgtggaaccatttacgtcctagagccagcgaaaaggagctgatgattgtgggaagagtgtttgttcttctgctggtgctggtatcaatcctgtggataccggtggtccaggcaagtcaaggtggacagctgttcatctacatccaaagcataagcagctacctgcaacctccagtggcggtagtgttcattatgggttgcttctggaaaagaacaaatgagaagggcgcgttttggggtctgattagcggtctccttctggggctagtccggctggtcctagactttatctacgtgcagccccgatgcgatcaaccggatgaacgtcctgtgctcgtcaaaagcatccactacctatatttctccatgatcctctcaaccgtgacactgatcaccgtatcgacggttagttggtttacggaaccgccttccaaggaaatggtctcacacctgacctggtttaccagacacgatccagttgttcagaaggagcaggcaccacccgcggcacctctgtccctgactctgtcccaaaatggtatgcctgaggcctcatctagcagcagcgtccagttcgagatggtgcaggaaaataccagtaagactcactcttgtgacatgactccaaagcagtccaaagtggtcaaagctattctttggctgtgcggaatccaagagaaaggcaaagaggaactgcccgcaagggcggaggccataatcgttagccttgaagaaaacccactggtcaaaactttattggatgtgaacctgatcttctgtgtttcctgtgctatcttcatttgggggtactttgcttag

SEQ ID NO: 93154 - DNA, 1836 bp, Artificial Sequence
  derived and/or modified sequence
atggtttggtggccggtcggggcatccttgtttgcatctaacgtgggtagtggccactttattggcctagccgggtccggagcggccaccggcattagcgtgtccgcctacgaacttaacgggctctttagtgtgctcatgcttgcatggatttttctgcctatctatatcgccggacaggttaccactatgccggagtaccttagaaagcggttcggtggaatccgtattccaattatcctcgctgtgctgtacctgttcatttatatattcaccaagattagcgtagacatgtacgccggggctatctttattcagcagagcctccatttggatttgtacctggctatagtgggcctgctagcaatcacagcagtttataccgtcgcaggcggactagcggctgttatatatacggatgcactccagaccctcataatgctgattggggctctgaccctaatgggctattccttcgctgccgtggggggcatggaaggtttaaaggaaaaatactttctcgcactcgcctccaacaggagcgagaatagtagctgcggcctcccgcgggaagatgccttccatattttcagagaccccctcacatctgatctaccgtggcctggtgtcctcttcggaatgagtatcccctccctgtggtactggtgtacggatcaggtgatcgtgcagagaactctggccgctaagaacctgtctcacgctaagggaggggcactaatggcagcttatcttaaagtgctccctctttttattatggtctttccggggatggtgtcacgcattctgttcccagatcaggtcgcttgcgccgatcctgagatttgccagaagatttgtagtaatccttccggctgttctgacattgcatatcctaagctcgtcttagagttacttcccacgggacttcgaggactcatgatggcggtgatggtggcagcgctgatgtcaagcctgacatcaattttcaattcagcttcaacgatttttacgatggatctctggaatcacctgagacctagagcttctgagaaggaactaatgattgtgggcagggtttttgtgcttctgctcgtattggtgagtatcctgtggatccccgttgtccaggcatcccagggcggtcaactgttcatttatatacaatccatcagcagctacctgcagccccccgttgccgtcgtgtttataatgggatgcttctggaagcgcaccaacgagaaaggggcgttttggggcctgattagcgggcttctattgggcttggtgcggctggtgctagacttcatctacgttcaaccacgctgcgatcaacctgacgaacggcccgtattggtaaaatctatacactacctgtactttagcatgatcttatcaaccgtgacactgatcactgtgtcaaccgtctcctggtttactgaaccaccgtctaaagaaatggtgagccatttaacatggtttacgaggcacgatccagtagtgcagaaagaacaggccccaccagctgcccccttgtcgcttaccttgtcgcagaatggaatgcctgaagcttcaagttcatcgtccgtacagtttgagatggtgcaggagaacaccagcaagacccacagttgtgacatgacccctaaacagtccaaggtcgtcaaggccatcctgtggctttgcggcatccaggagaaggggaaagaggaattgccagcacgggccgaagcaatcattgtttcccttgaagagaaccctctcgtaaaaacactgctggatgtgaaccttattttctgcgtctcctgcgccatctttatctgggggtactttgcttag

SEQ ID NO: 93155 - DNA, 1836 bp, Artificial Sequence
  derived and/or modified sequence
atggtgtggtggcctgtgggcgccagcctgtttgccagcaatgtgggcagcggccacttcatcggcctggccggcagcggggccgccaccggcatctctgtgtctgcctatgagctgaatggcctcttctctgtgctgatgctggcctggatcttcctgcccatctacatcgccggccaggtgaccaccatgcctgagtacctgaggaagagatttggaggcatccgcatccccatcatcctggccgtgctgtacctgttcatctacatcttcaccaagatctctgtggacatgtatgctggggccatcttcatccagcagagcctgcacctggacctgtacctggccatcgtgggcctgctggccatcacagctgtgtacacagtggccggcggcctggccgctgtgatctacacagatgccctgcagaccctcatcatgctgattggagccctgaccctgatgggctacagctttgctgctgtgggcggcatggagggcctgaaggagaagtacttcctggccctggccagcaacagaagtgagaacagcagctgtggcctgcccagagaagatgccttccacatcttccgggaccccctgaccagtgacctgccctggccaggagtgctgtttggcatgagcatccccagcctgtggtactggtgcacagaccaggtgattgtgcagaggaccctggccgccaagaacctgagccacgccaagggcggggccctgatggccgcctacctgaaggtgctgcccctcttcatcatggtgtttcctggcatggtgagccgcatcctcttcccagaccaggtggcctgtgccgaccctgagatctgccagaagatctgcagcaaccccagcggctgcagcgacatcgcctaccccaagctggtgctggagctgctgcccaccggcctgcggggcctgatgatggctgtgatggtggccgccctgatgagcagcctgaccagcatcttcaacagcgccagcaccatcttcaccatggacctgtggaaccacctgcggccccgggccagcgagaaggagctgatgattgtgggccgggtgtttgtgctgctgctggtgctggtgtccatcctgtggatccctgtggtgcaggccagccagggcggccagctgttcatctacatccagagcatcagcagctacctgcagccccctgtggccgtggtgttcatcatgggctgcttctggaagaggaccaatgagaagggggccttctggggcctcatcagcggcctgctgctgggcctggtgcggctggtgctggacttcatctacgtgcagccccgctgtgaccagccagatgagaggcctgtgctggtgaagagcatccactacctgtacttctccatgatcctgagcacagtgaccctcatcaccgtgtccacagtgtcctggttcacagagccccccagcaaggagatggtgagccacctgacctggttcaccaggcatgaccctgtggtgcagaaggagcaggcccccccagctgcccccctgagcctgaccctgagccagaatggcatgcctgaggccagcagcagcagctctgtgcagtttgagatggtgcaggagaacaccagcaagacccacagctgtgacatgacccccaagcagagcaaggtggtgaaggccatcctgtggctgtgtggcatccaggagaagggcaaggaggagctgcctgcccgggcagaggccatcatcgtgtccctggaggagaaccccctggtgaagaccctgctggatgtgaacctgatcttctgtgtgtcctgtgccatcttcatctggggctactttgcctag

SEQ ID NO: 93156 - DNA, 1836 bp, Artificial Sequence
  derived and/or modified sequence
atggtgtggtggcccgtgggcgccagcctgttcgccagcaacgtgggtagtggacactttatcgggttagcgggctctggggcagcaaccggcatatccgtgtcagcctatgagttgaatggcttgtttagtgtgctgatgctggcgtggattttcctgccaatctatattgctgggcaggtgactacaatgcccgagtacttgcgcaagcggtttggaggcatccggatccccataatcctggccgtgctgtatctcttcatctatattttcacaaagatcagcgttgacatgtacgcaggagctatctttatccaacagagcttgcacttggatttgtatttagccattgttggtctgttggcaatcacggctgtgtacactgtcgctggggggctggcagccgtcatctatactgatgctctccagacgctaatcatgctcatcggagcactcactctgatgggctatagtttcgccgctgtgggaggtatggagggattgaaagagaagtactttctggcccttgccagtaataggtcagagaacagttcttgcgggctgcctcgtgaagacgcattccacatctttcgcgaccctctcacctcggatcttccttggccaggggtgctcttcggaatgtcaattccttccctgtggtactggtgcactgaccaggtgatcgttcaaaggacgctggctgctaagaatttgtcccacgccaaagggggggccctgatggctgcctacctgaaggtgcttcccctgttcatcatggtctttcctggcatggtatctcgaatactgtttccagaccaagttgcctgcgcggatccagagatctgtcaaaagatatgcagcaatccctcgggatgttcagacatagcttatcccaagctagtgttagagctattgcccacaggcttgaggggcctgatgatggcagtgatggtggccgctctgatgtccagtctaacttctatcttcaactccgcatccacaatttttactatggacctgtggaatcacttaaggcccagagcctccgagaaagagctcatgattgtgggtagggtctttgtcctgcttcttgtcctggtcagcattctttggatccccgtggtgcaggcttcccaaggcggacaactgttcatttatatccagagtatttcatcctacctgcagccacctgtggctgtcgtgttcattatggggtgtttctggaaacggactaatgaaaagggggcattttggggactcatcagcggactgttactcgggttggtgaggctggtactggacttcatctacgtacaacctaggtgtgatcaacccgacgaacgaccagtgcttgtgaaaagtatccactacctgtacttttctatgatactgtcaacagtgacactgattacagttagtacagtgagctggtttactgagccgccaagtaaagaaatggttagccatttaacctggttcactagacacgacccagtagttcagaaagagcaggcccctccagccgcacctcttagtctgacactcagccagaatggaatgccggaagcgtcaagcagcagttcagtccagttcgaaatggtgcaggaaaatacttcaaagactcattcttgtgatatgactccaaagcaatcgaaagtggtgaaggcaatcctatggctgtgtggcatccaggagaaggggaaagaagagttgcctgcaagggcagaggccatcattgtgagcctcgaggaaaatccgctcgtgaagactctcctggatgtaaatttgatattctgcgtgtcctgtgcaatctttatttgggggtatttcgcctag

SEQ ID NO: 93157 - DNA, 1836 bp, Artificial Sequence
  derived and/or modified sequence
atggtgtggtggcccgtgggcgccagcctgttcgccagcaacgtgggctccgggcatttcattgggctagccgggtccggagctgccaccggaatttcagtctccgcttacgagttgaatggactattttcagtgttgatgttggcgtggatcttcttgcctatttatatcgcaggccaggttactacaatgcccgagtacctccgcaagagattcggcggaatacgaataccaattatcctcgctgtcctgtacctttttatttacattttcacgaagatctctgtggacatgtacgctggtgcaatcttcattcagcagtcccttcacctagatctgtacctggccatagtaggactgttagctattacagctgtgtacacggtagccggcggcctggccgcagtgatatacaccgatgccctgcagacactcataatgcttatcggtgccctgaccctgatgggttacagttttgccgccgtcggaggaatggagggcctgaaggagaagtacttcctcgcacttgcctccaaccggtcggagaattcatcgtgtggactccctcgcgaagatgcgttccatatttttcgcgacccgttgacgtctgatttaccatggcctggagtgttgtttggcatgtccataccatccctctggtattggtgtactgatcaggtgattgtgcaaagaaccttagcagcaaaaaatctaagccacgcgaaagggggggcactgatggcagcttatctgaaggtgctgccgttgttcatcatggtattccctggcatggtctccaggatcctcttccctgatcaagtcgcatgcgccgatccagagatttgtcaaaagatctgctccaatccatccggctgtagcgacattgcatatcccaagctagttctcgaactgttgccgactgggttgcgcggattaatgatggccgtgatggtagccgcgttaatgtcctccttaactagtatttttaattctgcgagcaccattttcactatggatctctggaatcaccttaggccacgggccagtgaaaaggaactcatgattgtcggacgggtctttgtgctcttattggtactggtctctatcttatggatcccggtggttcaggcaagtcaggggggacagctattcatctatattcagtccatctcctcctatttgcagcctcccgtggccgtggtctttatcatgggttgtttttggaagcggaccaatgaaaaaggagcattctggggtctgatcagcggcttgctcctcgggctcgtgagactagttttagacttcatctacgttcagccccgatgcgatcagccggatgagagaccagtgttggtaaagagtatccactacctgtacttttcaatgattctgtctacagtgacactgatcacagtgtccacagtaagctggtttacggaacctccttcaaaggagatggtctctcacttgacttggttcacaaggcatgaccccgtggttcagaaagaacaggctcctccagcggcacctctctcattgacgctatcacagaacggcatgcctgaagcatcctccagctcttctgtccagttcgagatggttcaggagaataccagcaagactcattcatgtgatatgacaccgaaacagagtaaggtggtgaaggccattctttggctgtgtggcattcaggagaaggggaaggaagagctcccagccagagctgaggcaattatagttagtctcgaggagaaccccctggtcaagacgctgcttgacgtgaacttgatcttctgcgtttcctgcgctatcttcatctggggatacttcgcctag

SEQ ID NO: 93158 - DNA, 1836 bp, Artificial Sequence
  derived and/or modified sequence
atggtgtggtggccggttggggctagcctgttcgcttcaaacgtgggcagtgggcatttcatcggtcttgctggctccggtgctgccaccggcatttccgtgagcgcttatgagctcaatggactgtttagtgtgctaatgctcgcgtggatcttcctacccatctacatcgccggacaagtgactaccatgccagaatatcttaggaagcggtttggcggaatcaggatcccaataatccttgccgtgctctacctcttcatttatatttttaccaagatctctgtagacatgtatgccggtgcaattttcatacagcagagtctgcacctcgacttgtacttagctatcgtgggattgctggctattacagcagtctacacagtcgccggaggactggctgccgtgatttataccgacgccctccaaactctgatcatgttgatcggcgctctcaccttgatggggtacagctttgctgctgttggcggaatggaggggctgaaggaaaagtatttcctggccctggcttcgaaccgttcagagaattccagttgcgggttgcccagagaagacgcctttcacatcttcagggatccgctaacctcagatttaccttggccaggcgtcctatttggcatgtctatccctagtctctggtactggtgcactgatcaggtaatagtccagaggacactcgccgcaaagaatctctcccatgctaaaggcggtgccttgatggcagcttatctcaaggtcctgcctctgtttataatggtctttcccggtatggtaagcagaatactatttccagaccaggtggcttgcgcagatccagagatttgtcaaaagatttgtagcaacccgtcagggtgttcagatattgcctacccgaaattagtcctggagcttttgccgacaggtcttcggggactaatgatggcagtgatggtagcagccctaatgagcagcttgactagcattttcaatagcgcttcgactatcttcactatggacctttggaatcacctgaggcctagggccagtgagaaggagctgatgatcgtcggacgcgttttcgtgctgctccttgttttagttagtatcctgtggattccggtggttcaggctagccagggagggcagctgtttatttatatacagtcaatttcttcctacctccagccccctgtcgcagtcgtatttatcatgggatgcttttggaagcggaccaacgaaaagggcgctttttggggcctgatctcaggcctcttgctgggcctggtgcggttggtactcgatttcatctacgtacagcccaggtgcgatcagcctgacgaacgtccggtgctggtgaaaagcatccactacttatattttagtatgatccttagcactgtaactctaattaccgtgtcaaccgtgtcttggtttacagaaccgcctagcaaggaaatggtttcccacctgacttggttcacacgccacgatcccgtggtccagaaggaacaagcgccacccgcagcacctctctcactcaccctgtcccagaacgggatgccagaggcttcttcatcaagcagcgtccaattcgaaatggttcaagagaacacctccaagacccacagctgtgacatgactcccaaacagagtaaggtcgttaaggccatactgtggctatgcggcattcaggaaaagggtaaagaagaattaccggctcgtgctgaagctattattgtgtccctagaagaaaacccgctagtcaaaacccttctggatgttaatctgatattttgcgtgagttgcgccatcttcatctggggctattttgcatag

SEQ ID NO: 93159 - DNA, 1836 bp, Artificial Sequence
  derived and/or modified sequence
atggtgtggtggccagtgggggctagcctcttcgcaagtaacgtggggtcaggacattttattggactggccggaagtggggctgccacgggcataagcgtatccgcatacgagctcaacggactcttctccgtcctcatgcttgcttggattttcttgccgatatatattgcagggcaagtcactaccatgcccgagtacctccgcaaacgctttggcggaatacgcattcccattattctggctgtgctatatttgttcatttatattttcaccaaaatcagtgtggatatgtacgctggggctatatttatccagcagagcttgcacctagacctttacttggccattgtcggcttactcgctatcaccgccgtgtacaccgtggccggagggttggcggctgtcatctataccgatgctttgcagaccctgatcatgctgattggggctcttacactgatgggctattccttcgccgcagtgggtggcatggaaggactgaaagagaaatactttcttgccctcgcatccaaccggtccgaaaactcatcctgcggcctccctcgtgaggacgcatttcatattttcagagaccctctcacaagcgatttgccctggcctggggtacttttcggcatgagtattccatccctctggtattggtgcactgatcaggttattgtgcagcgcaccctggcggcaaaaaatctgagccatgcaaaggggggtgccctaatggcggcttacttaaaggtactgcctctgttcattatggttttcccgggtatggtctcacgaatcctgttccccgatcaggttgcttgcgcagaccccgaaatttgccagaaaatctgcagcaatcctagcgggtgcagcgacatcgcctatccgaaactggtgctggagttactgcccacagggttacgcggtcttatgatggcggtcatggtagctgccctcatgagttctttgacctctattttcaatagcgcctccaccatttttacaatggacctgtggaaccatcttagacctagggcgtctgagaaggaactgatgatagtaggtagggttttcgtccttctgctcgtgctcgtaagcatcctctggattcctgtggtacaggcctcacagggcggacagctgtttatttacatccagtcgatatcgtcctacctccagcctccagttgcagtggtcttcataatgggatgcttctggaaacgtacaaatgagaaaggcgcattctgggggctcattagcggactgctgctgggactggtgcggcttgttctggacttcatctacgtgcaacccagatgcgatcagcctgacgagcggcctgtgctcgtgaagtctatacactacctttacttcagtatgatcttgagcacagtgacactgatcacagtcagtacagtgtcttggtttaccgagccccctagtaaggagatggtttcccacctgacctggtttacacgtcatgaccctgtggtgcagaaagaacaggcacctcctgcagcaccactgagcctaacactgtcacagaacggaatgccagaagcaagctcttctagcagtgttcagttcgaaatggtgcaggagaacacctccaagacacattcgtgcgacatgacaccaaaacagtcgaaggtagttaaggccatattgtggctctgcggaattcaagagaaagggaaggaagagttgcctgcccgagccgaagcaataatcgtgtccctagaagaaaatccacttgtaaaaacgctgctagacgtcaatttgattttttgtgtgtcgtgtgccatcttcatttggggttactttgcctag

SEQ ID NO: 93160 - DNA, 1560 bp, Artificial Sequence
  derived and/or modified sequence
atggtgtggtggcccgtgggcgccagcctgttcgccagcaacgtgggcagcggccacttcatcggcctggccggcagcggcgccgccaccggcatcagcgtgagcgcctacgagctgaacggcctgttcagcgtgctgatgctggcctggatcttcctgcccatctacatcgccggccaggtgaccaccatgcccgagtacctgagaaagagattcggcggcatcagaatccccatcatcctggccgtgctgtacctgttcatctacatcttcaccaagatcagcgtggacatgtacgccggcgccatcttcatccagcagagcctgcacctggacctgtacctggccatcgtgggcctgctggccatcaccgccgtgtacaccgtggccggcggcctggccgccgtgatctacaccgacgccctgcagaccctgatcatgctgatcggcgccctgaccctgatgggctacagcgactgccccgccgacagcggctgccaggagcccgtgccctgccagagaagatgcagcgacggctgcatccccgagggcgccgcccccctgcacaacggcgtgccctgggacggccagccccaccccctgcccagaagcagcggcctgtgcagaagcagagacctgcccgaggacctgcagcagcccctgagactgttcggccacagagtgagccagaccagagccggcacccccgcccacagcgccagcaccatcttcaccatggacctgtggaaccacctgagacccagagccagcgagaaggagctgatgatcgtgggcagagtgttcgtgctgctgctggtgctggtgagcatcctgtggatccccgtggtgcaggccagccagggcggccagctgttcatctacatccagagcatcagcagctacctgcagccccccgtggccgtggtgttcatcatgggctgcttctggaagagaaccaacgagaagggcgccttctggggcctgatcagcggcctgctgctgggcctggtgagactggtgctggacttcatctacgtgcagcccagatgcgaccagcccgacgagagacccgtgctggtgaagagcatccactacctgtacttcagcatgatcctgagcaccgtgaccctgatcaccgtgagcaccgtgagctggttcaccgagccccccagcaaggagatggtgagccacctgacctggttcaccagacacgaccccgtggtgcagaaggagcaggccccccccgccgcccccctgagcctgaccctgagccagaacggcatgcccgaggccagcagcagcagcagcgtgcagttcgagatggtgcaggagaacaccagcaagacccacagctgcgacatgacccccaagcagagcaaggtggtgaaggccatcctgtggctgtgcggcatccaggagaagggcaaggaggagctgcccgccagagccgaggccatcatcgtgagcctggaggagaaccccctggtgaagaccctgctggacgtgaacctgatcttctgcgtgagctgcgccatcttcatctggggctacttcgcctag

SEQ ID NO: 93161 - DNA, 1560 bp, Artificial Sequence
  derived and/or modified sequence
atggtctggtggcctgtcggtgcctccctgttcgcatctaatgtggggtccggacatttcatcggattagccggatctggggccgcaacaggcatatcggtttcagcttatgagttgaacggcctattctctgtcctcatgctcgcctggatattcttgcccatttatattgcaggccaggtcacaacgatgccagaatacctgcgcaaacgcttcggcggaatccgcataccaattattctggctgtgctgtacttgttcatatatatttttacaaagatcagcgtggatatgtatgctggcgccatttttatacagcagagcttgcaccttgatctatacctagcgatagtggggctcctggccattacagccgtttacacagttgccggaggcttggccgcggtgatctacactgatgccttgcagaccctcataatgctcattggggccttgactctgatgggatattcggattgccccgccgactcaggctgccaggaaccagtgccatgccagcggcggtgctctgatggctgtattcccgagggtgccgcaccactgcacaacggggtgccctgggatggtcaaccccatcctctgccgagaagcagcggactttgcaggagtcgtgacctccctgaggacttacagcagcccctgcggcttttcggacacagggtctcccagacccgcgctggaaccccagctcatagtgcctccaccatcttcacaatggatttatggaaccatttaaggccccgcgccagcgagaaggaactgatgattgtaggccgggtatttgtactcttgctagtcctcgtcagtattctgtggattccggttgtgcaggcctcgcaggggggacagttatttatatatatacaaagtataagttcgtatctgcaaccccccgtagcagttgtgtttatcatggggtgcttttggaaacggacaaacgaaaagggcgctttctggggattgatcagtggcctgctgcttgggctcgtaaggttggtcttagactttatttatgtccagcctcgatgcgaccagcccgacgaaagacccgtcttggtgaaatcaattcactacctttatttctctatgattctgagtaccgtgacactgatcaccgtgagtacagtgtcctggttcactgagcccccaagcaaggagatggtaagccatctcacctggttcacccgtcacgaccccgtcgtccagaaagagcaggcaccaccagccgcccccttaagccttacgctgtcccagaacggaatgcctgaagccagtagctccagtagcgtacagttcgaaatggttcaggaaaacacaagcaagacgcacagctgcgacatgacacctaaacagtctaaggtcgtgaaggctatcctgtggctgtgtggaattcaggagaaggggaaagaagaactgccagcccgggctgaggctatcatagttagcttggaggagaacccgctggtcaagacactactcgacgtgaacctgatcttctgcgtgtcttgtgcaattttcatctggggatattttgcctag

SEQ ID NO: 93162 - DNA, 1560 bp, Artificial Sequence
  derived and/or modified sequence
atggtgtggtggcctgtgggcgccagcctgtttgccagcaatgtgggcagcggccacttcatcggcctggccggcagcggggccgccaccggcatctctgtgtctgcctatgagctgaatggcctcttctctgtgctgatgctggcctggatcttcctgcccatctacatcgccggccaggtgaccaccatgcctgagtacctgaggaagagatttggaggcatccgcatccccatcatcctggccgtgctgtacctgttcatctacatcttcaccaagatctctgtggacatgtatgctggggccatcttcatccagcagagcctgcacctggacctgtacctggccatcgtgggcctgctggccatcacagctgtgtacacagtggccggcggcctggccgctgtgatctacacagatgccctgcagaccctcatcatgctgattggagccctgaccctgatgggctacagcgactgcccagctgacagcggctgccaggagcctgtgccctgccagaggcgctgcagtgatggctgcatccctgagggcgccgcccccctgcacaacggggtgccctgggatggccagccccaccccctgcccaggagcagcggcctgtgccgcagccgggacctgcctgaggacctgcagcagcccctgcggctgtttggccaccgggtgtcccagaccagggctggcaccccagcccacagcgccagcaccatcttcaccatggacctgtggaaccacctgcggccccgggccagcgagaaggagctgatgattgtgggccgggtgtttgtgctgctgctggtgctggtgtccatcctgtggatccctgtggtgcaggccagccagggcggccagctgttcatctacatccagagcatcagcagctacctgcagccccctgtggccgtggtgttcatcatgggctgcttctggaagaggaccaatgagaagggggccttctggggcctcatcagcggcctgctgctgggcctggtgcggctggtgctggacttcatctacgtgcagccccgctgtgaccagccagatgagaggcctgtgctggtgaagagcatccactacctgtacttctccatgatcctgagcacagtgaccctcatcaccgtgtccacagtgtcctggttcacagagccccccagcaaggagatggtgagccacctgacctggttcaccaggcatgaccctgtggtgcagaaggagcaggcccccccagctgcccccctgagcctgaccctgagccagaatggcatgcctgaggccagcagcagcagctctgtgcagtttgagatggtgcaggagaacaccagcaagacccacagctgtgacatgacccccaagcagagcaaggtggtgaaggccatcctgtggctgtgtggcatccaggagaagggcaaggaggagctgcctgcccgggcagaggccatcatcgtgtccctggaggagaaccccctggtgaagaccctgctggatgtgaacctgatcttctgtgtgtcctgtgccatcttcatctggggctactttgcctag

SEQ ID NO: 93163 - DNA, 1560 bp, Artificial Sequence
  derived and/or modified sequence
atggtgtggtggcccgtgggcgccagcctgttcgccagcaacgtgggctccgggcacttcatcgggttagccgggtctggtgccgctactggaatctctgtgtcagcttacgaactgaacggactgttcagtgtcctgatgctggcatggatcttcttgcccatctatattgcaggacaggtgacaaccatgcctgagtacctgcgcaagaggtttggaggaatacgcatacccatcattttggccgttctttacttattcatttacatcttcacaaaaattagcgtggacatgtatgctggcgcaatttttattcagcagagtttgcaccttgacctgtacttagccatagtaggcctcctagcaataaccgccgtctacactgtcgccggcggactggctgcggtgatttacaccgacgcactgcaaacgctcatcatgctgattggcgcattgaccctgatgggctattccgactgtccggccgattcagggtgccaggagccagtcccttgccagcgaagatgttcagatgggtgcatccccgagggcgccgcccctctgcacaacggcgttccttgggacggtcaaccgcatcctctgccccgtagttcgggtctatgtcgctccagggatcttccagaggacttacagcaacctttgcggctgttcgggcaccgcgtttcacagacaagggccggaacacctgcgcacagcgcaagtaccattttcaccatggacctgtggaaccacctgagaccccgagcttctgagaaggaactgatgatagtcggccgtgtatttgtcctcctgctcgtgctggtttctatcctgtggatacccgttgttcaggcaagtcagggtggacagttgtttatttatatccaaagcatctcaagctatctgcagccgccagtcgccgtggtgtttataatgggttgcttttggaagcggactaacgagaagggcgccttttggggcctcatttccggcctgctactgggattggtgagactggtgcttgattttatttatgtacaaccgaggtgcgaccagccagacgaacgtcccgtactggtcaaatcaatccactatctgtacttttctatgatcctatctaccgttaccctgatcaccgtgagcacagtaagctggtttactgaacctccatctaaagaaatggtgtcacatttaacatggtttacacggcacgaccccgtcgtgcagaaggagcaagccccccctgcagctccgctttcgctaacattgagtcagaacggaatgcctgaagcaagctcctcctcatccgtccaattcgagatggtccaggaaaatacttccaaaacccacagctgtgacatgaccccgaagcagagtaaagttgttaaggcaattctgtggctatgcggaatccaggagaaaggcaaggaggagcttcctgcccgggccgaggcaatcatagtgtccctagaggagaacccattggtaaagacacttctagacgtgaacctaattttctgcgtaagctgtgccatctttatttggggttatttcgcatag

SEQ ID NO: 93164 - DNA, 1560 bp, Artificial Sequence
  derived and/or modified sequence
atggtgtggtggcctgttggcgcttctctgttcgcttcaaatgtcggatccggacactttattggcctcgccggaagcggcgcagccacaggtatcagcgtctccgcctacgaactaaatggcttattctccgtccttatgttggcctggatctttctgcccatttacatagccggtcaggtgaccacaatgcccgagtacctgcggaagaggtttggcggtattcgtatcccaatcatcctcgctgtgctgtacctttttatttacatattcacgaagatttctgtggatatgtatgccggagccatttttatacaacagtccttgcacctggacctgtacctggccatagtgggcctcctggctattacggctgtgtacaccgtcgcaggagggctggcagccgtgatctatacggatgcactccagacactgatcatgctgattggagcgttaacgcttatgggctacagcgactgtcccgctgactcagggtgtcaggaaccagtcccttgccagagacgttgcagtgacggatgcatccctgagggcgcagctcctctgcacaatggcgtgccgtgggacggccagccccatcccttgcctagatccagcggtctttgtcgctcacgggaccttcccgaagatctgcagcagcccctaagactttttgggcacagggtttcccaaacccgcgctgggacgccagcccactcggcttccacgatcttcactatggatttgtggaaccacctgaggcctagggccagcgaaaaagaactgatgatcgtgggacgcgtgtttgtcctcctcctggtcctggtgagcattctctggattcccgtggtgcaggcaagccagggcggacaattattcatctacatccagtccatctcttcttacctacagcccccagttgctgtggtatttatcatggggtgtttctggaaaagaaccaacgagaagggggctttttggggcctgatctccggcctgttgctgggattggtcagactggttttagattttatatatgttcagcccaggtgtgaccagcctgatgagaggccggttctggtgaagtccatccattatctatacttttctatgatactgagcacagttacccttattaccgtaagcaccgtgtcatggttcacagagccaccctccaaggagatggtgtcccacctaacatggttcacacggcatgaccctgtggtacagaaagagcaggctcctccggctgcccctcttagtctcacactgtcacagaatgggatgccagaagcaagctcctcctctagcgtgcagtttgaaatggtgcaggaaaatacttcgaagacgcacagctgcgatatgaccccaaagcagtccaaggtcgtcaaagcaatcctgtggctatgtggaatccaggagaaaggcaaggaagaattgcctgccagagcagaagcaataatcgttagtctggaggaaaatccactggtgaagaccctgctggacgtgaacttgatcttctgcgttagttgtgccatctttatctggggttattttgcatag

SEQ ID NO: 93165 - protein, 1168 aa, Artificial Sequence
  derived and/or modified sequence
MSARERQPALKKKMKTLAERRRSAPSLILDKALQKRPTTRDSPSASVDTCTFLSSLVCSNRTLLIDGRAELKRGLQRQERHLFLFNDLFVVAKIKYNNNFKIKNKIKLTDMWTASCVDEVGEGNTNAMKSFVLGWPTVNFVATFSSPEQKDKWLSLLQRYINLEKEKDYPKSIPLKIFAKDIGNCAYSKTITVMNSDTANEVINMSLPMLGITGSERDYQLWVNSGKEEAPYPLIGHEYPYGIKMSHLRDSALLTPGSKDSTTPFNLQEPFLMEQLPREMQCQFILKPSRLAAAQQLSDSGHKTFKRRRSIINWAFWRGSSTHLDNLPSSPTSPMPGQLFGISLPNICENDNLPKPVLDMLFFLNQKGPLTKGIFRQSANVKSCRELKEKLNSGVEVHLDCESIFVIASVLKDFLRNIPGSIFSSDLYDHWVSVMDQGNDEEKINTVQRLLDQLPRANVVLLRYLFGVLHNIEQHSSSNQMTAFNLAVCVAPSILWPPASSSPELENEFTKKVSLLIQFLIENCLRIFGEEITSLFREVSVRCDTRENASDISCFQLNDSSYDSLENELNEDVDAPCSDLVKKLGQGSRSMDSVLTLSDYDLDQPEVEGLLTLSDFDLAHSKDEDVQMKRPLESKPVNILVYTKIPLRDHARAPSAMCTPSYLSTAAANAAKSLRRHRRCSEPSIDYLDSKLSYLREFYQKKLRKSSCDAILSQKDEDYLKQNQPLQEEGKTCFKQSLVTGTDVSKKNATTQNTKKKSLSGSEGNHVKLFPKSKPVAISVASYSPMSSQDHSKNQPFDVNTSGYSPPHTADALKGPRTHRRCSEPNIEDQNRKLTYLRGIYSKKQHKTSCEAGLLHGEEDYLKRHKSLQMEGQKLINQSLVMGIEVGKSSATNQNTEKVLPPRLNLCPRTSYSSLSSPGTSPSGSSVSSQDSAFSQISEHSVFTPTETSSPIDCTFQAQRKREDLSPDFSNASHVSGMPGPSSGQACSRPAYTKKDTMEWHSQMHSVTLHPSTWLRNGVASLKNWSLKKKAKAARPEEEKIASPKGPLEPPPHASGVPEANSLQEEQKDLPLRAAEGLSPVQSAQRCSSSPFQDSERHCSSPFSLVESRLKLCMKSHEEIEPGSQSSSGSLPWERASASSWTLEDATSPDSGPTVVCDIEDRYLTKDI

SEQ ID NO: 93166 - DNA, 3507 bp, Artificial Sequence
  derived and/or modified sequence
atgagcgccagagagagacagcccgccctgaagaagaagatgaagaccctggccgagagaagaagaagcgcccccagcctgatcctggacaaggccctgcagaagagacccaccaccagagacagccccagcgccagcgtggacacctgcaccttcctgagcagcctggtgtgcagcaacagaaccctgctgatcgacggcagagccgagctgaagagaggcctgcagagacaggagagacacctgttcctgttcaacgacctgttcgtggtggccaagatcaagtacaacaacaacttcaagatcaagaacaagatcaagctgaccgacatgtggaccgccagctgcgtggacgaggtgggcgagggcaacaccaacgccatgaagagcttcgtgctgggctggcccaccgtgaacttcgtggccaccttcagcagccccgagcagaaggacaagtggctgagcctgctgcagagatacatcaacctggagaaggagaaggactaccccaagagcatccccctgaagatcttcgccaaggacatcggcaactgcgcctacagcaagaccatcaccgtgatgaacagcgacaccgccaacgaggtgatcaacatgagcctgcccatgctgggcatcaccggcagcgagagagactaccagctgtgggtgaacagcggcaaggaggaggccccctaccccctgatcggccacgagtacccctacggcatcaagatgagccacctgagagacagcgccctgctgacccccggcagcaaggacagcaccacccccttcaacctgcaggagcccttcctgatggagcagctgcccagagagatgcagtgccagttcatcctgaagcccagcagactggccgccgcccagcagctgagcgacagcggccacaagaccttcaagagaagaagaagcatcatcaactgggccttctggagaggcagcagcacccacctggacaacctgcccagcagccccaccagccccatgcccggccagctgttcggcatcagcctgcccaacatctgcgagaacgacaacctgcccaagcccgtgctggacatgctgttcttcctgaaccagaagggccccctgaccaagggcatcttcagacagagcgccaacgtgaagagctgcagagagctgaaggagaagctgaacagcggcgtggaggtgcacctggactgcgagagcatcttcgtgatcgccagcgtgctgaaggacttcctgagaaacatccccggcagcatcttcagcagcgacctgtacgaccactgggtgagcgtgatggaccagggcaacgacgaggagaagatcaacaccgtgcagagactgctggaccagctgcccagagccaacgtggtgctgctgagatacctgttcggcgtgctgcacaacatcgagcagcacagcagcagcaaccagatgaccgccttcaacctggccgtgtgcgtggcccccagcatcctgtggccccccgccagcagcagccccgagctggagaacgagttcaccaagaaggtgagcctgctgatccagttcctgatcgagaactgcctgagaatcttcggcgaggagatcaccagcctgttcagagaggtgagcgtgagatgcgacaccagagagaacgccagcgacatcagctgcttccagctgaacgacagcagctacgacagcctggagaacgagctgaacgaggacgtggacgccccctgcagcgacctggtgaagaagctgggccagggcagcagaagcatggacagcgtgctgaccctgagcgactacgacctggaccagcccgaggtggagggcctgctgaccctgagcgacttcgacctggcccacagcaaggacgaggacgtgcagatgaagagacccctggagagcaagcccgtgaacatcctggtgtacaccaagatccccctgagagaccacgccagagcccccagcgccatgtgcacccccagctacctgagcaccgccgccgccaacgccgccaagagcctgagaagacacagaagatgcagcgagcccagcatcgactacctggacagcaagctgagctacctgagagagttctaccagaagaagctgagaaagagcagctgcgacgccatcctgagccagaaggacgaggactacctgaagcagaaccagcccctgcaggaggagggcaagacctgcttcaagcagagcctggtgaccggcaccgacgtgagcaagaagaacgccaccacccagaacaccaagaagaagagcctgagcggcagcgagggcaaccacgtgaagctgttccccaagagcaagcccgtggccatcagcgtggccagctacagccccatgagcagccaggaccacagcaagaaccagcccttcgacgtgaacaccagcggctacagccccccccacaccgccgacgccctgaagggccccagaacccacagaagatgcagcgagcccaacatcgaggaccagaacagaaagctgacctacctgagaggcatctacagcaagaagcagcacaagaccagctgcgaggccggcctgctgcacggcgaggaggactacctgaagagacacaagagcctgcagatggagggccagaagctgatcaaccagagcctggtgatgggcatcgaggtgggcaagagcagcgccaccaaccagaacaccgagaaggtgctgccccccagactgaacctgtgccccagaaccagctacagcagcctgagcagccccggcaccagccccagcggcagcagcgtgagcagccaggacagcgccttcagccagatcagcgagcacagcgtgttcacccccaccgagaccagcagccccatcgactgcaccttccaggcccagagaaagagagaggacctgagccccgacttcagcaacgccagccacgtgagcggcatgcccggccccagcagcggccaggcctgcagcagacccgcctacaccaagaaggacaccatggagtggcacagccagatgcacagcgtgaccctgcaccccagcacctggctgagaaacggcgtggccagcctgaagaactggagcctgaagaagaaggccaaggccgccagacccgaggaggagaagatcgccagccccaagggccccctggagccccccccccacgccagcggcgtgcccgaggccaacagcctgcaggaggagcagaaggacctgcccctgagagccgccgagggcctgagccccgtgcagagcgcccagagatgcagcagcagccccttccaggacagcgagagacactgcagcagccccttcagcctggtggagagcagactgaagctgtgcatgaagagccacgaggagatcgagcccggcagccagagcagcagcggcagcctgccctgggagagagccagcgccagcagctggaccctggaggacgccaccagccccgacagcggccccaccgtggtgtgcgacatcgaggacagatacctgaccaaggacatctag

SEQ ID NO: 93167 - DNA, 3507 bp, Artificial Sequence
  derived and/or modified sequence
atgagcgccagagagcgtcaaccagccctcaaaaaaaaaatgaagacactcgctgagcgacggaggtctgctcctagtcttatcctggacaaggctctacagaaacgaccgactacacgcgattcaccctccgcctcggtagacacatgcacgtttctcagtagtctggtgtgctctaatcggacactgctgattgacggaagggctgaacttaagcggggacttcaaagacaggaacgtcacctctttctgttcaatgacctgtttgtcgtagctaagatcaagtacaataataatttcaaaatcaagaacaaaataaaactgacagacatgtggacggctagttgcgtggatgaagttggcgaaggaaatacaaacgcaatgaagtcctttgtccttggctggccaacggttaatttcgttgcaacattctcttctcccgaacagaaagacaagtggctgagcctcctgcagaggtatatcaatcttgaaaaggagaaggattacccaaaaagtatccccctcaagatctttgcaaaagatatcgggaactgtgcctacagtaagactataactgtgatgaatagcgacacggctaatgaagtgatcaacatgagcctcccaatgctcggaattactgggtcagaacgagattaccagctctgggtgaattcaggaaaagaggaagccccctatccactgattgggcacgagtacccatatgggataaagatgagtcacttgagagattccgctctgctgacccctgggtctaaggactctacaacaccctttaacctgcaggagccattcttgatggagcagctccccagggagatgcagtgtcagttcatcctcaaaccgagcaggctggcagcggcgcaacaactaagtgacagcggccacaaaactttcaaacggcgccgttctatcattaactgggccttctggagagggagcagtacgcacctggataatctgccaagctcgccaacctctcccatgcccggtcagctgtttggtatttctttgcccaacatctgtgaaaacgataatttgccaaagcccgtgctcgacatgctgtttttcctcaaccagaaaggtcccctgaccaagggcatctttcggcagtctgctaatgtcaaatcctgccgcgagttgaaggagaagttgaatagtggagtagaggttcatctggattgtgaatccatctttgtcatcgcctcagtgttgaaggatttcctcaggaacattccagggtccattttctcttccgatctatacgaccattgggtttcagtcatggatcagggtaatgacgaagaaaagataaatactgtgcagagactcctggaccagcttccaagagccaacgtggtgcttttgcggtacttgtttggagtgctgcacaacatcgagcaacacagtagctctaatcagatgacagctttcaatcttgccgtctgcgtcgcaccttctatcttgtggccccctgcttcttcatcacctgaactggaaaatgaattcactaaaaaagtttcattactcatccagttcctgattgaaaactgtttaagaatctttggtgaggagatcacatccctgttcagagaggtcagcgtgcgatgtgataccagagaaaacgccagcgatattagctgtttccagctcaacgatagttcgtatgattctctcgagaacgagttgaatgaagacgttgacgccccctgctccgatctggtgaagaagctggggcagggctctcggtctatggatagcgtcctgactttatctgactatgacctggatcagcccgaggtggaaggcctcctgaccctctctgactttgatctggctcactctaaggatgaggacgtccagatgaagagacccctggaatccaaacccgttaacatcctggtgtataccaagatccccctgagggaccacgccagagctccaagtgccatgtgtaccccatcttacctgagtacagcagccgcaaatgcggccaaatccctccgacgtcaccggaggtgctccgaaccatccatagattatctcgacagcaaattgagctatttaagggagttttatcagaagaaactgcgcaaatccagctgtgacgccatcctgtcacagaaagatgaagattaccttaaacaaaatcagcctctgcaggaggaaggcaaaacttgctttaaacagagcctggtgactggcaccgatgtaagtaaaaaaaacgctacaacccaaaacaccaaaaaaaagagtttgtcagggtcagaaggtaaccacgtgaaactgttccccaagtctaagcctgtggccatcagcgtggcgtcctacagtcccatgagctctcaggaccactctaaaaaccagcctttcgacgtcaatacaagtggttacagccctccacatactgccgacgctctgaaaggtcctcgcactcatcggagatgctctgaacctaatatcgaggaccagaatcggaagctgacatatctgcggggaatttactctaagaaacagcataaaacatcatgtgaagctggcctactgcatggagaggaggattatctcaaacgccataaatctttgcaaatggaaggacagaagttaattaaccagagcctggtgatggggatcgaagtcggaaaatccagcgcgacgaaccagaacaccgaaaaggttctgccgccccgactgaacttgtgtccacgcacatcatacagctcactgtctagcccaggtacaagtccttccggatcgtctgtttcatctcaagattcagcctttagccaaatctccgagcatagcgtgtttactcccactgaaaccagcagcccaatcgactgcaccttccaggcccagcgcaagcgagaagatctgtcaccagacttttccaatgccagccatgtcagtggcatgcctgggccaagttctggacaggcctgctccagacctgcctacacaaagaaagacaccatggagtggcactcccagatgcactcggtcacactgcacccttccacctggctgcgcaacggagtcgcttctctgaaaaactggtccctgaaaaaaaaggccaaagcagcccggcctgaggaggagaaaatcgcctctccaaagggccccctggagccaccaccgcatgctagtggcgttccggaagccaattctttgcaagaggagcagaaggatctacccctgagagctgcagaaggactatctccagtgcagtcagcccagagatgctcttccagtccattccaggatagcgaaagacactgtagttccccattctcgcttgtcgagagtaggcttaagctgtgtatgaagtcacatgaggagatcgaaccagggtcacagtcttcgtccggctcactgccttgggagagggcttctgcatcaagctggacactcgaagatgctactagccccgacagcggtcctaccgtcgtgtgtgacattgaggatcgatatcttacaaaagatatctag

SEQ ID NO: 93168 - DNA, 3507 bp, Artificial Sequence
  derived and/or modified sequence
atgtctgcccgggagcggcagcctgccctgaagaagaagatgaagaccctggccgagaggagaagaagtgcccccagcctcatcctggacaaggccctgcagaagaggcccaccacccgggacagccccagcgcctctgtggacacctgcaccttcctgagcagcctggtgtgcagcaacagaaccctgctgattgatggccgggcagagctgaagaggggcctgcagaggcaggagcggcacctgttcctgttcaatgacctgtttgtggtggccaagatcaagtacaacaacaacttcaagatcaagaacaagatcaagctgacagacatgtggacagccagctgtgtggatgaggtgggggagggcaacaccaatgccatgaagagctttgtgctgggctggcccaccgtgaactttgtggccaccttcagcagccctgagcagaaggacaagtggctgagcctgctgcagcgctacatcaacctggagaaggagaaggactaccccaagagcatccccctgaagatctttgccaaggacatcggcaactgtgcctacagcaagaccatcaccgtgatgaacagcgacacagccaatgaggtgatcaacatgagcctgcccatgctgggcatcactggaagtgagcgggactaccagctgtgggtgaacagcggcaaggaggaggccccctaccccctgattggacatgagtacccctacggcatcaagatgagccacctgcgggacagcgccctgctgaccccaggcagcaaggacagcaccacccccttcaacctgcaggagcccttcctgatggagcagctgccccgggagatgcagtgccagttcatcctgaagcccagccggctggccgccgcccagcagctgagtgacagcggccacaagaccttcaagagaagaagaagcatcatcaactgggccttctggaggggcagcagcacccacctggacaacctgcccagcagccccaccagccccatgcctggccagctgtttggcatcagcctgcccaacatctgtgaaaatgacaacctgcccaagcctgtgctggacatgctgttcttcctgaaccagaagggccccctgaccaagggcatcttccggcagagcgccaacgtgaagagctgccgggagctgaaggagaagctgaacagcggcgtggaggtgcacctggactgtgagagcatctttgtgattgcctctgtgctgaaggacttcctgaggaacatccctggcagcatcttcagcagtgacctgtatgaccactgggtgtctgtgatggaccagggcaatgatgaggagaagatcaacacagtgcagaggctgctggaccagctgccccgggccaacgtggtgctgctgcgctacctgtttggagtgctgcacaacatcgagcagcacagcagcagcaaccagatgacagccttcaacctggccgtgtgtgtggcccccagcatcctgtggcccccagccagcagcagccctgagctggagaatgagttcaccaagaaggtgtccctgctgatccagttcctgattgagaactgcctgcgcatctttggagaggagatcaccagcctcttccgggaggtgtctgtgcgctgtgacaccagagaaaatgccagtgacatcagctgcttccagctgaatgacagcagctatgacagcctggagaatgagctgaatgaagatgtggatgccccctgcagcgacctggtgaagaagctgggccagggcagccgctccatggattctgtgctgaccctgagtgactatgacctggaccagcctgaggtggagggcctgctgaccctgagtgactttgacctggcccacagcaaggatgaagatgtgcagatgaagaggcccctggagagcaagcctgtgaacatcctggtgtacaccaagatccccctgcgggaccacgcccgggcccccagcgccatgtgcacccccagctacctgagcacagctgctgccaatgctgccaagagcctgcggcggcaccggcgctgcagcgagcccagcattgactacctggacagcaagctgagctacctgcgggagttctaccagaagaagctgaggaagagcagctgtgatgccatcctgagccagaaggatgaggactacctgaagcagaaccagcccctgcaggaggagggcaagacctgcttcaagcagagcctggtgactggaacagatgtgtccaagaagaatgccaccacccagaacaccaagaagaagagcctgagcggcagcgagggcaaccacgtgaagctgttccccaagagcaagcctgtggccatctctgtggccagctacagccccatgagcagccaggaccacagcaagaaccagccctttgatgtgaacaccagcggctacagccccccccacacagcagatgccctgaagggccccaggacccaccggcgctgcagcgagcccaacatcgaggaccagaacaggaagctgacctacctgcggggcatctacagcaagaagcagcacaagaccagctgtgaggccggcctgctgcacggggaggaggactacctgaagaggcacaagagcctgcagatggagggccagaagctgatcaaccagagcctggtgatgggcatcgaggtgggcaagagcagcgccaccaaccagaacacagagaaggtgctgcccccccggctgaacctgtgccccaggaccagctacagcagcctgagcagccctggcaccagccccagcggcagctctgtgagcagccaggacagcgccttcagccagatcagcgagcacagcgtcttcacccccacagagaccagcagccccatcgactgcaccttccaggcccagaggaagcgggaggacctgagcccagacttcagcaatgccagccacgtgtctggcatgcctggccccagcagcggccaggcctgcagcaggcctgcctacaccaagaaggacaccatggagtggcacagccagatgcacagcgtgaccctgcaccccagcacctggctgagaaatggagtggccagcctgaagaactggagcctgaagaagaaggccaaggccgcccggcctgaggaggagaagatcgccagccccaagggccccctggagcccccacctcatgccagcggcgtgcctgaggccaacagcctgcaggaggagcagaaggacctgcccctgcgggctgctgagggcctgagccctgtgcagagcgcccagcgctgcagcagcagccccttccaggacagcgagcggcactgcagcagccccttcagcctggtggagagccggctgaagctgtgcatgaagagccatgaggagattgagcccggcagccagagcagcagcggcagcctgccctgggagcgggccagcgccagctcctggaccctggaggatgccaccagcccagattctggccccaccgtggtgtgtgacatcgaggaccgctacctgaccaaggacatctag

SEQ ID NO: 93169 - DNA, 3507 bp, Artificial Sequence
  derived and/or modified sequence
atgagcgcccgggagcggcagcccgccctgaagaagaagatgaagactctcgctgagcgaagaagaagcgctcctagtctgattctggataaggccctgcaaaagagacctaccacccgcgatagcccctcggccagcgtagatacctgcacattcttgagctctctcgtctgctccaacagaacgctgctgattgacgggagagctgagctgaaacgaggactgcaaagacaggagcgtcacctgttcttatttaacgacctcttcgtggtggccaagatcaagtataataataactttaagatcaaaaacaaaatcaagctgacggatatgtggaccgcctcttgtgtggatgaggtgggcgaaggcaacaccaatgccatgaagtcctttgtgctcggctggccgacagtaaatttcgtggctacgttttctagcccagaacagaaagacaaatggctgagccttttgcagagatatattaacctggaaaaagagaaggattaccccaagtcaataccgctgaagatcttcgccaaggatataggcaactgcgcatacagcaaaaccatcaccgtaatgaactcagacacagctaacgaagtcattaacatgagtctaccaatgttaggcattaccggatccgaaagagactatcagctgtgggtgaactcgggaaaggaagaagctccttaccctttgataggccacgaatacccctacggtattaaaatgagtcaccttcgcgatagcgctctattaacacctggcagtaaagactctaccacaccttttaatcttcaagaaccatttttgatggagcaactgcccagggagatgcagtgccaatttatcctcaaaccgagtcgactggccgcggcacagcaactgagtgattcgggacacaaaacttttaagcgtaggcgttccattattaactgggccttctggcgaggaagcagtactcatttagacaatctaccttcctcaccaacatctcccatgcctggtcagctcttcgggatcagcttgccaaatatctgcgagaacgataacctgcccaaacctgttctcgacatgctgttttttcttaatcagaaaggtccactgaccaagggcatttttcgacagtcagcaaatgtcaagtcttgcagggaacttaaggagaagctgaactcgggcgtcgaagtgcacttggattgcgaatctatttttgtcattgcaagcgtgctgaaagacttcctgcgaaatatccccggaagcatcttttcctccgacttgtatgaccattgggtgtctgtaatggatcaggggaatgacgaggagaaaatcaatactgtgcagcggctgctggatcagctgccacgagcaaatgtggtcttattaagatatctcttcggcgtgctccacaacatcgagcaacatagcagcagcaatcaaatgactgcttttaacctggcagtttgtgtggccccctcgatcctgtggcctcccgcaagttccagtccagaacttgaaaacgagttcacaaaaaaagtcagtctcctcatccagttcctaattgagaactgtcttaggatattcggggaggaaattacttcactctttcgcgaagtgtctgttcgatgtgatacgcgcgaaaacgcctctgatattagctgcttccagctaaatgacagctcctatgatagcctggagaacgagctgaacgaagacgtggacgccccctgctccgaccttgtgaaaaaactcggacagggctccagaagcatggactctgtccttaccctgagcgactatgacctcgaccaacctgaggtggaggggttgctcacgctgagcgatttcgatttggcgcactccaaagatgaagacgtccagatgaaacggcctttggagtctaaaccagtgaatattctggtgtacaccaagatccctcttagggatcacgcccgggcgccttccgctatgtgcaccccatcgtatttatctactgccgccgcaaacgcagccaaatccctccgccggcacaggagatgcagcgagccatctattgattacctggactctaagctcagctatctgcgtgaattttaccaaaagaaactcaggaagtcctcctgtgatgccatcctatcccagaaggacgaggattatctcaaacagaaccagcctctgcaggaggaaggcaaaacatgttttaaacagagcctggtaaccgggaccgacgtgagcaagaaaaacgctactacacagaataccaaaaagaagagcctctcaggatctgaaggaaatcatgtcaaactgtttcctaagtctaaaccagttgccatctcggttgcgtcttactctcctatgtcgtcccaggatcattcgaaaaatcagccatttgacgtgaataccagtggctacagccccccccatacagccgatgcactaaagggccctaggacacaccgcagatgctccgagcccaacatcgaggatcagaaccgtaaactgacatatctgagggggatctatagtaaaaaacagcacaagaccagctgcgaggctggactgctccatggggaggaggattatctcaaacgtcacaagtccctccagatggagggtcaaaagctgatcaatcaatctctcgtaatggggattgaggtgggcaaatcctccgccacaaaccagaatactgagaaggttctccctccgagactgaatctgtgccctcgcacttcttatagctcattgtcctcaccagggacgtcacctagtggaagttctgtctccagccaggacagcgcattttcccagatctccgaacattcagtcttcactcctactgagacttcctcccccatagattgcacctttcaggcccagcgtaagagagaggatctgtcccccgacttttcaaacgctagccacgtctcaggcatgccgggccccagctctggccaggcctgctcccgaccggcgtacacaaagaaagacaccatggagtggcactcacagatgcactcagtgacattgcatcctagcacctggctgcggaatggtgtagcctctctcaaaaactggtcgttaaaaaaaaaggctaaggccgcccgccctgaggaagaaaaaattgcgagccccaagggacccctcgagcccccaccacatgcctccggagtgcctgaggccaacagcctccaagaagaacagaaggaccttcctctccgtgccgcagagggcctgtcccccgtgcagagcgctcagagatgttctagcagtccctttcaggactccgaaagacactgctcaagtccctttagtctggtcgagagtcgcctgaagctctgtatgaagtcgcatgaagagatcgaacccgggtcccagtcctcgtccggctctctgccctgggagagggcatctgcatcatcatggacactggaagacgccacatccccagatagtggcccaactgtggtttgcgatattgaggacaggtatcttacaaaggacatttag

SEQ ID NO: 93170 - DNA, 3507 bp, Artificial Sequence
  derived and/or modified sequence
atgagcgctcgggaacggcagcccgcattgaagaagaagatgaaaacgcttgcagagcgcaggaggtctgccccttctctgattttagacaaagcactgcagaaaagaccgactactcgcgactccccttccgccagtgtcgacacttgtaccttcctgtcatctcttgtctgttctaatagaaccctgctcattgacgggagggccgaactgaaaagaggactgcagcgacaagagcggcacctgttcctttttaacgacctttttgtggttgctaaaatcaagtacaataacaactttaaaatcaagaacaagattaagttgaccgatatgtggacggccagttgtgtggatgaagttggcgagggcaatacaaacgctatgaaaagctttgtgcttgggtggcctactgtcaattttgttgcgaccttttccagcccagagcaaaaagataagtggctttccttactgcagagatacataaatctagaaaaggagaaggattaccctaagtcaattcctctgaagatcttcgcaaaggatattggcaactgcgcctatagcaaaaccatcactgtcatgaactctgacacagccaacgaggtcattaatatgtctttacccatgctggggataacaggctccgagagggactaccagttgtgggtgaattccgggaaagaagaagccccataccccctgattggtcacgagtacccctacggcattaagatgtcgcatttaagagatagcgcactcctgacacccggaagtaaggattccacaacaccgtttaacttgcaagagcctttcttgatggagcagttgccaagggagatgcagtgccaatttatactgaagccttcccgtctggccgctgctcaacagttgagcgactccggccacaagacattcaaaaggcggaggtcaataattaactgggctttctggaggggctcttcaacgcatctggacaacctgccttcaagtcccacgtcccctatgccaggtcagctgtttggcatctccctgcccaacatttgtgagaacgacaacctgccaaaacccgtgctggacatgctcttttttcttaatcaaaaggggcctttgactaaagggatcttcaggcaatcagctaacgttaagtcttgcagagagctgaaggaaaaacttaactcaggtgtcgaagtacatctcgactgtgaatctatcttcgtcattgcatccgtgctgaaggacttccttcgcaacattcccggtagtattttttcgagtgacctttacgaccattgggtctccgtgatggaccagggcaatgatgaggagaagattaatactgtacagcgcctcctcgaccaactgcctcgagctaatgttgttttacttcggtatctttttggtgttctgcacaacattgaacaacactcatcctctaatcagatgacagctttcaaccttgctgtctgcgttgcccctagtatactatggcctccggcttcgtccagtcctgaactggaaaatgagttcaccaagaaagtctccctccttatccaattcctcattgagaactgcttaaggatcttcggggaggagatcacatccctatttcgggaggtgagcgttaggtgcgatacaagggagaatgcaagcgatattagttgtttccaactcaacgatagctcatatgactctctcgagaacgaattgaacgaggatgtggacgctccctgctcagatctcgtgaaaaaactggggcaggggagccgatctatggatagcgtgctgaccctgagcgattatgatctcgaccaaccagaggtcgaaggactcctgaccttgagcgactttgatctggcgcactccaaggacgaggatgtccagatgaagagaccactcgagagcaaacctgtcaatattctggtttacaccaagattcctctccgtgaccacgcccgagccccatctgctatgtgcacccctagctacctcagcactgccgcagctaacgctgctaaatccctaagaagacacagaaggtgcagtgagcccagcatcgactacttggattcaaagcttagctacctaagagagttctaccagaaaaagctgcgcaaaagcagctgtgacgcgatcttatcccaaaaggatgaagactatctcaagcagaatcagccactgcaggaagaaggcaagacttgctttaaacagtctctcgttaccggcactgacgtgtctaagaaaaatgccactacgcagaacaccaaaaagaaatccctgagcggaagtgaaggcaaccacgttaagctgttcccaaagtcaaaaccagtagccatcagtgtagcttcatattcccccatgagctcccaggatcatagcaagaatcagccttttgatgtgaacacaagcggatactctccccctcataccgcagatgctttgaagggaccgagaactcacagaaggtgtagcgaacccaatatcgaagaccagaacaggaagctcacttacctgcggggaatctactctaagaaacagcacaagactagctgcgaggcgggattacttcatggagaagaagactatttgaaacggcacaagagcctccagatggaaggccagaagttgatcaaccagtcgctggtgatgggaattgaagtcgggaagagctccgccacaaaccaaaatactgagaaagtcctgcctcccagactaaatctctgtcctagaacaagttactcatctcttagttcccccggaactagtccaagcggcagcagcgtaagttcccaagatagtgcattctcgcagatttcggagcactctgtgttcactcccaccgagacttcctcacccattgactgcacttttcaagcccaacggaaacgggaagacctctccccggatttctccaatgctagccacgtgtcaggaatgccgggacctagttcgggacaggcctgctctcgcccagcctacaccaaaaaagatactatggaatggcactcccagatgcactctgtgaccctccatccttctacatggttgcgtaatggcgtggcctccctcaagaactggagcctgaagaaaaaggccaaggccgctagacccgaagaggaaaaaatagctagtccaaagggacccctggaaccaccacctcatgcctccggagtgcctgaagctaactccttgcaggaggaacagaaagacctgccactgcgggcagcagaagggctgtcccctgtgcagtctgcccagaggtgctccagcagtccatttcaggattccgagcgtcactgtagctcaccttttagcctggtggaaagtcgtctgaaactttgtatgaaaagccatgaggagatagagccgggttcacagtctagcagcgggagcctgccctgggaacgggcaagtgcgtcgagttggacattagaagacgcaacctcacctgattccggaccgactgtggtctgtgatattgaagacaggtacctgaccaaagatatttag

SEQ ID NO: 93171 - DNA, 6180 bp, Artificial Sequence
  derived and/or modified sequence
acagcagcgcgctaggcggacgccgcgggaatttgacgctcgaggctcgcggcccctaatgagagtcccagaacacttcccgcccttgacggccagcggcagcgccgccgcctcccgcagagcgcccgcttctccgtttctagagccttagtctctcctcgagcgacctcgcagcctccctcccgtctccatccgccgccggttctgcagcccggctcctccctcagtctaggcgcgcgggctgtagtgggcgatcgcctttccccgacccctcgccgtgcccctgggcctcccgaagtggcctgggcgagcactgactgccctttggcggtgtcagccccaaagtcagggccggcgatgtctgcccgggagcggcagccggcgctgaagaagaaaatgaaaacactagcagaaaggaggaggagcgctccatctcttatcctggataaagccctacaaaaacggcctactaccagggacagtccttctgctagtgttgacacatgcacatttctgtcatcattagtgtgctccaataggactctgctgattgatggccgggcagaactcaaaagaggcctccagaggcaggagcggcatcttttcctattcaatgatctgtttgttgtggccaaaatcaaatataacaataactttaagataaaaaataaaattaaattaactgatatgtggacagcaagctgtgtggatgaagtgggagaaggcaacaccaatgccatgaaatcctttgttttgggctggcccacagtgaactttgtggccactttcagttctccagaacaaaaggacaaatggctctctctccttcagagatacatcaatctagagaaagaaaaggactacccgaagagcattcccctcaaaatcttcgccaaggacattgggaattgtgcctactctaaaactataacagtaatgaattcagatacagcgaatgaagttatcaacatgtcattaccaatgctagggataactggctctgagagagattaccagttgtgggtcaattctggcaaagaagaggctccatacccactcattgggcatgaatatccatatggaattaaaatgagccatcttcgagactctgcactcctgacaccgggatcaaaggactctaccacccctttcaacctccaggagcccttccttatggaacagctcccccgagagatgcagtgccagttcatcctgaagcccagccgcctggctgcagcccagcaactgagtgattcaggtcataagacatttaaaaggagaagatctatcataaactgggccttctggcgaggttctagcactcacctggacaacttgccctcatcgccaacatcacctatgccaggacagctctttggaatttctctgccaaatatttgtgagaatgacaatctgcccaaacctgtcttggatatgcttttctttcttaatcaaaaaggacctctcaccaaaggtatcttcaggcaatcagccaatgtgaaatcctgcagagaactaaaagagaaattgaattctggagtcgaagtacacctagactgtgaatctatttttgtgatagcatctgtcttaaaggattttctgcgaaatattccaggaagtattttttcatcagatctctatgatcactgggtctctgtaatggatcaaggaaatgatgaagagaaaataaatactgttcaaaggctattagaccagcttccgagagccaatgttgttctcctaaggtatctttttggggtgttacacaacattgagcaacattcctcatccaatcagatgactgcatttaatttagctgtgtgtgtcgctccaagtattctttggcctcctgcttcctccagcccagaactagaaaacgaatttacaaaaaaggtttccctgcttatacaatttctgattgagaattgccttaggatatttggagaagaaatcacttccctcttcagagaggtttcagtgagatgtgacactagagagaatgcctcagatatttcttgctttcaactgaatgactcctcctatgacagcttggaaaatgagctaaatgaggatgttgatgcaccatgcagtgacttggtaaagaaacttggccaggggagcagaagcatggactctgtcttaaccctcagtgactatgatcttgaccagcccgaggtggaaggccttttaaccctaagcgactttgacttggcccattctaaagatgaagatgttcaaatgaaacggcctcttgaatccaagccggtgaacattttagtgtacacaaagatcccactgcgggatcatgccagggccccatctgccatgtgcacacccagctacctgtccacagctgcagcaaatgctgcaaaaagcctgaggcgacaccggcgttgctcagagcccagcatcgactatctggattcaaagctttcctacctcagggagttttatcagaaaaagctacgcaagtccagctgtgatgcaattctttctcaaaaagatgaagactatctgaagcagaatcaacccctccaggaggaaggaaagacatgttttaaacagagtttagtcacaggcactgatgtcagcaagaaaaatgccactactcaaaacactaagaagaaaagcttgtctggtagtgaaggaaatcacgtgaaacttttccctaagtctaagccagtggccatttctgtggcatcttatagtcctatgtcctcacaggatcattccaagaaccagccctttgatgtgaatacatctggatactccccaccacacacagcagatgccctcaagggtccaaggacacatcggcgctgctcagagcccaacatagaagaccagaaccgcaagctgacctatctcaggggaatttattcaaagaaacaacataaaaccagctgtgaagctggtctcttgcatggagaggaggattatctcaaacggcataagtctttgcaaatggaggggcagaagctcattaatcagagtttagtcatggggattgaggtgggcaagagtagtgccacaaaccaaaacactgagaaggttttacccccaagattaaacctttgcccaaggaccagctattccagcttatcctccccaggcacttccccatccggctcatcagtaagctcccaagacagtgctttttctcagatttctgaacactctgtgtttacacccactgagacttcctctccaatagattgcacttttcaggctcagagaaaacgggaagacctttctcctgactttagcaatgccagccatgtttccggaatgcccggtccctcatcagggcaggcttgcagccgcccagcctatacaaagaaggacaccatggagtggcattcacaaatgcattctgtaactcttcatcccagcacatggttgagaaatggtgtggccagtttgaaaaactggtccctcaaaaagaaagcaaaggcagccagaccagaggaagagaaaatagcttctccaaaaggacccttagagccacccccacatgcttctggtgttccagaagccaactcactgcaagaggaacaaaaagacttgcccttaagggcagctgaaggactgtcccctgtgcagtcagcccaaaggtgtagttcttctcccttccaggactcagagagacactgtagctctccattcagcctggtggagagcagacttaagctgtgcatgaagtcacatgaggaaatagagcctggtagtcagagctcttctggttctctgccttgggaaagagcctcagccagctcttggactctagaggatgcgaccagcccagactcagggcctacagtggtctgcgacattgaggacaggtatttaaccaaagacatttaagcatagtaagaatctgatgtccacaagaacaggaactgggttaataataatagacaataattattatgacccctttgtataagatacctgggagaggtagcataaggattatcattgctaatacttaggacaacgaaataattctctttattgagactacttgacaaatactttatgctaaaaattttgtcacctaagtgtttgggaggctttttcttattaaaggttgggattggtcctgtcatgtggttttagagatactaacagagggctagagaaagcatcttctgcagaggaagcacttatgggaacagtctgtgagattgatgtcctgagaagaccaagatatcaggaatgaggaataggggcctgaggagagaggggaagggtacagagaaaccatctacattccatggaatgtttttaataagtaggcaagaaaaatgccactaatcaaagcattaagtgtgtccagtaatgaagaacatcatataaaatctttccctaaatctaagccagtggccatttttgtgggatcttactaatcacgtgtccttacagaatcattccaagaaccagcccattgctacagctagagtggagaaaaacagagtgactcaaaagccatgggtaccatgatatcagttttgttggttgtatttgtcggtttgttttttcattcatgttgaagtgctttgcaaggcttcaggaaacagagttgtgaggagaaagaagaaaatggctgcccatttcagtaccctttcaaaggtatctctgcctaggaacattcttcagaaatgcaacttcttctatttagaaggtgacctcctgacagcgttcactctcaatatggaggaaaagaccacaacaactgtcctttctcaattacacaaatgctgttaaaatgtgatcaaaccatggcatcactttgctgaaatgtttctgcacagtcctgcctcttagattacagtcagccagaaaaacatacttataaatcatcccttttctgatttttgtagtttggcaattgagagagcaatattgaggttggccggttataaggagtcccacaatagaatacccaacaaagtggctgccaggccttctcagacagccatttgctttgggttttgcttccagacgttgttccatatttttgccccaaatgtttcatggcttataccccattggtttattttatatccatggacctttctttctctgctttcttgacttaaaggttgcagcagtacatctcgtcacctaggaatagattatcaggccttgccaactagtatgcagggatggcactaaaaatggatgtgcatcttctttcacattaactactaacctataagaagttgctctgagcccatttatttaaactctttagttcaccatcagatggacctttctctcacaagctagcttattccaaattatttgtcttattaatcaccagaaaatggtcatatcaaatgttctttcttttttgttctaaaggttgcattttcagttataggggaaaaaatattttctctaagatagaagaagttatttcagtattagctataggtgctacctacctcttggggacatggccctgtttgcgctaaccattacaatgatcttttagaactctgtatccaaagagctacttcgtgacactggccatctgagtcacagatgtgaagtcgatttcactttataactaaccagtcctacatattaagacttctaagtgtccatatgcatcttttttggtataatatataaagtcagcagggactcccctttcccttagggcatactactgtcagtcagaactgcaagatgtgaatgaagctcttaacggcttggagtgtctttctggaagaaattgccttttttttttttttcatgttagcaggtaaaaaatcattcacccaatttgaagcatagaagaaaatagttgctgaggttttttaataaccattcctactatctgtgttcccttagatactcctgtaattcttaatgtgaatagtttgttaatattgctgtaaagtattatattgtatgatttgaagacagactatatgtcattttattatactccatcaatctataatatattagactgatgctttatctaaaatgctttgagtttgtataatatatcttgacaaattttactaccatatgttatgtaataaatgtgtatttttgtacttgcagaaactgctgctaacttttaaagttgtttggttttcaaggcactgataatggatatgtatgaagtccatgctgtctgttaaataaaatgccattctgcag

SEQ ID NO: 93172 - protein, 1165 aa, Artificial Sequence
  derived and/or modified sequence
MTFWIIINKKMKTLAERRRSAPSLILDKALQKRPTTRDSPSASVDTCTFLSSLVCSNRTLLIDGRAELKRGLQRQERHLFLFNDLFVVAKIKYNNNFKIKNKIKLTDMWTASCVDEVGEGNTNAMKSFVLGWPTVNFVATFSSPEQKDKWLSLLQRYINLEKEKDYPKSIPLKIFAKDIGNCAYSKTITVMNSDTANEVINMSLPMLGITGSERDYQLWVNSGKEEAPYPLIGHEYPYGIKMSHLRDSALLTPGSKDSTTPFNLQEPFLMEQLPREMQCQFILKPSRLAAAQQLSDSGHKTFKRRRSIINWAFWRGSSTHLDNLPSSPTSPMPGQLFGISLPNICENDNLPKPVLDMLFFLNQKGPLTKGIFRQSANVKSCRELKEKLNSGVEVHLDCESIFVIASVLKDFLRNIPGSIFSSDLYDHWVSVMDQGNDEEKINTVQRLLDQLPRANVVLLRYLFGVLHNIEQHSSSNQMTAFNLAVCVAPSILWPPASSSPELENEFTKKVSLLIQFLIENCLRIFGEEITSLFREVSVRCDTRENASDISCFQLNDSSYDSLENELNEDVDAPCSDLVKKLGQGSRSMDSVLTLSDYDLDQPEVEGLLTLSDFDLAHSKDEDVQMKRPLESKPVNILVYTKIPLRDHARAPSAMCTPSYLSTAAANAAKSLRRHRRCSEPSIDYLDSKLSYLREFYQKKLRKSSCDAILSQKDEDYLKQNQPLQEEGKTCFKQSLVTGTDVSKKNATTQNTKKKSLSGSEGNHVKLFPKSKPVAISVASYSPMSSQDHSKNQPFDVNTSGYSPPHTADALKGPRTHRRCSEPNIEDQNRKLTYLRGIYSKKQHKTSCEAGLLHGEEDYLKRHKSLQMEGQKLINQSLVMGIEVGKSSATNQNTEKVLPPRLNLCPRTSYSSLSSPGTSPSGSSVSSQDSAFSQISEHSVFTPTETSSPIDCTFQAQRKREDLSPDFSNASHVSGMPGPSSGQACSRPAYTKKDTMEWHSQMHSVTLHPSTWLRNGVASLKNWSLKKKAKAARPEEEKIASPKGPLEPPPHASGVPEANSLQEEQKDLPLRAAEGLSPVQSAQRCSSSPFQDSERHCSSPFSLVESRLKLCMKSHEEIEPGSQSSSGSLPWERASASSWTLEDATSPDSGPTVVCDIEDRYLTKDI

SEQ ID NO: 93173 - DNA, 3498 bp, Artificial Sequence
  derived and/or modified sequence
atgaccttctggatcatcatcaacaagaagatgaagaccctggccgagagaagaagaagcgcccccagcctgatcctggacaaggccctgcagaagagacccaccaccagagacagccccagcgccagcgtggacacctgcaccttcctgagcagcctggtgtgcagcaacagaaccctgctgatcgacggcagagccgagctgaagagaggcctgcagagacaggagagacacctgttcctgttcaacgacctgttcgtggtggccaagatcaagtacaacaacaacttcaagatcaagaacaagatcaagctgaccgacatgtggaccgccagctgcgtggacgaggtgggcgagggcaacaccaacgccatgaagagcttcgtgctgggctggcccaccgtgaacttcgtggccaccttcagcagccccgagcagaaggacaagtggctgagcctgctgcagagatacatcaacctggagaaggagaaggactaccccaagagcatccccctgaagatcttcgccaaggacatcggcaactgcgcctacagcaagaccatcaccgtgatgaacagcgacaccgccaacgaggtgatcaacatgagcctgcccatgctgggcatcaccggcagcgagagagactaccagctgtgggtgaacagcggcaaggaggaggccccctaccccctgatcggccacgagtacccctacggcatcaagatgagccacctgagagacagcgccctgctgacccccggcagcaaggacagcaccacccccttcaacctgcaggagcccttcctgatggagcagctgcccagagagatgcagtgccagttcatcctgaagcccagcagactggccgccgcccagcagctgagcgacagcggccacaagaccttcaagagaagaagaagcatcatcaactgggccttctggagaggcagcagcacccacctggacaacctgcccagcagccccaccagccccatgcccggccagctgttcggcatcagcctgcccaacatctgcgagaacgacaacctgcccaagcccgtgctggacatgctgttcttcctgaaccagaagggccccctgaccaagggcatcttcagacagagcgccaacgtgaagagctgcagagagctgaaggagaagctgaacagcggcgtggaggtgcacctggactgcgagagcatcttcgtgatcgccagcgtgctgaaggacttcctgagaaacatccccggcagcatcttcagcagcgacctgtacgaccactgggtgagcgtgatggaccagggcaacgacgaggagaagatcaacaccgtgcagagactgctggaccagctgcccagagccaacgtggtgctgctgagatacctgttcggcgtgctgcacaacatcgagcagcacagcagcagcaaccagatgaccgccttcaacctggccgtgtgcgtggcccccagcatcctgtggccccccgccagcagcagccccgagctggagaacgagttcaccaagaaggtgagcctgctgatccagttcctgatcgagaactgcctgagaatcttcggcgaggagatcaccagcctgttcagagaggtgagcgtgagatgcgacaccagagagaacgccagcgacatcagctgcttccagctgaacgacagcagctacgacagcctggagaacgagctgaacgaggacgtggacgccccctgcagcgacctggtgaagaagctgggccagggcagcagaagcatggacagcgtgctgaccctgagcgactacgacctggaccagcccgaggtggagggcctgctgaccctgagcgacttcgacctggcccacagcaaggacgaggacgtgcagatgaagagacccctggagagcaagcccgtgaacatcctggtgtacaccaagatccccctgagagaccacgccagagcccccagcgccatgtgcacccccagctacctgagcaccgccgccgccaacgccgccaagagcctgagaagacacagaagatgcagcgagcccagcatcgactacctggacagcaagctgagctacctgagagagttctaccagaagaagctgagaaagagcagctgcgacgccatcctgagccagaaggacgaggactacctgaagcagaaccagcccctgcaggaggagggcaagacctgcttcaagcagagcctggtgaccggcaccgacgtgagcaagaagaacgccaccacccagaacaccaagaagaagagcctgagcggcagcgagggcaaccacgtgaagctgttccccaagagcaagcccgtggccatcagcgtggccagctacagccccatgagcagccaggaccacagcaagaaccagcccttcgacgtgaacaccagcggctacagccccccccacaccgccgacgccctgaagggccccagaacccacagaagatgcagcgagcccaacatcgaggaccagaacagaaagctgacctacctgagaggcatctacagcaagaagcagcacaagaccagctgcgaggccggcctgctgcacggcgaggaggactacctgaagagacacaagagcctgcagatggagggccagaagctgatcaaccagagcctggtgatgggcatcgaggtgggcaagagcagcgccaccaaccagaacaccgagaaggtgctgccccccagactgaacctgtgccccagaaccagctacagcagcctgagcagccccggcaccagccccagcggcagcagcgtgagcagccaggacagcgccttcagccagatcagcgagcacagcgtgttcacccccaccgagaccagcagccccatcgactgcaccttccaggcccagagaaagagagaggacctgagccccgacttcagcaacgccagccacgtgagcggcatgcccggccccagcagcggccaggcctgcagcagacccgcctacaccaagaaggacaccatggagtggcacagccagatgcacagcgtgaccctgcaccccagcacctggctgagaaacggcgtggccagcctgaagaactggagcctgaagaagaaggccaaggccgccagacccgaggaggagaagatcgccagccccaagggccccctggagccccccccccacgccagcggcgtgcccgaggccaacagcctgcaggaggagcagaaggacctgcccctgagagccgccgagggcctgagccccgtgcagagcgcccagagatgcagcagcagccccttccaggacagcgagagacactgcagcagccccttcagcctggtggagagcagactgaagctgtgcatgaagagccacgaggagatcgagcccggcagccagagcagcagcggcagcctgccctgggagagagccagcgccagcagctggaccctggaggacgccaccagccccgacagcggccccaccgtggtgtgcgacatcgaggacagatacctgaccaaggacatctag

SEQ ID NO: 93174 - DNA, 3498 bp, Artificial Sequence
  derived and/or modified sequence
atgactttctggatcatcattaataagaagatgaaaactcttgcagaacgacgacgcagcgcccccagcctgatactcgacaaggccctacagaaaaggccaaccacacgcgattcacctagcgcaagcgtggatacctgcactttccttagttcgctggtatgttctaaccgcaccttactgattgacgggagggcggaattgaaacgcggcctgcagagacaggagaggcacctgtttttgtttaatgatctgttcgtggttgcgaagatcaaatacaataataactttaagattaagaacaaaatcaaattgactgacatgtggactgccagctgtgtggacgaggtgggcgagggcaataccaacgcaatgaaatcattcgtgctggggtggcccacagtgaattttgtggccactttttcctcgcctgaacaaaaggacaagtggctgtctctgctacaacggtacattaatctcgagaaggagaaagactatccaaaaagcatcccactgaaaatcttcgccaaggatatcggcaactgcgcatattctaagaccatcactgtcatgaatagtgatacggctaacgaagtcattaacatgagcctgcctatgctgggaattaccggatccgaaagggactatcagctgtgggtaaactcaggaaaagaagaggccccttatccactgatcggacatgagtatccctacgggatcaagatgtcacaccttagagactcagcactcctgactcctggcagtaaagattccactacccccttcaacttgcaggaaccttttctgatggaacaattaccaagagaaatgcagtgccagttcattctcaagcccagtagattggctgccgcacaacagctgtctgactctggtcacaagacattcaaaagaagaagaagcatcattaattgggctttctggcgggggtcttccacccaccttgacaacctaccttcctcgcctacaagtccgatgccaggccagttgtttgggatatccttacccaacatctgcgaaaatgataatctaccaaagccagtgctcgatatgctcttctttttgaaccagaaagggcctttgacgaaggggatttttaggcaatcggctaatgtcaagtcctgcagagaactgaaagaaaaactgaatagcggtgtggaggtccacttggactgtgaatccatcttcgtgattgccagcgtgcttaaagacttcttaaggaatatccccggtagcatcttttctagcgatctttatgatcactgggtaagtgtcatggatcaggggaatgatgaggagaagataaatacagttcagaggttactagaccagctccctcgggccaacgtggtgctcctgagataccttttcggagtgctgcacaatatcgaacagcatagttcctcgaatcagatgactgcctttaatctggctgtgtgcgttgcacccagcatcttatggcccccggcaagtagtagtccggaactggagaatgaatttaccaagaaggtttctctcctcatccaatttcttatagagaattgtctgaggatattcggagaggagatcacgagtttgtttcgcgaagtgtctgtccgatgtgatactcgagagaacgcaagtgatatatcctgcttccagctaaacgatagtagctacgactcactggagaacgaactgaatgaagacgttgacgccccatgctctgacttggtgaagaaacttggccagggtagtagaagtatggattctgtgttgacactctctgactacgacttggaccagcctgaagttgaggggctgcttacactgagcgatttcgacctagcccattcaaaggacgaggacgtgcaaatgaagcgcccgttagagagcaagccagtgaacattctggtgtatactaagataccgctacgagatcatgccagagccccgtccgccatgtgcacgccatcctaccttagcactgctgcagcaaatgcggcaaaaagcctgcgcaggcaccgcagatgctctgaaccaagcatagattatctcgacagcaaactgagctatttgagagaattctaccagaaaaaactgcgaaaatcttcttgtgacgcaattctgagtcagaaagatgaggattacctaaagcagaaccagccactccaggaggagggcaaaacctgctttaagcagagcctggtgacagggacagacgtgtcaaagaagaatgctacaacccaaaacactaaaaagaagtcactgagcggcagtgagggcaatcatgtgaaactgtttccgaagtcaaagccagtcgccatttcagtggcaagttattcacccatgtcttcacaagaccacagtaagaaccagccgtttgatgtgaacacctctggttactcccccccacacactgcagacgcactcaagggcccacgtacccatcgacgttgctccgagcccaacatcgaagatcaaaaccgtaagctgacgtatctgcgtggcatatacagtaaaaagcagcacaagacatcctgcgaagcgggcctcctgcacggagaggaggactatctgaagcgtcataagagcttacaaatggaagggcagaaattgatcaatcagtccctggttatgggaatcgaggtgggcaaatccagcgctactaaccagaacacagaaaaagtgttgcctcctagactcaacctgtgtccacgcacctcctacagttcgctaagctctcccggtacatcaccatcaggaagcagcgtatcctcgcaagatagcgccttcagccagatttcagagcactcggtattcacacctactgaaacttctagccctattgactgtacattccaggcacagaggaaacgggaggacctgtcaccagacttttctaatgcttctcacgtttccggcatgccggggccttccagcggccaagcttgcagcagacccgcgtatactaagaaagacaccatggaatggcatagtcagatgcactccgtaactctccacccaagtacatggctgaggaacggcgtggcctctctcaaaaattggtctctgaaaaaaaaggccaaggccgcgaggcccgaggaggaaaagatcgcttcacccaagggtcctctagagccccccccccacgcgagcggggtgcccgaggcaaattccttgcaagaggagcagaaagacttgcctcttcgagcagcggaggggttaagcccggtccaaagcgcccaacgctgctcatcttcccctttccaggactccgagcggcactgcagtagtccattcagcctggtagagtctcgtttgaaactgtgcatgaagtcccacgaggaaatcgagccaggctctcagtcttcaagtggatcattgccctgggaaagagcaagcgcatcaagctggacccttgaggatgccacaagccctgatagcgggcccacggtggtttgtgacatcgaggaccgctatctgactaaagatatctag

SEQ ID NO: 93175 - DNA, 3498 bp, Artificial Sequence
  derived and/or modified sequence
atgaccttttggatcatcatcaacaagaaaatgaagaccctggcggagcgcaggcgctcagcgcctagtctgatattggacaaagccctccaaaagaggcctactacgagggactctcccagcgccagcgtggacacctgcacattcttgtcctcactggtctgtagtaaccgcactctcctcattgacggaagagccgaactcaagaggggactccaacggcaggagaggcacctgtttttgtttaacgatctgtttgtggtcgccaaaatcaagtataacaacaactttaaaataaagaacaaaatcaaactgaccgacatgtggacagccagctgcgtcgatgaagtaggcgaaggcaatacgaacgcaatgaagagcttcgtacttggctggcccacagtaaactttgtggccacattttcaagccctgaacagaaagacaaatggttgagtctattgcagcgctatatcaatctggagaaagagaaagattaccctaaatccatacccctgaaaatcttcgcaaaagacattggcaactgtgcctacagtaaaaccatcactgttatgaatagcgatacagccaacgaggtgattaatatgagccttcctatgttgggcatcactgggtccgaaagggattaccagttgtgggtgaactcaggcaaggaggaggccccatacccactgatcggacatgagtatccctacggcattaagatgagtcatctgagggattctgcacttctcaccccgggaagcaaagactctacaactccctttaacctgcaggagccatttcttatggaacagctgccaagggaaatgcaatgccagttcattctgaaacctagccgactggccgccgctcagcagctcagtgactctggacataagacgtttaagcgtaggagaagcatcatcaactgggccttttggcgcggctcgtccacgcatcttgacaatcttccaagtagccctacctcccccatgcctgggcaactgtttgggattagcttgcccaacatctgcgaaaatgataatcttccgaagcctgtgctggacatgctgttcttcctgaaccagaaagggcctctgacaaaaggaatatttcgtcagagcgccaatgttaaaagctgtagggagttaaaagaaaaactcaactccggtgtggaagtccatctcgactgtgagagcattttcgtgatcgcctccgtgctgaaagatttcttaagaaacatcccagggtcaatcttcagttccgacctatacgaccattgggtgtccgtcatggaccagggcaatgacgaagagaagatcaataccgtccagcgtctattggaccagctccctcgcgccaacgttgtgctcctgcggtatctgttcggggtgctgcacaacattgagcagcatagcagtagtaatcagatgactgcttttaatctggcggtctgtgttgcgccgtccattctttggccacccgcctccagttcacctgagcttgaaaacgaatttactaagaaagtgagcttgctgatccagttccttattgagaactgcctgcgaatttttggggaagagataacctccctgttccgtgaagtctctgtacgctgcgatacccgcgagaacgctagtgacatttcctgttttcagcttaatgattcctcttatgatagtcttgagaacgagctgaacgaggatgtcgatgcgccctgctcagacctggttaaaaaactcggtcagggcagcagatctatggacagtgtgctaacactgtcagactacgaccttgatcagcccgaagttgaggggctgttgactcttagcgactttgacctggcacacagcaaggacgaggatgtgcagatgaaacggccactggaaagtaagcctgttaatatcctggtgtataccaaaattccccttagggatcatgcacgtgctccctccgcgatgtgcacaccatcctacctttcaacagccgctgctaatgcagctaagtctctgagaaggcaccgccgttgcagcgaaccttcaatcgattatttagatagcaaactgtcgtacctcagagagttctaccagaagaaattacggaagagctcatgtgatgccatcctcagccaaaaggacgaagattacctgaagcagaaccagccactgcaggaagagggaaagacctgttttaaacagagtctcgtgaccggcacggacgttagcaaaaaaaacgctacaacccagaacaccaaaaaaaaatccctctctggctctgagggaaaccatgtcaagctgttcccgaagtctaagcctgtagctatctctgtggccagttattctcctatgagctctcaagaccatagcaagaaccagccatttgatgtgaataccagcgggtatagcccaccccacaccgctgacgctctaaaggggcccagaactcatcggcggtgttcagagcctaatatcgaggaccagaatcgtaagttgacgtatctccgcggaatctacagcaagaagcagcacaaaaccagctgcgaggcaggtcttcttcacggagaggaggattatcttaagagacacaaatcactccagatggaggggcagaagttaatcaaccaatctctggtaatgggcatagaggtaggtaaatctagcgcaaccaaccagaacacagagaaggtcctaccaccccgcctgaacctgtgccctcggacgtcctacagttccttaagctcacctggtaccagtccatccgggagctccgtgtcctcccaagattccgctttctcacagataagcgaacactcagtgttcactccaactgagaccagtagcccgatagactgcacgttccaagcccagagaaagagggaggatctcagcccagacttctcaaacgcatctcacgtttccggaatgcctggcccatccagcggacaggcttgctcaaggccggcgtatacaaagaaggacaccatggagtggcactctcagatgcactcggttactttgcacccaagtacctggttgaggaacggtgtggccagtctcaagaattggagcctgaaaaaaaaggctaaagcagcacgcccagaagaggaaaagatagcaagcccgaagggccctctcgaaccaccaccacatgcttccggagtacctgaggccaattctctgcaggaggagcaaaaggatctgcccttgcgcgccgcagagggcctgtcccctgtacagtccgctcagcggtgctcatcctccccctttcaggactcagagagacactgctcttctcccttcagtctggtcgaaagcagacttaagctatgtatgaagagtcatgaagagattgagccaggctcgcaatcatccagcggtagtttaccctgggagcgagctagcgcctcaagctggaccttggaagacgctacgtctccagactcagggcctactgttgtgtgtgacatagaggacaggtacctgaccaaagacatatag

SEQ ID NO: 93176 - DNA, 3498 bp, Artificial Sequence
  derived and/or modified sequence
atgaccttctggatcatcatcaacaagaagatgaagaccctggccgagcggcggcgcagcgcccccagcctcatcctggacaaggccctgcagaagaggcccaccacccgggacagccccagcgcctctgtggacacctgcaccttcctgagcagcctggtgtgcagcaacagaaccctgctgattgatggccgggcagagctgaagaggggcctgcagaggcaggagcggcacctgttcctgttcaatgacctgtttgtggtggccaagatcaagtacaacaacaacttcaagatcaagaacaagatcaagctgacagacatgtggacagccagctgtgtggatgaggtgggggagggcaacaccaatgccatgaagagctttgtgctgggctggcccaccgtgaactttgtggccaccttcagcagccctgagcagaaggacaagtggctgagcctgctgcagcgctacatcaacctggagaaggagaaggactaccccaagagcatccccctgaagatctttgccaaggacatcggcaactgtgcctacagcaagaccatcaccgtgatgaacagcgacacagccaatgaagtcatcaacatgagcctgcccatgctgggcatcaccggcagcgagcgggactaccagctgtgggtgaacagcggcaaggaggaggccccctaccccctcatcggccacgagtacccctacggcatcaagatgagccacctgcgggacagcgccctgctgaccccaggcagcaaggacagcaccacccccttcaacctgcaggagcccttcctgatggagcagctgccccgggagatgcagtgccagttcatcctgaagcccagccggctggccgccgcccagcagctgagtgacagcggccacaagaccttcaagagaagaagaagcatcatcaactgggccttctggaggggcagcagcacccacctggacaacctgcccagcagccccaccagccccatgcctggccagctgtttggcatcagcctgcccaacatctgtgaaaatgacaacctgcccaagcctgtgctggacatgctgttcttcctgaaccagaagggccccctgaccaagggcatcttccggcagagcgccaacgtgaagagctgccgggagctgaaggagaagctgaacagcggcgtggaggtgcacctggactgtgagagcatcttcgtcatcgcctctgtgctgaaggacttcctgaggaacatccctggcagcatcttcagcagtgacctgtatgaccactgggtgtctgtgatggaccagggcaatgatgaggagaagatcaacacagtgcagaggctgctggaccagctgccccgggccaacgtggtgctgctgcgctacctgtttggagtgctgcacaacatcgagcagcacagcagcagcaaccagatgacagccttcaacctggccgtgtgtgtggcccccagcatcctgtggcccccagccagcagcagccctgagctggagaatgagttcaccaagaaggtgtccctgctgatccagttcctgattgagaactgcctgcgcatctttggagaggagatcaccagcctcttccgggaggtgtctgtgcgctgtgacacccgggagaatgccagtgacatcagctgcttccagctgaatgacagcagctatgacagcctggagaatgagctgaatgaagatgtggatgccccctgcagcgacctggtgaagaagctgggccagggcagccgctccatggacagcgtgctgaccctgagtgactatgacctggaccagcctgaggtggagggcctgctgaccctgagtgactttgacctggcccacagcaaggatgaagatgtgcagatgaagaggcccctggagagcaagcctgtgaacatcctggtgtacaccaagatccccctgcgggaccacgcccgggcccccagcgccatgtgcacccccagctacctgagcacagctgctgccaatgctgccaagagcctgcggcggcaccggcgctgcagcgagcccagcattgactacctggacagcaagctgagctacctgcgggagttctaccagaagaagctgaggaagagcagctgtgatgccatcctgagccagaaggatgaggactacctgaagcagaaccagcccctgcaggaggagggcaagacctgcttcaagcagagcctggtgactggaacagatgtgtccaagaagaatgccaccacccagaacaccaagaagaagagcctgagcggcagcgagggcaaccacgtgaagctgttccccaagagcaagcctgtggccatctctgtggccagctacagccccatgagcagccaggaccacagcaagaaccagccctttgatgtgaacaccagcggctacagccccccccacacagcagatgccctgaagggccccaggacccaccggcgctgcagcgagcccaacatcgaggaccagaacaggaagctgacctacctgcggggcatctacagcaagaagcagcacaagaccagctgtgaggccggcctgctgcatggagaggaggactacctgaagaggcacaagagcctgcagatggagggccagaagctgatcaaccagagcctggtgatgggcatcgaggtgggcaagagcagcgccaccaaccagaacacagagaaggtgctgcccccccggctgaacctgtgccccaggaccagctacagcagcctgagcagccctggcaccagccccagcggcagctctgtgagcagccaggacagcgccttcagccagatcagcgagcacagcgtcttcacccccacagagaccagcagccccatcgactgcaccttccaggcccagaggaagcgggaggacctgagcccagacttcagcaatgccagccacgtgtctggcatgcctggccccagcagcggccaggcctgcagcaggcctgcctacaccaagaaggacaccatggagtggcacagccagatgcacagcgtgaccctgcaccccagcacctggctgagaaatggagtggccagcctgaagaactggagcctgaagaagaaggccaaggccgcccggcctgaggaggagaagatcgccagccccaagggccccctggagcccccaccccacgccagcggcgtgcctgaggccaacagcctgcaggaggagcagaaggacctgcccctgcgggctgctgagggcctgagccctgtgcagagcgcccagcgctgcagcagcagccccttccaggacagcgagcggcactgcagcagccccttcagcctggtggagagccggctgaagctgtgcatgaagagccatgaggagattgagcccggcagccagagcagcagcggcagcctgccctgggagcgggccagcgccagctcctggaccctggaggatgccaccagcccagacagcggccccaccgtggtgtgtgacattgaagatcgctacctgaccaaggacatctag

SEQ ID NO: 93177 - DNA, 3498 bp, Artificial Sequence
  derived and/or modified sequence
atgaccttctggatcatcatcaacaagaagatgaagaccctggccgaaagaagacgcagcgctccgtctttgatcctcgataaagcgctccagaagcgtccaactactcgggattccccaagcgcctcggtcgacacatgcacgttcctgagtagtttggtgtgctccaaccggactctgctgatcgacggcagagcagaactgaaacgaggtctccagcggcaggagcgccacttgttcttgttcaatgacctctttgtggtggccaaaatcaagtataataacaactttaaaatcaagaacaaaataaagctgacagacatgtggactgcctcctgcgtcgacgaggtaggcgaaggtaacacaaacgcgatgaaaagttttgtgctgggatggcccacagtgaacttcgttgccacattctcctcgcccgaacaaaaggacaaatggctctcactgctgcagcgttacataaatctcgaaaaggaaaaggattatcccaagtccattccattgaagattttcgctaaggatatcggcaactgcgcctacagtaagacgataactgtaatgaattccgacacggccaatgaagtgataaatatgagcttaccaatgctgggcataaccggcagtgaacgggactaccaactgtgggtaaatagtgggaaagaggaagccccataccccttgatcggccatgaatacccctatggaataaagatgtcgcatctgcgcgactcagctttgcttacccccggctctaaggactccaccacaccatttaacctgcaggagccctttctcatggaacagctgccgcgggaaatgcagtgccagttcatactgaagccgtcccggcttgcggcagctcagcagctgtccgactctggacacaaaacatttaagcggcgccgcagcatcattaactgggccttctggcgaggcagtagcacgcacctagataacctgccctctagtcccacttcacctatgcctgggcagctgtttggtatcagcctccccaacatatgtgaaaacgataacctgcctaagccagtgctggatatgctctttttcctgaatcagaaaggtccattaactaaggggatcttcagacagtctgccaacgtcaagtcctgtcgcgagttaaaggaaaagctgaactcaggtgtcgaggtgcacttggactgcgagtcaattttcgtcatcgcaagcgtactgaaagactttctacgcaacataccaggaagtattttttcctccgacctgtacgaccattgggtaagcgtgatggaccaaggaaacgacgaagagaagattaatactgttcagcgactgctggaccagctgccgagggccaatgttgtgctgttgaggtacctttttggcgtgctgcataatattgagcagcactcttcctccaatcagatgactgcatttaatctagccgtgtgtgttgccccttcaatcttgtggccaccggcaagctcgtctcccgagctcgagaacgaatttaccaaaaaggtgtctctcctcatccagtttctcattgagaattgcctgagaatctttggggaggaaatcactagtttgttcagagaagtcagcgtgaggtgcgacacgagagaaaatgcaagcgacataagctgcttccagctgaatgatagttcttatgactccttggaaaacgagctgaacgaggatgtggacgccccatgctcggaccttgtgaagaagctcggacaggggtccaggagcatggacagcgtgctgacactgagcgactatgatctggatcagcccgaagtggagggtctcctaactctgagtgacttcgacttagcacacagcaaagatgaggacgtccagatgaaacggcccctcgaatctaagcctgtaaacatcctggtctataccaaaattcctctgcgagatcacgccagagctccatcagcaatgtgtactccatcatatctctcaaccgctgcagcaaacgcggccaaatcactgagaaggcatagacgttgctctgagccttccattgattacctggactccaagctgagttacctgcgagagttttatcaaaagaaactgcggaagtcaagctgtgatgccatcctgtcacagaaggacgaagactacttaaaacagaaccagcccctgcaggaggagggcaagacctgtttcaagcagagcctggttaccggcactgacgtgtctaagaagaatgcaactactcagaacaccaaaaaaaagtctctaagtggctctgaggggaatcatgtgaagctattccctaagtccaagcccgtcgctatcagtgtcgcttcctacagtcctatgtcctcacaagatcacagcaagaatcagcccttcgacgtaaacacatctgggtatagtcctcctcacactgccgacgccctcaagggcccaagaactcatcggcgctgcagcgagcctaatattgaagaccagaatcggaagttaacctacctgcgagggatctactctaaaaaacagcacaaaacaagttgcgaggctggactgctccatggtgaggaggattatttaaagagacataaaagcctgcaaatggaaggccaaaaattaattaatcagtccctggttatgggaatagaagtgggaaagagtagcgctactaaccagaacacagagaaagtgttaccccccaggttgaacctgtgtcctcgaactagctactcaagcctgtccagccccgggacaagcccaagcgggtcctccgtctcttcgcaggactccgccttctcccagatatcagaacattccgtttttacaccaactgagacatccagccctatagattgtacctttcaagcacagcgcaaaagggaggatctaagccccgattttagcaacgcttcacacgtgtcgggcatgccagggccctcttccggacaggcatgttcacgccctgcctataccaaaaaagatacaatggaatggcatagtcagatgcatagcgtcacgttgcacccaagtacctggctgagaaatggcgtggcttctttgaagaattggtcgttaaagaagaaagcaaaagctgccaggccggaggaggagaaaattgcttctcccaagggccccttggaacctcccccccatgcctcaggcgtaccggaagctaacagcctacaagaggagcagaaagatttacccctcagagcagccgagggcctaagccctgttcagtccgcacagagatgtagctcttcccctttccaggactcagagagacattgctcctcaccattcagcctggtggagtcaaggctcaagctgtgcatgaagagtcatgaagagatcgaaccgggctctcagagttcaagtggctcactcccatgggaaagagcttctgcctcatcatggactctggaggacgccaccagcccggatagcggacctactgttgtctgcgacattgaagatcgttatcttactaaggatatctag

SEQ ID NO: 93178 - DNA, 3498 bp, Artificial Sequence
  derived and/or modified sequence
atgaccttctggatcatcatcaacaagaagatgaagaccctggccgaacgaaggaggtctgccccctcactgatcttggacaaggccttacagaaacgccccaccacccgcgacagcccttctgcctccgttgatacgtgcacgtttctcagcagcctagtgtgttcgaacaggaccctgctcattgatggccgcgcggagctgaaacgagggctgcagcgtcaggaacgtcatctttttctgtttaacgatttgttcgtcgtcgcaaaaataaaatataacaacaattttaaaataaaaaacaaaatcaagcttacagacatgtggaccgcttcatgcgtggatgaagtcggggagggaaacaccaatgctatgaagagcttcgtcctcggctggcccacagttaacttcgttgctacgtttagctccccagaacagaaagataagtggctttctctgctacagagatacatcaatctggagaaggagaaagactaccccaagtcaatcccactgaagatctttgctaaagacatcgggaattgtgcctactccaaaacaattacagtcatgaactcagataccgcaaatgaggtcataaatatgagcctgcctatgttgggaataactggatccgagagggactaccagctctgggtcaactccgggaaggaagaagctccataccctctcattggccatgagtacccctatggaataaaaatgagtcacctgcgggattcagcactgctcactccgggatctaaagattcaaccacgccatttaatctccaagagccttttctaatggaacagttacctagggagatgcagtgccaattcatcctgaagccctctcggctggcagcggcccagcagttgtctgacagcggccataagacatttaagcgtcgacgttccatcatcaactgggccttttggcgcggatcttcaacacatctggataacttgccctcatctcccactagccctatgcctggacaacttttcgggatctcacttcccaatatttgcgagaacgacaaccttcccaagccagtcctggacatgctgttttttcttaaccagaagggtcccctgactaaggggatttttagacagtcagccaacgtgaagtcctgccgggaactcaaggaaaaactgaactcaggggtggaggtccatctggactgtgagtccatctttgtgatagcttcggtcctgaaggacttcctgcgaaatatcccaggtagcatcttttcaagtgacttgtacgaccactgggtcagcgtcatggaccagggcaacgacgaggagaagattaacaccgtgcagcgcctcctggaccagctgcccagggccaacgtagtcctgctccgatacctgtttggtgttctccataatatcgagcagcactcttcctccaaccagatgacggcttttaatcttgctgtctgcgtcgctccatcaattttgtggccacctgcttcctcctcaccggaattggagaacgagtttaccaagaaggtgagcttgttgatacaattcctgatagagaattgtctgcggatatttggcgaggaaataacatctctcttccgagaggtatctgtccggtgtgacacgcgtgagaacgcatctgatatatcctgcttccagctcaacgattcctcatacgatagtctagagaacgagctgaatgaggatgtagatgctccgtgctctgatctggtcaagaagctggggcagggttctaggtctatggatagcgtcctaaccctctccgactatgatctggatcagcctgaggtggaaggactactaactctcagcgattttgacctcgcccactccaaggatgaggatgttcagatgaagcgcccattagagagtaaacctgtcaacattttagtgtatactaagataccactccgggatcatgccagagctccttcagctatgtgcactccgagttacttgtccacagccgctgccaatgctgctaaaagtctgcgtagacatcgacgatgctctgaacctagtatagactacctcgactctaagttgtcctaccttagagaattctatcaaaaaaaacttagaaagtcgagctgtgatgccatactgtcacagaaggacgaagactacttgaaacaaaaccagccgcttcaagaagaggggaagacctgtttcaaacagtcactcgtgactggcacggacgtgtccaagaaaaatgcaaccacacaaaacaccaagaaaaaatctctgtctgggagcgaaggcaatcatgtaaagctgtttcctaaatccaagcccgttgcgatcagcgtggcctcttattctcccatgtctagtcaagatcattctaaaaatcagccctttgacgtgaatacgtccggctactcaccccctcacacggccgacgcacttaagggtccaagaacccacaggaggtgcagtgagcccaatattgaagaccaaaacagaaagctgacctacctacgcggaatctactctaaaaaacaacataaaacatcttgtgaggccggactcttgcatggagaggaggactatttgaagaggcacaaatctctgcagatggaaggacagaaacttatcaaccaatccctcgttatgggtatcgaggtagggaagtcttctgcaacaaatcaaaatactgaaaaggttctgccacccagactgaacctctgcccacgcacttcatactcaagtctttcgtcacctggcacctccccctctggaagttctgtttcttctcaagactcagctttcagccagatttctgaacattcggtttttacacccaccgaaaccagttccccaatagactgtacatttcaggcccagaggaaacgcgaagacttatccccagacttctcaaatgcttcccatgtgagcggaatgcccggcccttcatctggccaggcttgtagccgaccggcatatactaagaaggacaccatggaatggcactcccagatgcacagcgttactctgcacccatctacctggctgaggaatggcgtggccagccttaaaaactggtccctaaagaagaaggccaaggccgcgaggcctgaggaggagaagatagcgagtcctaaagggcccctcgagcctcctccacatgccagcggggtgcctgaggccaactccctacaggaggaacagaaagacctgcctctccgcgcagcagaggggctgtcacccgtgcagtctgcacagcgatgtagcagctctcctttccaggattcagagcggcactgttcttcaccatttagcctagtcgagtcacggctcaagctgtgtatgaagtctcatgaagagatagagccaggctcgcagtcttctagtggatcacttccatgggaaagggccagcgccagctcctggaccctggaggacgccacctcgcctgattccgggccgaccgtagtgtgcgatatcgaggaccgttaccttaccaaagatatctag

SEQ ID NO: 93179 - DNA, 3498 bp, Artificial Sequence
  derived and/or modified sequence
atgactttttggattattattaataaaaaaatgaaaactctggctgaacgcaggcgttctgctccaagtctcatcctggacaaagccttgcagaaacggcctaccacccgcgacagcccatcagcaagcgtggacacgtgtacatttctctcttcgcttgtgtgcagtaatcgcactctcctgatcgacgggcgagctgaactgaagcgcggtcttcagaggcaggagcggcatctgtttctatttaacgacttatttgttgtggccaaaatcaagtacaacaacaactttaagattaaaaataagattaagttgactgatatgtggacagctagctgcgtggacgaggtgggtgagggcaatactaacgcaatgaagtccttcgtgctgggttggcccaccgtgaattttgttgccacgtttagctcgccagagcagaaggacaagtggctgagcctacttcagcggtacattaatcttgaaaaagaaaaagattatccgaagtcaatccctctgaagatttttgcaaaagacatagggaactgtgcctactcaaagactatcaccgtgatgaatagcgatacagcaaatgaggtgattaatatgtcactcccaatgctagggataacagggtctgagagagattaccagctgtgggtgaactcaggcaaagaagaggctccttacccgctgattggtcatgagtacccttacggtataaagatgtcccacctccgcgattcggctctgctaacacccggtagtaaggacagtaccactccttttaatctgcaggagccctttctgatggaacaattgcctagagagatgcagtgccagttcattctcaagcctagcagactcgctgctgcacagcagctttcggatagcggtcacaaaaccttcaaacgcagaaggtcaattattaactgggccttctggcgagggtcttcaacacatttagataatctgcctagctcacccacatctcccatgccaggacagctgtttggaatatccttgcccaacatctgtgaaaacgacaacctgccaaaacccgtgttggacatgttatttttcctcaatcaaaaggggccactaacgaaggggatcttccggcagagtgcaaatgtgaaatcgtgtcgtgagcttaaagagaagctaaattctggggttgaggtccatctcgattgtgagtccatattcgttatcgcctccgtgctgaaagatttcctcagaaatatcccaggctcaattttttctagcgatctatacgaccactgggtttccgtgatggaccaggggaatgacgaagagaagatcaacaccgtgcagcgcctcctcgaccagcttcctagggccaacgtggtgctactgagatacctctttggagtattgcataacatcgagcaacacagtagttcaaaccaaatgacagcatttaatctggccgtctgcgtggcaccatccatattgtggcccccagccagttcctcaccagaactggaaaacgagttcacaaagaaggtgtctctgctaatccaatttctgattgagaattgcttgcgcatttttggtgaggagatcacaagcctgttccgcgaagtcagcgtccggtgtgatactagagaaaacgccagtgatataagctgctttcagctcaacgactcgtcttatgatagcctggagaacgaattgaacgaggatgtcgatgcgccatgcagcgacctcgtgaagaaactcggccagggatctcgtagcatggacagcgtgttgacactttcagattacgacctggatcaacccgaagtggaagggcttcttactctctccgatttcgatctggctcacagcaaagatgaagacgtccaaatgaagagacccctggaaagcaagccagtgaacattctggtctacaccaaaatccctctaagagaccacgcacgcgctccctccgcaatgtgcactccttcctacttgagcaccgcagcagcaaacgctgccaaatcactcagacgacaccggcgatgcagcgaaccttctattgactatttggatagtaagctgagttaccttagagagttctatcagaaaaagctgcgaaaatcttcatgtgatgctattctgtcccagaaagacgaagattatctcaagcaaaaccagccgctacaagaagagggcaagacttgtttcaaacagagtctggttacgggcaccgacgtgagcaaaaagaatgcgacaactcaaaatacaaagaagaagagtctgtctggttcagaagggaaccatgtaaagctttttccgaagtcgaagcccgtagccatttcagttgcctcatactctccaatgtcgtcgcaggaccactcgaagaatcagcccttcgacgtaaacacatcaggatactcaccaccacacacggcagatgcactgaaaggccctagaactcaccgccgttgcagcgaacctaatatcgaagaccagaatagaaaactgacctacctcagaggcatttattcaaagaaacagcataaaacatcttgcgaggccggacttctgcatggagaggaggactatctgaagcgccacaagtctctgcagatggaggggcagaagttgatcaatcagtctcttgtgatgggtattgaggttgggaagtcctccgcaactaaccagaacaccgaaaaagtgctgccaccccgactgaatttatgtcctcgaactagctattctagtctgagctcccccggaacttctccctcaggctcctccgtgagcagccaggattcagccttttcccagatttccgaacattccgtgttcacacccactgaaacgagttctccaatagattgtacctttcaagctcaacgcaaaagagaagatctttctcctgacttcagtaacgcctctcacgtcagcggcatgcccggtccatcctccggtcaagcatgttccagaccagcctatacaaagaaagataccatggagtggcatagccaaatgcacagcgtaaccctgcacccatccacatggctcagaaacggcgtggcttcattaaagaactggtcactgaagaagaaggcgaaggctgcccgtcccgaagaggaaaagattgccagtccaaagggaccgttagagccacctccacatgcctctggtgtaccagaggccaactccttgcaagaggaacagaaagaccttcctctccgggcagcggaggggctgagtccagtccagagtgcacagaggtgttcctccagcccctttcaagactctgagcggcattgctctagccctttctcccttgtggagtcacgcctgaaactctgcatgaaatcccacgaggagattgagccaggcagtcaaagctcatcaggatcactgccttgggaaagggcgtctgccagcagctggacgctggaggacgctacctcaccagacagtggacccactgtcgtctgcgacatcgaagatagatatcttaccaaagatatttag

SEQ ID NO: 93180 - DNA, 3498 bp, Artificial Sequence
  derived and/or modified sequence
atgaccttctggatcatcataaataagaagatgaagaccctcgccgaacgtaggagatccgccccttcccttattctggataaagccctccaaaagagacctacgacccgcgacagcccaagcgcctcagtggatacttgcacatttttgagtagcctggtctgtagtaaccgaactctcctgattgacggcagagccgaattaaaaagggggctacagcgacaagagcgacatctgttcctctttaatgacctgttcgtggtggccaaaataaaatataacaacaactttaaaattaaaaacaagatcaaacttaccgacatgtggaccgcctcttgcgtcgatgaggtgggcgaaggaaatacaaacgccatgaaatccttcgtccttggatggccaacagtgaacttcgtggccacattcagttctccggagcagaaggataagtggttgagtctgctgcagaggtatattaacctcgagaaggagaaggactatccgaaaagcattccgctcaaaatatttgctaaggacatagggaattgcgcatactctaagacaataaccgtgatgaacagtgacacggccaatgaagtcattaatatgagccttcccatgctaggtatcacgggatcggagcgggactatcaattgtgggtgaactctggcaaggaggaggccccatacccattaattgggcacgaatatccatacggaataaagatgtctcatttgcgagattctgccctgttgactcctggaagtaaggactccactacccctttcaacttgcaagagcccttcctgatggagcagctgcctagggaaatgcagtgtcagtttatactgaaaccctctcggctagctgctgcacaacagttgtccgacagcggccataaaacattcaaacgacggagaagtatcatcaattgggctttttggcggggtagtagtacccacttagataacttgcccagctcacccacctccccgatgccgggtcaactattcgggatatctctgcctaatatttgtgaaaatgacaatctccctaagccagtcctcgacatgctattctttctcaaccagaaggggccactgaccaaaggcatcttcagacagagtgcaaatgtcaagagttgccgtgagctcaaggagaagctgaactcaggggtcgaggtccatctagactgcgagagcatcttcgtgattgccagcgttttaaaggattttctacgcaacatcccaggctctatcttctcttctgacctctacgaccactgggtgagcgtaatggaccagggcaatgacgaggagaagataaataccgttcaaagattgttggatcagctgccgcgagctaatgtggtgctcctacgttaccttttcggcgtgcttcacaatattgagcagcatagctcttccaatcaaatgactgcctttaacctcgccgtgtgcgtggcaccgagtattctgtggccaccagccagtagctctccagagctggaaaacgaattcaccaagaaggtcagtctgttaatccaatttctgattgagaattgtcttcggatcttcggcgaggaaattaccagcctgttcagagaagtgtccgtgcggtgtgatactcgtgagaacgccagtgacatttcgtgtttccagctgaacgatagttcatatgactctctggaaaacgagttaaatgaagacgttgatgccccttgttccgacctcgtcaaaaagttaggtcaaggctccaggtccatggacagcgttctcaccctcagtgactacgatctggaccagcccgaggtcgaaggcctgctgaccctttcagatttcgacctggctcatagtaaggacgaggacgtccagatgaagcgtccactcgagagcaaacctgtgaatattttggtgtacacgaaaataccgctgcgcgatcacgcgcgagctcccagcgccatgtgcacaccatcgtacttgagcacagccgctgccaacgccgctaagagtctcagaaggcaccggcgatgttctgaaccgtcaatagactacctagactctaaactgagttatcttcgcgagttttatcaaaaaaagctgcgaaagtcaagctgcgacgccatcctgtcccagaaagatgaagactacctcaagcagaatcagccactccaggaagaaggcaagacttgcttcaaacagagcctagtgacaggcaccgatgtgagtaaaaagaacgctacaactcaaaacactaagaaaaagagtctgagtggctcagaagggaaccacgttaaattatttcccaagagcaagcctgtggcaattagtgttgcgtcatacagtccgatgagttcccaagaccatagcaagaatcaaccttttgatgtgaacactagtggctacagccccccacataccgccgatgcgctgaagggacctcggacccacagacgatgtagcgagcccaacattgaggatcagaaccggaaactgacttatctgcgtggtatctactcaaagaaacagcacaagacttcctgcgaagccggtttgctccacggtgaggaggactacctgaaacgccacaagtcattacagatggaggggcagaaactgattaaccagtcactcgtgatgggaattgaggttggcaaaagctcagctactaatcagaacactgagaaagtcctgccacccaggctcaacctgtgtccaagaaccagctatagctctttatcatctccgggaacgtccccatctggttctagtgtctccagccaggactccgctttttcacagatctctgaacatagcgttttcacaccaaccgagaccagtagccccattgattgcacttttcaggcgcagaggaaaagggaggatcttagccccgactttagtaacgcctcacacgtcagcggcatgccaggcccatcttccggccaagcctgttctcgtcccgcttatactaaaaaggacacaatggaatggcactcccagatgcactctgttactttacaccccagcacgtggctccggaatggcgtggcatcgcttaaaaactggagtctgaagaaaaaagccaaagctgcaaggcccgaggaggaaaagattgctagccccaaaggaccgctggagcctcccccacatgcctccggcgtacccgaagcaaatagtctgcaggaagaacagaaggaccttcctctgcgggcagcagagggcctctcacccgttcagtctgcccagagatgctctagtagcccctttcaagactccgagcgccactgttcatcacctttcagcctggtggagtcaaggcttaagctctgcatgaagtctcatgaggagattgagccgggaagccagtcctcaagtggctctctgccttgggagcgcgctagcgcttcatcttggactctggaggacgccacatctcctgatagtgggccaaccgtggtttgcgatatcgaagacaggtatcttacgaaagacatttag

SEQ ID NO: 93181 - DNA, 5826 bp, Artificial Sequence
  derived and/or modified sequence
atgacattttggattataataaataagaaaatgaaaacactagcagaaaggaggaggagcgctccatctcttatcctggataaagccctacaaaaacggcctactaccagggacagtccttctgctagtgttgacacatgcacatttctgtcatcattagtgtgctccaataggactctgctgattgatggccgggcagaactcaaaagaggcctccagaggcaggagcggcatcttttcctattcaatgatctgtttgttgtggccaaaatcaaatataacaataactttaagataaaaaataaaattaaattaactgatatgtggacagcaagctgtgtggatgaagtgggagaaggcaacaccaatgccatgaaatcctttgttttgggctggcccacagtgaactttgtggccactttcagttctccagaacaaaaggacaaatggctctctctccttcagagatacatcaatctagagaaagaaaaggactacccgaagagcattcccctcaaaatcttcgccaaggacattgggaattgtgcctactctaaaactataacagtaatgaattcagatacagcgaatgaagttatcaacatgtcattaccaatgctagggataactggctctgagagagattaccagttgtgggtcaattctggcaaagaagaggctccatacccactcattgggcatgaatatccatatggaattaaaatgagccatcttcgagactctgcactcctgacaccgggatcaaaggactctaccacccctttcaacctccaggagcccttccttatggaacagctcccccgagagatgcagtgccagttcatcctgaagcccagccgcctggctgcagcccagcaactgagtgattcaggtcataagacatttaaaaggagaagatctatcataaactgggccttctggcgaggttctagcactcacctggacaacttgccctcatcgccaacatcacctatgccaggacagctctttggaatttctctgccaaatatttgtgagaatgacaatctgcccaaacctgtcttggatatgcttttctttcttaatcaaaaaggacctctcaccaaaggtatcttcaggcaatcagccaatgtgaaatcctgcagagaactaaaagagaaattgaattctggagtcgaagtacacctagactgtgaatctatttttgtgatagcatctgtcttaaaggattttctgcgaaatattccaggaagtattttttcatcagatctctatgatcactgggtctctgtaatggatcaaggaaatgatgaagagaaaataaatactgttcaaaggctattagaccagcttccgagagccaatgttgttctcctaaggtatctttttggggtgttacacaacattgagcaacattcctcatccaatcagatgactgcatttaatttagctgtgtgtgtcgctccaagtattctttggcctcctgcttcctccagcccagaactagaaaacgaatttacaaaaaaggtttccctgcttatacaatttctgattgagaattgccttaggatatttggagaagaaatcacttccctcttcagagaggtttcagtgagatgtgacactagagagaatgcctcagatatttcttgctttcaactgaatgactcctcctatgacagcttggaaaatgagctaaatgaggatgttgatgcaccatgcagtgacttggtaaagaaacttggccaggggagcagaagcatggactctgtcttaaccctcagtgactatgatcttgaccagcccgaggtggaaggccttttaaccctaagcgactttgacttggcccattctaaagatgaagatgttcaaatgaaacggcctcttgaatccaagccggtgaacattttagtgtacacaaagatcccactgcgggatcatgccagggccccatctgccatgtgcacacccagctacctgtccacagctgcagcaaatgctgcaaaaagcctgaggcgacaccggcgttgctcagagcccagcatcgactatctggattcaaagctttcctacctcagggagttttatcagaaaaagctacgcaagtccagctgtgatgcaattctttctcaaaaagatgaagactatctgaagcagaatcaacccctccaggaggaaggaaagacatgttttaaacagagtttagtcacaggcactgatgtcagcaagaaaaatgccactactcaaaacactaagaagaaaagcttgtctggtagtgaaggaaatcacgtgaaacttttccctaagtctaagccagtggccatttctgtggcatcttatagtcctatgtcctcacaggatcattccaagaaccagccctttgatgtgaatacatctggatactccccaccacacacagcagatgccctcaagggtccaaggacacatcggcgctgctcagagcccaacatagaagaccagaaccgcaagctgacctatctcaggggaatttattcaaagaaacaacataaaaccagctgtgaagctggtctcttgcatggagaggaggattatctcaaacggcataagtctttgcaaatggaggggcagaagctcattaatcagagtttagtcatggggattgaggtgggcaagagtagtgccacaaaccaaaacactgagaaggttttacccccaagattaaacctttgcccaaggaccagctattccagcttatcctccccaggcacttccccatccggctcatcagtaagctcccaagacagtgctttttctcagatttctgaacactctgtgtttacacccactgagacttcctctccaatagattgcacttttcaggctcagagaaaacgggaagacctttctcctgactttagcaatgccagccatgtttccggaatgcccggtccctcatcagggcaggcttgcagccgcccagcctatacaaagaaggacaccatggagtggcattcacaaatgcattctgtaactcttcatcccagcacatggttgagaaatggtgtggccagtttgaaaaactggtccctcaaaaagaaagcaaaggcagccagaccagaggaagagaaaatagcttctccaaaaggacccttagagccacccccacatgcttctggtgttccagaagccaactcactgcaagaggaacaaaaagacttgcccttaagggcagctgaaggactgtcccctgtgcagtcagcccaaaggtgtagttcttctcccttccaggactcagagagacactgtagctctccattcagcctggtggagagcagacttaagctgtgcatgaagtcacatgaggaaatagagcctggtagtcagagctcttctggttctctgccttgggaaagagcctcagccagctcttggactctagaggatgcgaccagcccagactcagggcctacagtggtctgcgacattgaggacaggtatttaaccaaagacatttaagcatagtaagaatctgatgtccacaagaacaggaactgggttaataataatagacaataattattatgacccctttgtataagatacctgggagaggtagcataaggattatcattgctaatacttaggacaacgaaataattctctttattgagactacttgacaaatactttatgctaaaaattttgtcacctaagtgtttgggaggctttttcttattaaaggttgggattggtcctgtcatgtggttttagagatactaacagagggctagagaaagcatcttctgcagaggaagcacttatgggaacagtctgtgagattgatgtcctgagaagaccaagatatcaggaatgaggaataggggcctgaggagagaggggaagggtacagagaaaccatctacattccatggaatgtttttaataagtaggcaagaaaaatgccactaatcaaagcattaagtgtgtccagtaatgaagaacatcatataaaatctttccctaaatctaagccagtggccatttttgtgggatcttactaatcacgtgtccttacagaatcattccaagaaccagcccattgctacagctagagtggagaaaaacagagtgactcaaaagccatgggtaccatgatatcagttttgttggttgtatttgtcggtttgttttttcattcatgttgaagtgctttgcaaggcttcaggaaacagagttgtgaggagaaagaagaaaatggctgcccatttcagtaccctttcaaaggtatctctgcctaggaacattcttcagaaatgcaacttcttctatttagaaggtgacctcctgacagcgttcactctcaatatggaggaaaagaccacaacaactgtcctttctcaattacacaaatgctgttaaaatgtgatcaaaccatggcatcactttgctgaaatgtttctgcacagtcctgcctcttagattacagtcagccagaaaaacatacttataaatcatcccttttctgatttttgtagtttggcaattgagagagcaatattgaggttggccggttataaggagtcccacaatagaatacccaacaaagtggctgccaggccttctcagacagccatttgctttgggttttgcttccagacgttgttccatatttttgccccaaatgtttcatggcttataccccattggtttattttatatccatggacctttctttctctgctttcttgacttaaaggttgcagcagtacatctcgtcacctaggaatagattatcaggccttgccaactagtatgcagggatggcactaaaaatggatgtgcatcttctttcacattaactactaacctataagaagttgctctgagcccatttatttaaactctttagttcaccatcagatggacctttctctcacaagctagcttattccaaattatttgtcttattaatcaccagaaaatggtcatatcaaatgttctttcttttttgttctaaaggttgcattttcagttataggggaaaaaatattttctctaagatagaagaagttatttcagtattagctataggtgctacctacctcttggggacatggccctgtttgcgctaaccattacaatgatcttttagaactctgtatccaaagagctacttcgtgacactggccatctgagtcacagatgtgaagtcgatttcactttataactaaccagtcctacatattaagacttctaagtgtccatatgcatcttttttggtataatatataaagtcagcagggactcccctttcccttagggcatactactgtcagtcagaactgcaagatgtgaatgaagctcttaacggcttggagtgtctttctggaagaaattgccttttttttttttttcatgttagcaggtaaaaaatcattcacccaatttgaagcatagaagaaaatagttgctgaggttttttaataaccattcctactatctgtgttcccttagatactcctgtaattcttaatgtgaatagtttgttaatattgctgtaaagtattatattgtatgatttgaagacagactatatgtcattttattatactccatcaatctataatatattagactgatgctttatctaaaatgctttgagtttgtataatatatcttgacaaattttactaccatatgttatgtaataaatgtgtatttttgtacttgcagaaactgctgctaacttttaaagttgtttggttttcaaggcactgataatggatatgtatgaagtccatgctgtctgttaaataaaatgccattctgcagaattaaccatcc

SEQ ID NO: 93182 - DNA, 6066 bp, Artificial Sequence
  derived and/or modified sequence
gtagccttctcaatagcttagccaaatttcggcgtcctcgctctgtctgcattttccttcattgctctttcacgtttggaatgcccccgtctctgcagcctgcagacagcggaaaccgcgggtgcaaatgtgcaggggccgctgacatgaccggctgcagaagcccactcagggttacccgaacaggctagcgttcgggattgcacaagagccaaatttgcctgtgaaataaagatagtagtatctacccggatgacattttggattataataaataagaaaatgaaaacactagcagaaaggaggaggagcgctccatctcttatcctggataaagccctacaaaaacggcctactaccagggacagtccttctgctagtgttgacacatgcacatttctgtcatcattagtgtgctccaataggactctgctgattgatggccgggcagaactcaaaagaggcctccagaggcaggagcggcatcttttcctattcaatgatctgtttgttgtggccaaaatcaaatataacaataactttaagataaaaaataaaattaaattaactgatatgtggacagcaagctgtgtggatgaagtgggagaaggcaacaccaatgccatgaaatcctttgttttgggctggcccacagtgaactttgtggccactttcagttctccagaacaaaaggacaaatggctctctctccttcagagatacatcaatctagagaaagaaaaggactacccgaagagcattcccctcaaaatcttcgccaaggacattgggaattgtgcctactctaaaactataacagtaatgaattcagatacagcgaatgaagttatcaacatgtcattaccaatgctagggataactggctctgagagagattaccagttgtgggtcaattctggcaaagaagaggctccatacccactcattgggcatgaatatccatatggaattaaaatgagccatcttcgagactctgcactcctgacaccgggatcaaaggactctaccacccctttcaacctccaggagcccttccttatggaacagctcccccgagagatgcagtgccagttcatcctgaagcccagccgcctggctgcagcccagcaactgagtgattcaggtcataagacatttaaaaggagaagatctatcataaactgggccttctggcgaggttctagcactcacctggacaacttgccctcatcgccaacatcacctatgccaggacagctctttggaatttctctgccaaatatttgtgagaatgacaatctgcccaaacctgtcttggatatgcttttctttcttaatcaaaaaggacctctcaccaaaggtatcttcaggcaatcagccaatgtgaaatcctgcagagaactaaaagagaaattgaattctggagtcgaagtacacctagactgtgaatctatttttgtgatagcatctgtcttaaaggattttctgcgaaatattccaggaagtattttttcatcagatctctatgatcactgggtctctgtaatggatcaaggaaatgatgaagagaaaataaatactgttcaaaggctattagaccagcttccgagagccaatgttgttctcctaaggtatctttttggggtgttacacaacattgagcaacattcctcatccaatcagatgactgcatttaatttagctgtgtgtgtcgctccaagtattctttggcctcctgcttcctccagcccagaactagaaaacgaatttacaaaaaaggtttccctgcttatacaatttctgattgagaattgccttaggatatttggagaagaaatcacttccctcttcagagaggtttcagtgagatgtgacactagagagaatgcctcagatatttcttgctttcaactgaatgactcctcctatgacagcttggaaaatgagctaaatgaggatgttgatgcaccatgcagtgacttggtaaagaaacttggccaggggagcagaagcatggactctgtcttaaccctcagtgactatgatcttgaccagcccgaggtggaaggccttttaaccctaagcgactttgacttggcccattctaaagatgaagatgttcaaatgaaacggcctcttgaatccaagccggtgaacattttagtgtacacaaagatcccactgcgggatcatgccagggccccatctgccatgtgcacacccagctacctgtccacagctgcagcaaatgctgcaaaaagcctgaggcgacaccggcgttgctcagagcccagcatcgactatctggattcaaagctttcctacctcagggagttttatcagaaaaagctacgcaagtccagctgtgatgcaattctttctcaaaaagatgaagactatctgaagcagaatcaacccctccaggaggaaggaaagacatgttttaaacagagtttagtcacaggcactgatgtcagcaagaaaaatgccactactcaaaacactaagaagaaaagcttgtctggtagtgaaggaaatcacgtgaaacttttccctaagtctaagccagtggccatttctgtggcatcttatagtcctatgtcctcacaggatcattccaagaaccagccctttgatgtgaatacatctggatactccccaccacacacagcagatgccctcaagggtccaaggacacatcggcgctgctcagagcccaacatagaagaccagaaccgcaagctgacctatctcaggggaatttattcaaagaaacaacataaaaccagctgtgaagctggtctcttgcatggagaggaggattatctcaaacggcataagtctttgcaaatggaggggcagaagctcattaatcagagtttagtcatggggattgaggtgggcaagagtagtgccacaaaccaaaacactgagaaggttttacccccaagattaaacctttgcccaaggaccagctattccagcttatcctccccaggcacttccccatccggctcatcagtaagctcccaagacagtgctttttctcagatttctgaacactctgtgtttacacccactgagacttcctctccaatagattgcacttttcaggctcagagaaaacgggaagacctttctcctgactttagcaatgccagccatgtttccggaatgcccggtccctcatcagggcaggcttgcagccgcccagcctatacaaagaaggacaccatggagtggcattcacaaatgcattctgtaactcttcatcccagcacatggttgagaaatggtgtggccagtttgaaaaactggtccctcaaaaagaaagcaaaggcagccagaccagaggaagagaaaatagcttctccaaaaggacccttagagccacccccacatgcttctggtgttccagaagccaactcactgcaagaggaacaaaaagacttgcccttaagggcagctgaaggactgtcccctgtgcagtcagcccaaaggtgtagttcttctcccttccaggactcagagagacactgtagctctccattcagcctggtggagagcagacttaagctgtgcatgaagtcacatgaggaaatagagcctggtagtcagagctcttctggttctctgccttgggaaagagcctcagccagctcttggactctagaggatgcgaccagcccagactcagggcctacagtggtctgcgacattgaggacaggtatttaaccaaagacatttaagcatagtaagaatctgatgtccacaagaacaggaactgggttaataataatagacaataattattatgacccctttgtataagatacctgggagaggtagcataaggattatcattgctaatacttaggacaacgaaataattctctttattgagactacttgacaaatactttatgctaaaaattttgtcacctaagtgtttgggaggctttttcttattaaaggttgggattggtcctgtcatgtggttttagagatactaacagagggctagagaaagcatcttctgcagaggaagcacttatgggaacagtctgtgagattgatgtcctgagaagaccaagatatcaggaatgaggaataggggcctgaggagagaggggaagggtacagagaaaccatctacattccatggaatgtttttaataagtaggcaagaaaaatgccactaatcaaagcattaagtgtgtccagtaatgaagaacatcatataaaatctttccctaaatctaagccagtggccatttttgtgggatcttactaatcacgtgtccttacagaatcattccaagaaccagcccattgctacagctagagtggagaaaaacagagtgactcaaaagccatgggtaccatgatatcagttttgttggttgtatttgtcggtttgttttttcattcatgttgaagtgctttgcaaggcttcaggaaacagagttgtgaggagaaagaagaaaatggctgcccatttcagtaccctttcaaaggtatctctgcctaggaacattcttcagaaatgcaacttcttctatttagaaggtgacctcctgacagcgttcactctcaatatggaggaaaagaccacaacaactgtcctttctcaattacacaaatgctgttaaaatgtgatcaaaccatggcatcactttgctgaaatgtttctgcacagtcctgcctcttagattacagtcagccagaaaaacatacttataaatcatcccttttctgatttttgtagtttggcaattgagagagcaatattgaggttggccggttataaggagtcccacaatagaatacccaacaaagtggctgccaggccttctcagacagccatttgctttgggttttgcttccagacgttgttccatatttttgccccaaatgtttcatggcttataccccattggtttattttatatccatggacctttctttctctgctttcttgacttaaaggttgcagcagtacatctcgtcacctaggaatagattatcaggccttgccaactagtatgcagggatggcactaaaaatggatgtgcatcttctttcacattaactactaacctataagaagttgctctgagcccatttatttaaactctttagttcaccatcagatggacctttctctcacaagctagcttattccaaattatttgtcttattaatcaccagaaaatggtcatatcaaatgttctttcttttttgttctaaaggttgcattttcagttataggggaaaaaatattttctctaagatagaagaagttatttcagtattagctataggtgctacctacctcttggggacatggccctgtttgcgctaaccattacaatgatcttttagaactctgtatccaaagagctacttcgtgacactggccatctgagtcacagatgtgaagtcgatttcactttataactaaccagtcctacatattaagacttctaagtgtccatatgcatcttttttggtataatatataaagtcagcagggactcccctttcccttagggcatactactgtcagtcagaactgcaagatgtgaatgaagctcttaacggcttggagtgtctttctggaagaaattgccttttttttttttttcatgttagcaggtaaaaaatcattcacccaatttgaagcatagaagaaaatagttgctgaggttttttaataaccattcctactatctgtgttcccttagatactcctgtaattcttaatgtgaatagtttgttaatattgctgtaaagtattatattgtatgatttgaagacagactatatgtcattttattatactccatcaatctataatatattagactgatgctttatctaaaatgctttgagtttgtataatatatcttgacaaattttactaccatatgttatgtaataaatgtgtatttttgtacttgcagaaactgctgctaacttttaaagttgtttggttttcaaggcactgataatggatatgtatgaagtccatgctgtctgttaaataaaatgccattctgcag

SEQ ID NO: 93183 - protein, 640 aa, Artificial Sequence
  derived and/or modified sequence
MLNKMTLHPQQIMIGPRFNRALFDPLLVVLLALQLLVVAGLVRAQTCPSVCSCSNQFSKVICVRKNLREVPDGISTNTRLLNLHENQIQIIKVNSFKHLRHLEILQLSRNHIRTIEIGAFNGLANLNTLELFDNRLTTIPNGAFVYLSKLKELWLRNNPIESIPSYAFNRIPSLRRLDLGELKRLSYISEGAFEGLSNLRYLNLAMCNLREIPNLTPLIKLDELDLSGNHLSAIRPGSFQGLMHLQKLWMIQSQIQVIERNAFDNLQSLVEINLAHNNLTLLPHDLFTPLHHLERIHLHHNPWNCNCDILWLSWWIKDMAPSNTACCARCNTPPNLKGRYIGELDQNYFTCYAPVIVEPPADLNVTEGMAAELKCRASTSLTSVSWITPNGTVMTHGAYKVRIAVLSDGTLNFTNVTVQDTGMYTCMVSNSVGNTTASATLNVTAATTTPFSYFSTVTVETMEPSQDEARTTDNNVGPTPVVDWETTNVTTSLTPQSTRSTEKTFTIPVTDINSGIPGIDEVMKTTKIIIGCFVAITLMAAVMLVIFYKMRKQHHRQNHHAPTRTVEIINVDDEITGDTPMESHLPMPAIEHEHLNHYNSYKSPFNHTTTVNTINSIHSSVHEPLLIRMNSKDNVQETQI

SEQ ID NO: 93184 - protein, 41 aa, Artificial Sequence
  derived and/or modified sequence
MLNKMTLHPQQIMIGPRFNRALFDPLLVVLLALQLLVVAGL

SEQ ID NO: 93185 - DNA, 1923 bp, Artificial Sequence
  derived and/or modified sequence
atgctgaacaagatgacacttcaccctcagcaaattatgattggaccacggttcaatagagctctcttcgatccccttttagtggttctgctggcgctgcagttgctagtcgtggcgggcttggttcgggcacagacctgtcctagtgtctgttcttgcagcaatcagttctctaaggtgatctgtgtgcgaaagaaccttagggaagtcccagacggaatttccactaatacacgtcttctgaatttgcacgagaatcaaatccagataatcaaagtgaactcttttaagcacctcaggcacctggagatactccagctcagcagaaatcacatcagaaccatagagataggcgcttttaacgggctggccaatctcaacaccctcgagttgtttgacaaccgcctcacaaccattcctaacggggcattcgtttacctctccaagctgaaagagctatggttgcggaacaatccaatcgaatctataccatcctatgcgttcaaccgcattccatctctccggcgactcgaccttggcgagctaaaacgactatcctacatttctgaaggcgccttcgaggggctgtcgaacttgcggtacttgaatcttgcaatgtgcaatctcagagaaatccccaacttgactcccctcatcaagctggatgaactggatttgtctggcaaccacctgtccgcgatcaggccaggatcattccagggattaatgcacttgcaaaagctctggatgatccagtcacagatccaggtgattgaacgcaacgcttttgataacctgcaatctctcgtcgagattaatttggcacataataatctgacccttttgcctcacgacctgtttactcccttgcaccacctggagcgcatccatctccaccataatccgtggaattgcaactgcgacattctgtggctttcgtggtggattaaagacatggcaccaagtaatactgcttgttgcgcaaggtgcaatacaccacccaatctaaaaggccggtatatcggggagctggaccagaattatttcacttgctacgctcccgtgatcgtcgagcccccagctgatctgaacgtgacggaagggatggctgccgagcttaagtgccgggccagcactagtctgacaagcgtgtcctggatcaccccaaatggcactgttatgacccatggcgcctacaaagttcggatcgcagttctgagtgatggaacactgaacttcacaaacgtaacagtccaggataccggtatgtacacttgtatggtttctaactccgtggggaacacaaccgcatcggccactcttaatgttaccgcggcaactactactcctttctcgtattttagcacagtgacagtggagacaatggagccctcacaggacgaggccaggactacagataacaacgtcggtcctacacctgtggtcgactgggagacaaccaacgtgaccacaagcctcacacctcagtccaccaggtcaacagagaagacatttacaatcccagtgaccgatattaacagcggcatacccggaattgacgaggtgatgaaaaccactaaaataattatcgggtgttttgtggcgatcacactaatggccgccgtgatgcttgttatcttctacaagatgaggaaacagcaccaccgccaaaatcaccatgcccccactcgcacagtggagatcattaacgttgacgatgagataaccggggacacacccatggaaagccatctcccaatgccggcaatcgaacacgagcatctcaatcactataattcatacaaatccccatttaaccacaccaccactgttaacacgatcaacagcatccactcctctgttcacgaacccctactgattcgtatgaattccaaggataacgttcaggaaacccagatttag

SEQ ID NO: 93186 - DNA, 1923 bp, Artificial Sequence
  derived and/or modified sequence
atgttgaataagatgacgctgcacccccagcagattatgatagggccgcgctttaaccgagcacttttcgacccattactagtggtgttgttggcactgcagttgctggttgttgccggcctagtgagagcacaaacctgtccttcggtgtgcagctgcagcaatcaattttctaaggtcatctgcgtacgcaaaaacctgcgtgaagtccccgatggtatcagtaccaacactcggctcctcaacttgcatgaaaaccagatccaaatcatcaaggtgaactccttcaagcatctccgtcatctcgagattctccagctgtcgcggaaccacattagaactatcgagataggggcattcaatggacttgcgaatctgaacactctggagctttttgacaaccgactgacaactatacctaatggagccttcgtctatctttcaaaactcaaagagctttggttgcggaacaaccctatcgagtccatacctagctatgcctttaaccgcatcccaagccttcggaggctggatctcggcgaactgaaacgcttgtcctacataagcgagggagcatttgagggtttaagcaacctgcgctatctgaatctagccatgtgcaacctgcgggaaatccccaacctgacaccgctcatcaaactcgatgagctcgatctttctggcaaccacctatctgccatcagacctggtagctttcagggactgatgcatttacagaaactttggatgattcagagtcagattcaggtgatcgagcgcaatgcctttgacaacctccagagcctggtagagatcaatctcgctcacaataacctgacactgttgccccacgacctatttactccactgcaccacctggagagaattcacctgcatcataacccttggaattgcaactgcgatatcctatggctgtcctggtggattaaggatatggcaccatccaatactgcgtgttgtgcccgctgtaacaccccacccaatctcaagggtagatacatcggtgagttagaccaaaattatttcacatgttatgctccggttatcgttgagccacctgcggatctgaacgttacagaggggatggccgcagagctgaaatgtcgcgcttcaacatctttaaccagcgtcagctggatcacgcctaatggtaccgtgatgacccacggtgcgtataaggtacgcatagcagtgctgtcggatggcaccctgaattttacaaacgtgaccgtgcaggataccggtatgtatacttgtatggtctccaattctgtcgggaacacaactgcctctgccacactcaatgtcactgccgccacaactactcccttctcttatttttccacggtgaccgtggaaacgatggaaccctcacaagatgaagcaaggaccacggataataatgtggggccaacacctgtcgtggattgggagacgaccaatgtaaccactagtcttacaccacagagtacacgctcaactgaaaaaaccttcacaattcccgttaccgatatcaatagcgggattccagggatcgacgaggtaatgaagacgacaaagattatcatcggctgtttcgttgccatcactctgatggccgcagtcatgctggttattttctacaaaatgcggaaacagcaccataggcaaaaccatcacgcaccaacaaggaccgtggaaatcatcaacgtggacgacgaaattacaggggatacacctatggagtcacatctccccatgcccgccatcgagcatgaacacctgaatcactataactcatataagtctccatttaatcacactactaccgtgaatactattaattcaattcattcctctgtgcatgagccgctgctgataagaatgaactccaaggacaatgtgcaggaaacccaaatttag

SEQ ID NO: 93187 - DNA, 1923 bp, Artificial Sequence
  derived and/or modified sequence
atgctcaataagatgaccctgcatccccaacaaattatgatcgggccaaggttcaatagagccctcttcgacccacttctggttgttttactcgccctgcagctgctggtggttgccggactggtgcgggctcaaacatgcccgtctgtgtgttcctgctcaaatcaattttccaaagtcatttgtgtccgcaagaatctccgcgaggtcccggatggcattagcactaatactcgcctgcttaacctgcacgagaaccagatccagatcatcaaagtcaattcttttaagcacctgcgacacctggaaatcctgcagctctctcgcaatcatattagaactattgagatcggggcatttaatggcctggctaatttgaacacgttggaactgtttgacaatagattaacaacaatacccaacggcgcctttgtgtatttgagtaagctgaaagaattgtggctccggaacaatcccatcgaatctatcccatcatacgccttcaataggattccttctttgagacggctggatctcggagagctgaagagattgtcgtatatatcagagggcgccttcgaaggcttgtccaacctgcggtacctgaatctggcaatgtgtaacctgcgcgagatccctaacctaactcccctcatcaagctggatgaactggatctgagtgggaaccacctgtctgcaattaggcccggatcttttcagggtttgatgcatctgcaaaagctgtggatgatacagtcccagattcaggtcattgagcggaacgccttcgacaacctgcagtcactggtagagataaacctggcccataacaatttaactctgctgccccacgatctgttcacacccttgcatcacttggaaagaattcacctacaccacaatccatggaattgcaattgtgatatcttatggttgtcttggtggatcaaggatatggccccctccaacacagcttgttgcgcacggtgcaacacacctcctaatcttaagggtcggtatatcggggagctggaccagaattattttacttgctacgctcctgtaatcgtggaacctcctgccgacctaaatgtgaccgaggggatggcagctgagctgaaatgcagagcctctacatcgctgacatccgtaagttggattaccccgaatggtacggtgatgacccatggcgcttataaagtgaggattgcggtcctgagtgatggtacactgaactttacaaatgtgacagtccaggacacaggcatgtatacttgcatggtctccaatagcgtaggcaacacaacggcgagcgccacattgaatgttacagctgctacaacgacacccttttcttatttttccactgtaaccgtcgagactatggaaccatcacaggatgaagccagaacgaccgacaataacgtgggccccaccccggttgtggactgggagacgacaaatgttactacatcactcactccgcagtcaacccggagcacagaaaagacttttacaataccggtaactgacataaattccggcattccaggtatagatgaagtgatgaaaaccacgaaaatcattatcgggtgcttcgttgctattaccctcatggccgctgtgatgttagtcatcttttataagatgcggaagcagcatcacaggcagaatcatcacgccccgacaaggactgtggagataattaatgtcgatgatgagatcacaggagacacaccaatggagagtcacctgcccatgcccgctatcgaacatgagcacctgaatcactacaacagctacaagtctccttttaaccacactacaacagttaacactattaatagtattcattcatcagtgcacgagcctttattgatacggatgaattccaaggacaatgtccaggagactcagatctag

SEQ ID NO: 93188 - DNA, 1923 bp, Artificial Sequence
  derived and/or modified sequence
atgctcaacaaaatgacattgcatccacagcagattatgatcgggcctaggttcaaccgcgctctgttcgaccctctattagttgtgctgcttgcactgcagctgttagtggttgccggtctcgtaagggcacagacatgcccttcagtctgttcttgttccaatcagttttccaaggtcatttgcgtgcgcaaaaacctcagggaagtgccggatggcatttcgacaaacacccgccttctaaatctgcacgagaaccagatccagatcataaaagtaaatagttttaagcaccttaggcacttggaaattctacaactatcacgaaatcacatcaggactatcgagattggagcgtttaacggactagcaaatctaaacacgctggagctctttgacaaccggttaactacaattccaaatggtgcctttgtctacctaagcaagctgaaggaactatggctgcgcaataacccaatcgagtcaatcccttcctatgcctttaaccgtatcccttctctccgtaggttggaccttggcgagcttaagagactaagttatatttcagaaggagcatttgagggactgagcaacctgaggtatctcaatctggccatgtgcaacctgagagagattccaaacctgaccccgctgattaagctggacgaacttgatctgtccggcaatcacctctccgcgattcggccagggtcctttcaaggacttatgcatctccaaaaactatggatgatccagtcccagatccaggtgatcgagagaaatgcattcgacaatttgcagtccttagtcgaaatcaacctcgctcacaacaacctcactcttctgccacacgacttatttactccgcttcaccatctggagagaatccacctgcaccacaacccttggaattgcaactgcgacatcctgtggctgtcttggtggataaaagacatggcccccagcaacactgcatgttgtgcaagatgtaacacccctccgaaccttaagggacgctacattggagagttggatcagaattatttcacttgctatgccccagtgattgtggaaccacccgcggatttaaacgtaaccgaaggaatggctgccgaactgaagtgtcgcgcgagcacatctttaacttctgtgagctggatcacccccaacggcactgtcatgacacacggcgcctataaggtgaggatcgcggtcctgtcagacggaaccctcaacttcacaaatgtgacagtgcaggacacaggcatgtacacgtgcatggtttctaactccgttgggaacaccacagcttcagccacacttaacgttacagctgccacaaccacacctttctcttacttttcaacagtcaccgtggagaccatggagccttcacaggatgaagcccgaacaaccgacaacaacgtcggtcctacacctgtggtggattgggaaacaacaaatgtcacaacgagtctgacccctcagtccaccaggagtaccgagaagacattcacgataccggtgaccgatatcaactctggcatacccgggatagacgaggtgatgaagacaactaagataatcatcgggtgttttgtggccataactttaatggcagcagtgatgctggtgatcttttacaaaatgagaaagcagcatcatcgccaaaatcaccacgccccaaccagaacggttgaaatcatcaacgtggatgacgagatcacaggtgacacacccatggaatcccacctccctatgcccgcaatcgagcatgaacacttaaaccattataattcatataagtcgccgttcaaccatactactactgtcaacacaatcaacagtattcattcttcggtgcacgagcctctccttataaggatgaactccaaagataacgtgcaggaaacgcagatctag

SEQ ID NO: 93189 - DNA, 126 bp, Artificial Sequence
  derived and/or modified sequence
atgctgaacaagatgactctccacccgcaacagataatgatcggcccgaggttcaatagggcgctgtttgatcctctactggtggttttactggctctccagctcctcgttgtggcaggtttgtag

SEQ ID NO: 93190 - DNA, 1923 bp, Artificial Sequence
  derived and/or modified sequence
atgctgaacaagatgaccctgcacccccagcagatcatgattggcccccgcttcaacagagccctgtttgaccccctgctggtggtgctgctggccctgcagctgctggtggtggccggcctggtgcgggcccagacctgccccagcgtgtgcagctgcagcaaccagttcagcaaggtgatctgtgtgaggaagaacctgcgggaggtgcctgatggcatcagcaccaacacccggctgctgaacctgcacgagaaccagatccagatcatcaaggtgaacagcttcaagcacctgcggcacctggagatcctgcagctgagcaggaaccacatccgcaccattgaaattggagccttcaacggcctggccaacctgaacaccctggagctgtttgacaaccggctgaccaccatccccaatggagcctttgtgtacctgagcaagctgaaggagctgtggctgaggaacaaccccatcgagagcatccccagctatgccttcaaccgcatccccagcctgcggcggctggacctgggggagctgaagaggctgagctacatcagcgagggcgcctttgagggcctgagcaacctgcgctacctgaacctggccatgtgcaacctgcgggagatccccaacctgacccccctcatcaagctggatgagctggacctgagcggcaaccacctgagcgccatccggcccggcagcttccagggcctgatgcacctgcagaagctgtggatgatccagagccagatccaggtgattgaaagaaatgcctttgacaacctgcagagcctggtggagatcaacctggcccacaacaacctgaccctgctgccccatgacctcttcacccccctgcaccacctggagcgcatccacctgcaccacaacccctggaactgcaactgtgacatcctgtggctgtcctggtggatcaaggacatggcccccagcaacacagcctgctgtgcccgctgcaacaccccacccaacctgaagggccgctacatcggggagctggaccagaactacttcacctgctacgcccctgtgattgtggagcccccagctgacctgaatgtgacagagggcatggctgctgagctgaagtgccgggccagcaccagcctgacctctgtgtcctggatcacccccaacggcaccgtgatgacccacggggcctacaaggtgagaattgctgtgctgagtgatggcaccctgaacttcaccaacgtgacagtgcaggacaccggcatgtacacctgcatggtgagcaacagcgtgggcaacaccacagccagcgccaccctgaatgtgacagctgccaccaccacccccttctcctacttcagcacagtgacagtggagaccatggagcccagccaggatgaggcccggaccacagacaacaacgtgggccccacccctgtggtggactgggagaccaccaacgtgaccaccagcctgaccccccagagcaccaggagcacagagaagaccttcaccatccctgtgacagacatcaacagcggcatccctggcattgatgaggtgatgaagaccaccaagatcatcatcggctgctttgtggccatcaccctgatggctgctgtgatgctggtgatcttctacaagatgaggaagcagcaccaccggcagaaccaccacgcccccaccaggacagtggagatcatcaacgtggatgatgagatcaccggggacacccccatggagagccacctgcccatgcctgccatcgagcacgagcacctgaaccactacaacagctacaagagccccttcaaccacaccaccaccgtgaacaccatcaacagcatccacagctctgtgcatgagcccctgctgatccgcatgaacagcaaggacaacgtgcaggagacccagatctag

SEQ ID NO: 93191 - DNA, 126 bp, Artificial Sequence
  derived and/or modified sequence
atgctgaacaagatgaccctgcacccccagcagatcatgattggcccccgcttcaacagagccctgtttgaccccctgctggtggtgctgctggccctgcagctgctggtggtggccggcctgtag

SEQ ID NO: 93192 - DNA, 4054 bp, Artificial Sequence
  derived and/or modified sequence
aagaaagaggggcagaggagggaaggcgactgcagtccgaaaggagcttttggaagctaggaccctaagcgtcaggacgtggcattggtcgagagaaagcctgggctggcaagagctgccgccggtgctgggagagcatttatttgggagaaaaagaggggagagagcagagggagggggaggaagagagttcaaaccgaagtggatggaaggggactggggtttctgccgcgcagggagccgtgagccagggcgatggcgctaagggcggcgcggagcagctgcgctcccgagaacgcgtctcctcgcagaggactagcagacatcgggaaggtctgcgccaacgggaaccaacttgtggctccaaaatgtacccaacgcagctggaaatgagatcaaagctgcagttgcatttgagaaggatgagaagagccagcgattagggaattttttttttacccgttttcttcctttttctttttttcttctttttctttttttctttcttttttcgtgtgtgttttttttaatttgcctaccaccctgtctgtcccctcacttcgccctccccatttgaaataaaagccccagtctcaacttccatcacctcggcgctcccggagccactaccggctgatggaggagaaggggacccgggggctggcaggggccaccggcgagggaccgcatcctgcgtctcccccgtgatcccggccccgaccgcggagttctgcaacacctggaggatctggaccgggtgctgggggtgggggcggggacagaggaaggaaaggcaccccgagccttaaaaagaaaaaaaaaaagtagcggggggaggaatgggtttcttcttgacagctgacggagccttgaaattttcctccactacctccgcccccgcccccgcccccgccccccgcactccatttaacgtgagattatgaaattgcagaggcggtggagggaaggagacaggatataaccggagtttggaggggagaggggaaggtggctggccgggtggctgaaatcaaaaattcaattgcgcactgggttgtgatgagaaatctaatcagatctttggcgaaggggccggccggaaggatggagagtgggggggaagttgctccccaaattcttcgaaggggaggctggggagaggaattgaccatgtaaaaggagacttttttttttggtggtggtggctgttgggtgccttgcaaaaatgaaggatgcaggacgcagctttctcctggaaccgaacgcaatggataaactgattgtgcaagagagaaggaagaacgaagctttttcttgtgagccctggatcttaacacaaatgtgtatatgtgcacacagggagcattcaagaatgaaataaaccagagttagacccgcgggggttggtgtgttctgacataaataaataatcttaaagcagctgttcccctccccccccccaaaaaaaaggatgattggaaatgaagaaccgaggattcacaaagaaaaaagtatgttcatttttctctataaaggagaaagtgagccaaggagatatttttggaatgaaaagtttggggcttttttagtaaagtaaagaactggtgtggtggtgttttcttttctttttgaatttcccacaagaggagaggaaattaataatacatctgcaaagaaatttcagagaagaaaagttgaccgcggcagattgaggcattgattgggggagagaaaccagcagagcacagttggatttgtgcctatgttgactaaaattgacggataattgcagttggatttttcttcatcaacctcctttttttttaatttttattccttttggtatcaagatcatgcgttttctcttgttcttaaccacctggatttccatctggatgttgctgtgatcagtctgaaatacaactgtttgaattccagaaggaccaacaccagataaattatgaatgttgaacaagatgaccttacatccacagcagataatgataggtcctaggtttaacagggccctatttgaccccctgcttgtggtgctgctggctcttcaacttcttgtggtggctggtctggtgcgggctcagacctgcccttctgtgtgctcctgcagcaaccagttcagcaaggtgatttgtgttcggaaaaacctgcgtgaggttccggatggcatctccaccaacacacggctgctgaacctccatgagaaccaaatccagatcatcaaagtgaacagcttcaagcacttgagacacttggaaatcctacagttgagtaggaaccatatcagaaccattgaaattggggctttcaatggtctggcgaacctcaacactctggaactctttgacaatcgtcttactaccatcccgaatggagcttttgtatacttgtctaaactgaaggagctctggttgcgaaacaaccccattgaaagcatcccttcttatgcttttaacagaattccttctttgcgccgactagacttaggggaattgaaaagactttcatacatctcagaaggtgcctttgaaggtctgtccaacttgaggtatttgaaccttgccatgtgcaaccttcgggaaatccctaacctcacaccgctcataaaactagatgagctggatctttctgggaatcatttatctgccatcaggcctggctctttccagggtttgatgcaccttcaaaaactgtggatgatacagtcccagattcaagtgattgaacggaatgcctttgacaaccttcagtcactagtggagatcaacctggcacacaataatctaacattactgcctcatgacctcttcactcccttgcatcatctagagcggatacatttacatcacaacccttggaactgtaactgtgacatactgtggctcagctggtggataaaagacatggccccctcgaacacagcttgttgtgcccggtgtaacactcctcccaatctaaaggggaggtacattggagagctcgaccagaattacttcacatgctatgctccggtgattgtggagccccctgcagacctcaatgtcactgaaggcatggcagctgagctgaaatgtcgggcctccacatccctgacatctgtatcttggattactccaaatggaacagtcatgacacatggggcgtacaaagtgcggatagctgtgctcagtgatggtacgttaaatttcacaaatgtaactgtgcaagatacaggcatgtacacatgtatggtgagtaattccgttgggaatactactgcttcagccaccctgaatgttactgcagcaaccactactcctttctcttacttttcaaccgtcacagtagagactatggaaccgtctcaggatgaggcacggaccacagataacaatgtgggtcccactccagtggtcgactgggagaccaccaatgtgaccacctctctcacaccacagagcacaaggtcgacagagaaaaccttcaccatcccagtgactgatataaacagtgggatcccaggaattgatgaggtcatgaagactaccaaaatcatcattgggtgttttgtggccatcacactcatggctgcagtgatgctggtcattttctacaagatgaggaagcagcaccatcggcaaaaccatcacgccccaacaaggactgttgaaattattaatgtggatgatgagattacgggagacacacccatggaaagccacctgcccatgcctgctatcgagcatgagcacctaaatcactataactcatacaaatctcccttcaaccacacaacaacagttaacacaataaattcaatacacagttcagtgcatgaaccgttattgatccgaatgaactctaaagacaatgtacaagagactcaaatctaaaacatttacagagttacaaaaaacaaacaatcaaaaaaaaagacagtttattaaaaatgacacaaatgactgggctaaatctactgtttcaaaaaagtgtctttacaaaaaaacaaaaaagaaaagaaatttatttattaaaaattctattgtgatctaaagcagac

SEQ ID NO: 93193 - DNA, 3085 bp, Artificial Sequence
  derived and/or modified sequence
ggagtttggaggggagaggggaaggtggctggccgggtggctgaaatcaaaaattcaattgcgcactgggttgtgatgagaaatctaatcagatctttggcgaaggggccggccggaaggatggagagtgggggggaagttgctccccaaattcttcgaaggggaggctggggagaggaattgaccatgtaaaaggagacttttttttttggtggtggtggctgttgggtgccttgcaaaaatgaaggatgcaggacgcagctttctcctggaaccgaacgcaatggataaactgattgtgcaagagagaaggaagaacgaagctttttcttgtgagccctggatcttaacacaaatgtgtatatgtgcacacagggagcattcaagaatgaaataaaccagagttagacccgcgggggttggtgtgttctgacataaataaataatcttaaagcagctgttcccctccccccccccaaaaaaaaggatgattggaaatgaagaaccgaggattcacaaagaaaaaagtatgttcatttttctctataaaggagaaagtgagccaaggagatatttttggaatgaaaagtttggggcttttttagtaaagtaaagaactggtgtggtggtgttttcttttctttttgaatttcccacaagaggagaggaaattaataatacatctgcaaagaaatttcagagaagaaaagttgaccgcggcagattgaggcattgattgggggagagaaaccagcagagcacagttggatttgtgcctatgttgactaaaattgacggataattgcagttggatttttcttcatcaacctcctttttttttaatttttattccttttggtatcaagatcatgcgttttctcttgttcttaaccacctggatttccatctggatgttgctgtgatcagtctgaaatacaattggcaaacgcactgcctacttacagcatagagacccccagtggagagctagactgtttgaattccagaaggaccaacaccagataaattatgaatgttgaacaagatgaccttacatccacagcagataatgataggtcctaggtttaacagggccctatttgaccccctgcttgtggtgctgctggctcttcaacttcttgtggtggctggtctggtgcgggctcagacctgcccttctgtgtgctcctgcagcaaccagttcagcaaggtgatttgtgttcggaaaaacctgcgtgaggttccggatggcatctccaccaacacacggctgctgaacctccatgagaaccaaatccagatcatcaaagtgaacagcttcaagcacttgagacacttggaaatcctacagttgagtaggaaccatatcagaaccattgaaattggggctttcaatggtctggcgaacctcaacactctggaactctttgacaatcgtcttactaccatcccgaatggagcttttgtatacttgtctaaactgaaggagctctggttgcgaaacaaccccattgaaagcatcccttcttatgcttttaacagaattccttctttgcgccgactagacttaggggaattgaaaagactttcatacatctcagaaggtgcctttgaaggtctgtccaacttgaggtatttgaaccttgccatgtgcaaccttcgggaaatccctaacctcacaccgctcataaaactagatgagctggatctttctgggaatcatttatctgccatcaggcctggctctttccagggtttgatgcaccttcaaaaactgtggatgatacagtcccagattcaagtgattgaacggaatgcctttgacaaccttcagtcactagtggagatcaacctggcacacaataatctaacattactgcctcatgacctcttcactcccttgcatcatctagagcggatacatttacatcacaacccttggaactgtaactgtgacatactgtggctcagctggtggataaaagacatggccccctcgaacacagcttgttgtgcccggtgtaacactcctcccaatctaaaggggaggtacattggagagctcgaccagaattacttcacatgctatgctccggtgattgtggagccccctgcagacctcaatgtcactgaaggcatggcagctgagctgaaatgtcgggcctccacatccctgacatctgtatcttggattactccaaatggaacagtcatgacacatggggcgtacaaagtgcggatagctgtgctcagtgatggtacgttaaatttcacaaatgtaactgtgcaagatacaggcatgtacacatgtatggtgagtaattccgttgggaatactactgcttcagccaccctgaatgttactgcagcaaccactactcctttctcttacttttcaaccgtcacagtagagactatggaaccgtctcaggatgaggcacggaccacagataacaatgtgggtcccactccagtggtcgactgggagaccaccaatgtgaccacctctctcacaccacagagcacaaggtcgacagagaaaaccttcaccatcccagtgactgatataaacagtgggatcccaggaattgatgaggtcatgaagactaccaaaatcatcattgggtgttttgtggccatcacactcatggctgcagtgatgctggtcattttctacaagatgaggaagcagcaccatcggcaaaaccatcacgccccaacaaggactgttgaaattattaatgtggatgatgagattacgggagacacacccatggaaagccacctgcccatgcctgctatcgagcatgagcacctaaatcactataactcatacaaatctcccttcaaccacacaacaacagttaacacaataaattcaatacacagttcagtgcatgaaccgttattgatccgaatgaactctaaagacaatgtacaagagactcaaatctaaaacatttacagagttacaaaaaacaaacaatcaaaaaaaaagacagtttattaaaaatgacacaaatgactgggctaaatctactgtttcaaaaaagtgtctttacaaaaaaacaaaaaagaaaagaaa

SEQ ID NO: 93194 - DNA, 2650 bp, Artificial Sequence
  derived and/or modified sequence
ctggaagatcagatacatggaacctttgaaaactgattatttttctccgatatgacttaaaaaaaaataaaaagaagaaaagaaaatagagtagtgcacggcaagctagaggattgtaaattttccttggtgaactttgaggatccataaagaagaaatggttctctttactgcgaggctgcaaggtcacccaatgagagaggggccaaataagctggaacatcatctaatacactgaatgtaggagttactggaaaagcaagaataacttatgcggattaacaatatggaaacatcctgagactactttggaatcgccataaattaagtgggttccagttttgcaaacagagaaacgggtccatgaacaatttgctacaggtataaagaagtatctgcagaaatccagagcacttattaaacttctttgagttttctcaggaagatcaatacctgttggagaaattttactaagagcaagaaactgagagtgagaaagaagggactggccagagttactcagctagacagtgacagacaacagtggaacttctgattggcaaacgcactgcctacttacagcatagagacccccagtggagagctagactgtttgaattccagaaggaccaacaccagataaattatgaatgttgaacaagatgaccttacatccacagcagataatgataggtcctaggtttaacagggccctatttgaccccctgcttgtggtgctgctggctcttcaacttcttgtggtggctggtctggtgcgggctcagacctgcccttctgtgtgctcctgcagcaaccagttcagcaaggtgatttgtgttcggaaaaacctgcgtgaggttccggatggcatctccaccaacacacggctgctgaacctccatgagaaccaaatccagatcatcaaagtgaacagcttcaagcacttgagacacttggaaatcctacagttgagtaggaaccatatcagaaccattgaaattggggctttcaatggtctggcgaacctcaacactctggaactctttgacaatcgtcttactaccatcccgaatggagcttttgtatacttgtctaaactgaaggagctctggttgcgaaacaaccccattgaaagcatcccttcttatgcttttaacagaattccttctttgcgccgactagacttaggggaattgaaaagactttcatacatctcagaaggtgcctttgaaggtctgtccaacttgaggtatttgaaccttgccatgtgcaaccttcgggaaatccctaacctcacaccgctcataaaactagatgagctggatctttctgggaatcatttatctgccatcaggcctggctctttccagggtttgatgcaccttcaaaaactgtggatgatacagtcccagattcaagtgattgaacggaatgcctttgacaaccttcagtcactagtggagatcaacctggcacacaataatctaacattactgcctcatgacctcttcactcccttgcatcatctagagcggatacatttacatcacaacccttggaactgtaactgtgacatactgtggctcagctggtggataaaagacatggccccctcgaacacagcttgttgtgcccggtgtaacactcctcccaatctaaaggggaggtacattggagagctcgaccagaattacttcacatgctatgctccggtgattgtggagccccctgcagacctcaatgtcactgaaggcatggcagctgagctgaaatgtcgggcctccacatccctgacatctgtatcttggattactccaaatggaacagtcatgacacatggggcgtacaaagtgcggatagctgtgctcagtgatggtacgttaaatttcacaaatgtaactgtgcaagatacaggcatgtacacatgtatggtgagtaattccgttgggaatactactgcttcagccaccctgaatgttactgcagcaaccactactcctttctcttacttttcaaccgtcacagtagagactatggaaccgtctcaggatgaggcacggaccacagataacaatgtgggtcccactccagtggtcgactgggagaccaccaatgtgaccacctctctcacaccacagagcacaaggtcgacagagaaaaccttcaccatcccagtgactgatataaacagtgggatcccaggaattgatgaggtcatgaagactaccaaaatcatcattgggtgttttgtggccatcacactcatggctgcagtgatgctggtcattttctacaagatgaggaagcagcaccatcggcaaaaccatcacgccccaacaaggactgttgaaattattaatgtggatgatgagattacgggagacacacccatggaaagccacctgcccatgcctgctatcgagcatgagcacctaaatcactataactcatacaaatctcccttcaaccacacaacaacagttaacacaataaattcaatacacagttcagtgcatgaaccgttattgatccgaatgaactctaaagacaatgtacaagagactcaaatctaaaacatttacagagttacaaaaaacaaacaatcaaaaaaaaagacagtttattaaaaatgacacaaatgactgggcta

SEQ ID NO: 93195 - DNA, 2669 bp, Artificial Sequence
  derived and/or modified sequence
ggtatttcgtacagtaggagatttcaacaacgtgacaatattctctaggcacttgggctcactgtctgtagcccccaccccccgcctttcgccacctccttgcttccctactcccccttctgcttttgcctttgatgagtttttggcttactttttggcggagtctcttggacacgtttttgctggtgctggaagatcagatacatggaacctttgaaaactgattatttttctccgatatgacttaaaaaaaaataaaaagaagaaaagaaaatagagtagtgcacggcaagctagaggattgtaaattttccttggtgaactttgaggatccataaagaaggagttactggaaaagcaagaataacttatgcggattaacaatatggaaacatcctgagactactttggaatcgccataaattaagtgggttccagttttgcaaacagagaaacgggtccatgaacaatttgctacaggtataaagaagtatctgcagaaatccagagcacttattaaacttctttgagttttctcaggaagatcaatacctgttggagaaattttactaagattggcaaacgcactgcctacttacagcatagagacccccagtggagagctagactgtttgaattccagaaggaccaacaccagataaattatgaatgttgaacaagatgaccttacatccacagcagataatgataggtcctaggtttaacagggccctatttgaccccctgcttgtggtgctgctggctcttcaacttcttgtggtggctggtctggtgcgggctcagacctgcccttctgtgtgctcctgcagcaaccagttcagcaaggtgatttgtgttcggaaaaacctgcgtgaggttccggatggcatctccaccaacacacggctgctgaacctccatgagaaccaaatccagatcatcaaagtgaacagcttcaagcacttgagacacttggaaatcctacagttgagtaggaaccatatcagaaccattgaaattggggctttcaatggtctggcgaacctcaacactctggaactctttgacaatcgtcttactaccatcccgaatggagcttttgtatacttgtctaaactgaaggagctctggttgcgaaacaaccccattgaaagcatcccttcttatgcttttaacagaattccttctttgcgccgactagacttaggggaattgaaaagactttcatacatctcagaaggtgcctttgaaggtctgtccaacttgaggtatttgaaccttgccatgtgcaaccttcgggaaatccctaacctcacaccgctcataaaactagatgagctggatctttctgggaatcatttatctgccatcaggcctggctctttccagggtttgatgcaccttcaaaaactgtggatgatacagtcccagattcaagtgattgaacggaatgcctttgacaaccttcagtcactagtggagatcaacctggcacacaataatctaacattactgcctcatgacctcttcactcccttgcatcatctagagcggatacatttacatcacaacccttggaactgtaactgtgacatactgtggctcagctggtggataaaagacatggccccctcgaacacagcttgttgtgcccggtgtaacactcctcccaatctaaaggggaggtacattggagagctcgaccagaattacttcacatgctatgctccggtgattgtggagccccctgcagacctcaatgtcactgaaggcatggcagctgagctgaaatgtcgggcctccacatccctgacatctgtatcttggattactccaaatggaacagtcatgacacatggggcgtacaaagtgcggatagctgtgctcagtgatggtacgttaaatttcacaaatgtaactgtgcaagatacaggcatgtacacatgtatggtgagtaattccgttgggaatactactgcttcagccaccctgaatgttactgcagcaaccactactcctttctcttacttttcaaccgtcacagtagagactatggaaccgtctcaggatgaggcacggaccacagataacaatgtgggtcccactccagtggtcgactgggagaccaccaatgtgaccacctctctcacaccacagagcacaaggtcgacagagaaaaccttcaccatcccagtgactgatataaacagtgggatcccaggaattgatgaggtcatgaagactaccaaaatcatcattgggtgttttgtggccatcacactcatggctgcagtgatgctggtcattttctacaagatgaggaagcagcaccatcggcaaaaccatcacgccccaacaaggactgttgaaattattaatgtggatgatgagattacgggagacacacccatggaaagccacctgcccatgcctgctatcgagcatgagcacctaaatcactataactcatacaaatctcccttcaaccacacaacaacagttaacacaataaattcaatacacagttcagtgcatgaaccgttattgatccgaatgaactctaaagacaatgtacaagagactcaaatctaaaacatttacagagttacaaaaaacaaacaatcaaaaaaaaagacagtttattaaaaatgacacaaatgactgggcta

SEQ ID NO: 93196 - DNA, 583 bp, Artificial Sequence
  derived and/or modified sequence
acttctcaggcaaagagcatgccaacagcctttctcttctgctttgcttgtctgtggtggatactagcaacctatgtggttctaaagtatcaagctgagattatagtatcaatgagttggaacatcaatagtgccaagtgccatttaaaaatcttttcatcttcttgtgtgttgcttttggagaggaaatgttttcagatgtggtttctagccttgcagaaaaatggcattttcaggctgtatgggactcttacatcatctagtttcaatcacctcattttgcagagcaagaaactgagagtgagaaagaagggactggccagagttactcagctagacagtgacagacaacagtggaacttctgattggcaaacgcactgcctacttacagcatagagacccccagtggagagctagactgtttgaattccagaaggaccaacaccagataaattatgaatgttgaacaagatgaccttacatccacagcagataatgataggtcctaggtttaacagggccctatttgaccccctgcttgtggtgctgctggctcttcaacttcttgtggtggctggtctg

SEQ ID NO: 93197 - DNA, 1923 bp, Artificial Sequence
  derived and/or modified sequence
atgctgaacaagatgaccctgcacccccagcagatcatgatcggccccagatttaatagagctctgttcgatcctttgctcgtggtgcttttagccctacagttgctggtggtggctgggttagtgagggctcaaacatgtccatctgtgtgttcgtgttcaaaccagtttagcaaggtcatttgcgtgaggaaaaaccttagggaggtgccagacggcatttcaactaatacgaggctcctgaatctacacgagaatcagatccagatcatcaaggttaattcctttaagcacctgaggcacctggaaatcttgcagctgtcgcggaaccacatcaggacaatcgagatcggtgcgttcaatggactggctaacctaaatacactagagctgttcgacaatcggcttactacgatacccaacggcgcatttgtatacctatcaaagctaaaggagttgtggttgcgcaacaatcctatagagtcgattccctcatacgcatttaacaggattccctccctcagaagactcgatctcggcgagctgaagcgcctaagttacatctccgagggcgcctttgaggggctaagcaatctgcgctatcttaacttagccatgtgtaacctgcgcgagatccccaacttgacaccactcattaagctggatgaactggatctttccggcaaccacctttctgctatccgacctgggagcttccagggcttgatgcacctccaaaagctttggatgattcagtcccaaatacaagtaatagagcggaacgcgtttgacaatctgcaaagtctggtggaaattaacctagcgcataataatttgacactactgccccatgacctctttacccctctgcaccacctcgagcgcattcatctccaccataatccttggaattgcaattgtgatattttatggttgtcgtggtggatcaaggacatggcacccagcaatactgcgtgttgtgctagatgtaacacccctccgaatctcaagggcaggtatattggggaactggaccagaattattttacttgttacgccccagtcattgtcgaaccacctgcagacctgaatgtgactgagggaatggcagccgagctcaagtgccgggcttctacaagcctgacctcagtgagctggatcactccaaatggcactgttatgacgcacggcgcctacaaggtcagaatcgctgtgctgagtgacggaacactgaatttcactaacgtcaccgtgcaggacactggaatgtacacctgtatggttagcaacagcgtggggaataccactgccagtgctacactcaacgttacagccgccactactacccccttttcttattttagtacggttacagtggagacaatggagcccagccaagacgaggcacgcacgaccgacaacaacgtgggaccaacacctgttgtcgactgggagacgactaatgtgacaacttccctgacgccacagtctacccggtccactgagaaaacttttaccatacccgtaacagacatcaactctgggatcccaggtatcgatgaggttatgaagaccacaaaaatcatcatcggctgcttcgttgctattacgttgatggccgccgttatgctagtcatcttctataagatgcgcaagcagcaccacagacagaatcaccacgctcccactcgtaccgtcgaaataatcaacgtggatgacgaaatcaccggagacaccccgatggagtcccatctacctatgccagctatagaacacgaacatctgaatcactataatagttacaaatctcccttcaatcatacaactaccgtgaacacgatcaacagcattcactcttcagtgcacgaaccactgctgataaggatgaatagtaaggacaacgttcaggagacacaaatatag

SEQ ID NO: 93198 - DNA, 1923 bp, Artificial Sequence
  derived and/or modified sequence
atgctgaacaagatgaccctgcacccccagcagatcatgatcggccctcgctttaaccgggcccttttcgacccattgctcgtggtgcttctcgcgctgcagctccttgtggtggctggcctggtgcgcgctcaaacctgccctagtgtgtgttcctgttcgaaccagttctccaaagttatttgtgttcgcaagaatcttcgcgaggtacccgatggcatcagcactaacacacggttgcttaacttgcacgaaaatcagattcagatcatcaaggtcaactcattcaaacatctgagacatttggaaattcttcagttatcaagaaatcatattcgcaccattgaaatcggagcctttaacggtctcgccaatctaaacacccttgagctatttgataacaggctgactacaatccctaatggcgcattcgtgtacttgagtaaattaaaagagctgtggttgagaaacaatccaattgaatccataccatcttatgcatttaatagaatcccaagcctccgtcggctggacctcggtgagctcaaaagactgagttacatcagcgagggtgcattcgagggtctgagcaatttgagataccttaacttggccatgtgtaaccttcgtgaaatcccaaatctgacacccctcatcaaacttgacgagctggacttatctggcaaccatctatctgctattcgaccagggtcatttcagggccttatgcatttgcagaaactctggatgattcaaagccagattcaggtaattgaaagaaatgctttcgataaccttcagtcactagttgagattaacttagctcacaacaacttgactctcttgccgcacgatctgtttactcccctgcaccacctggaaagaatccacctgcaccataacccatggaactgcaattgtgacattctgtggctgagctggtggattaaagatatggcgcccagtaacaccgcctgttgcgcaagatgcaacacacctccaaatctgaaaggccgttatattggggagctggatcagaattatttcacttgctatgctcctgttatagttgagccgcccgcagatcttaacgtcactgaaggtatggctgccgaactgaagtgccgtgcctctacgtcactcacaagcgtctcatggatcacaccaaatggcacagttatgactcacggcgcatataaggtgagaatcgccgttctaagcgatggcacacttaattttactaacgtgacagtccaggacacaggcatgtatacttgcatggtgagcaacagtgtgggcaatacaacagcatcggcgacccttaatgttaccgccgccaccacaacaccattcagttacttctcaacagttacagtcgagacgatggagccaagtcaggatgaggccagaacaaccgataataatgtgggtcccacgccagtggtggattgggagaccactaacgtcactacaagcctcactccccagagcacccgatctactgagaagacttttaccattcccgtgaccgatattaactctgggatccccgggatagacgaggtaatgaagacaacaaagatcattattggctgttttgtggccattactctcatggcagctgtcatgctcgtcatcttttacaagatgcggaaacagcatcataggcagaaccaccatgctccaacgcgaacggtggagataatcaacgtagatgacgagatcaccggggacacccctatggaatctcacctccctatgccggcaatcgagcacgagcacctaaatcattacaacagctacaaaagcccattcaaccataccacgaccgttaacaccataaatagcatccattcctctgtgcacgaacctctgcttattaggatgaactctaaggataatgttcaagagacccaaatctag

SEQ ID NO: 93199 - DNA, 1923 bp, Artificial Sequence
  derived and/or modified sequence
atgctgaacaagatgaccctgcacccccagcagatcatgatcggcccaaggtttaacagggctctctttgacccactgctggtggttctgctggccctgcagcttctcgtggtggctgggctggtaagagcacagacctgtccatccgtgtgcagttgcagtaaccaattttccaaggtaatctgcgtgcggaagaacctgagggaagtacctgacggaatatctactaacacgagactgttgaacctccacgaaaatcaaatccaaattattaaggtcaactcattcaaacatttgcggcatttagaaatactgcaactgagcagaaatcacatccgcactatcgaaataggtgctttcaacggacttgctaacctgaacacgttagagctttttgacaacagactgactactatcccaaacggcgccttcgtgtacctctcaaaactgaaagagttgtggttgaggaacaatcccatcgaatcaatcccttcctacgctttcaatcgcatcccttccttgagaaggttggacctcggagaactgaagcgattatcatatatctccgagggggcctttgagggcctgtctaacttgaggtatcttaacctggcaatgtgcaacctgcgtgaaatccccaacttgaccccactaatcaagttggacgagcttgaccttagtgggaatcacctgtccgcaatcaggcctggatcatttcagggcctgatgcatctgcagaagctatggatgatacagtcacagatccaggtgatagagcgcaacgcctttgacaatctccagtcattggtagagataaatctggctcacaataatctgacactgctgccccacgacctctttacaccgctccatcacctggaacgaattcacctgcaccacaacccgtggaattgcaactgcgatattctgtggctctcctggtggataaaagatatggctcctagtaataccgcttgttgcgccaggtgtaacaccccccccaatctgaagggccgctacatcggtgagctcgaccagaattacttcacctgctatgcccctgtgatagttgaaccaccggccgacttaaacgtgacagaaggcatggccgcagaactcaaatgccgagcctcaacatctctaacctccgtttcctggataacaccaaacggcaccgtaatgacacacggggcttataaggtcagaatagccgtgctgagcgacggaacactgaacttcactaatgttaccgtccaggataccggtatgtacacctgcatggtctcgaatagcgtgggaaataccactgcttccgccactcttaacgttacggccgccaccactacaccattttcctatttctcaacggtgacagtcgagaccatggaaccctcgcaggatgaggcaagaacaaccgataacaacgttgggccaacaccagtggtcgattgggagacgaccaacgtgaccacgtctcttacccctcagtctaccaggtccacagagaaaacctttacgatccctgttaccgacatcaatagcgggatccccgggattgatgaagtgatgaagactaccaagatcattatcgggtgcttcgtggcaatcacactgatggccgccgtgatgctggtgatcttctacaagatgcgcaaacaacaccatcgtcagaaccaccacgcgcctacaaggacagtggagatcatcaatgttgatgatgagattaccggtgacacgccaatggaatcacatctgcctatgccagcaatagagcatgagcacttaaatcactataactcctataagtcacctttcaaccacacaacaaccgtgaatacgattaatagtatccattccagcgtgcacgagccgctattgatcagaatgaactctaaggataacgtacaggaaacccagatctag

SEQ ID NO: 93200 - DNA, 1923 bp, Artificial Sequence
  derived and/or modified sequence
atgctgaacaagatgaccctgcacccccagcagatcatgatcggcccaagattcaacagggcactgttcgaccccctgctagtggtgctgctggcactacagctgctcgtggtcgctggccttgtcagggctcagacgtgcccgagtgtatgttcctgctccaaccagttttccaaagtgatctgtgttcggaagaacctccgcgaagtacctgatggaatcagcaccaacacacggttgttgaacctgcacgaaaatcagattcaaattatcaaggtgaactcgtttaaacatttgaggcacctggaaattctccagctctccaggaatcacataagaacaatcgagattggagcatttaatggtctcgccaacttgaacaccctggaactgttcgataatcgtctgacgaccatcccaaatggcgcatttgtctatttgtcaaaattgaaagagctttggctgcgtaataatcctattgagtccatcccctcatacgctttcaacagaattccgagtctacgccggctcgatctgggcgagctcaaacggctgtcatacatttccgaaggggcgttcgaggggttgtctaatctgcgctatttaaacttagccatgtgtaatctgagagaaatcccaaacctgactcctctgataaagctggacgagctggatttgagtggaaatcatttgagcgcaattcggcccggaagttttcaggggcttatgcatctgcagaaattatggatgattcagagccaaatccaggttatcgagaggaatgcttttgataatctgcagtctctggttgagataaacctcgctcacaacaatctaacccttcttccgcacgacctgtttacccccctgcatcacctagagcgcattcatcttcatcataatccatggaactgcaattgcgacattctgtggttgagctggtggatcaaggacatggcaccttcaaatacagcatgctgcgcacgctgtaacactccacccaatctgaaaggcaggtacatcggggaattagaccaaaattatttcacgtgttacgcccccgtcattgtcgagccccccgctgacctaaacgtaaccgaggggatggcagcggagcttaagtgtagggcctcaacttccttgacgtccgtaagctggatcactcctaatggtactgtgatgacccacggggcctacaaggttaggatagctgtgttgagcgacggtactctgaactttacaaacgtgaccgtgcaggacactggaatgtatacctgcatggtgtctaactccgtcggtaataccaccgcgtccgccacactcaatgttaccgctgcaaccactacacctttctcctactttagtaccgttaccgttgaaacaatggaaccatctcaggacgaagcccgaacaacagataataatgtcgggccaactccagtggtcgactgggagacaactaatgtgaccacgtctctcactccgcaatccaccagatctactgagaagactttcaccatacctgtgacagatattaacagtgggattccagggattgatgaggtgatgaaaactaccaaaatcattattggatgcttcgttgctattacgttgatggcagcagtgatgttggttatcttctacaagatgagaaaacagcaccaccgccaaaaccatcatgctccaacaagaacagttgagattataaatgttgatgacgagatcaccggtgacacccccatggagagccacctgccaatgcctgcaattgaacacgagcaccttaaccattacaacagctacaagtccccgtttaaccacactacaactgtgaatacgattaatagcatccattctagtgtccacgagccactgctcattcgcatgaacagcaaggacaacgtgcaagaaacacagatatag

SEQ ID NO: 93201 - DNA, 126 bp, Artificial Sequence
  derived and/or modified sequence
atgctgaacaagatgaccctgcacccccagcagatcatgatcggcccgaggttcaaccgcgctctgtttgaccctctgttggtagtgctgctggccctccagctgttagtcgtggccgggctatag

SEQ ID NO: 93202 - DNA, 1923 bp, Artificial Sequence
  derived and/or modified sequence
atgctaaataagatgacactgcatccccaacaaatcatgattggacccagatttaatcgtgccctgttcgacccattactggttgtcctgctggcactgcagttactcgtggtggccggacttgtccgcgcacaaacatgcccctctgtttgctcatgttccaatcaattctcaaaggtgatctgcgtgcgcaagaatttacgggaggtgccagacggaatttccacaaatactcgactgctgaacttgcacgaaaaccagatacagattataaaagtcaattcgtttaaacacctgaggcatctggaaatactccaactcagtcgtaaccacatccgcacaatcgagatcggcgctttcaatggcctcgccaacctcaatacccttgagcttttcgacaatcggcttaccaccatcccgaatggcgcatttgtctatttgtctaagcttaaggaactttggctgcgcaacaaccctatcgagagtataccatcatacgcttttaacaggataccaagcctgaggagactggatctgggcgagttgaagaggctgagctacatttcagaaggcgctttcgagggactgtcaaacctgagatatctgaacctagccatgtgtaacctcagggagatcccgaatttgacccccctgatcaagctggacgaacttgatttgtccggtaaccatttgtctgcaatacggcctggcagctttcagggactgatgcacctgcagaagctctggatgattcagtcgcagattcaggtcattgagcgcaatgccttcgacaatttgcagtcattggtggagatcaatctggcgcacaataacctcactctcctgccccacgacttattcaccccccttcatcatctggaaagaattcacctgcaccataacccttggaactgcaattgtgacattctctggctctcttggtggattaaggacatggccccttctaatacagcatgctgcgctcggtgtaacacaccacctaatttgaaaggtcggtatataggagaactggaccaaaattacttcacctgctacgccccagtcatagttgaaccacctgcagatcttaacgtgacagagggaatggccgcagaattaaaatgtcgcgcaagtacctccttgacaagcgtaagctggataactccaaacggcactgtgatgactcacggggcttataaggtgaggatcgcagtgttatccgacggaaccctcaacttcaccaacgtgaccgtgcaggacaccgggatgtatacctgtatggtcagtaattcagtggggaacactactgcaagtgcaacactaaatgtaaccgcagctacgactacgccttttagctacttctcaaccgtgactgtcgaaactatggagccttcccaggacgaggcccgaaccaccgacaataatgttggcccaacaccagtagtcgactgggaaacaactaatgtaaccactagcctgactccacagtcgactaggagtaccgagaaaacttttacgatcccagttactgatataaactcaggaatcccaggtatagatgaggtgatgaagaccactaagatcattattgggtgtttcgtcgctatcaccctgatggccgcagtcatgctggtgatattttacaagatgagaaagcagcaccaccgccagaaccaccatgcgcctactcggaccgtggaaattatcaatgtggatgatgaaatcacaggagatacaccaatggaatcccatttgccgatgccagcaattgaacatgagcatctgaaccactataatagctataaatctccattcaaccatacaacaacagtaaacacaatcaacagcatccattcctcagttcacgagcccctgttaatcagaatgaatagcaaggataatgtccaggaaactcagatttag

SEQ ID NO: 93203 - DNA, 1923 bp, Artificial Sequence
  derived and/or modified sequence
atgttgaataagatgaccctgcaccctcagcagatcatgatcggccctcggtttaatcgcgcactcttcgatcctctgctggtcgttctcctggccctccagctgctggtggtggccggactcgtgagagcccaaacatgtcctagcgtctgttcttgttctaatcagttttcaaaggtaatttgtgtacgcaaaaatttgcgggaggtgcccgacggaatttctacaaacacacgcctgctgaacctgcacgaaaatcagatacagataatcaaggtgaacagctttaagcacctgcggcacctggagatcctgcagctgtccagaaatcatatcagaactattgagatcggtgcctttaacgggctcgctaatttgaataccctggagctgttcgacaaccgcctgaccactatcccaaacggtgcatttgtgtatttgtccaagctgaaggaattatggctccgcaataatcctatcgagagcatcccgtcgtacgccttcaatagaatccctagcctcagaagactcgacctcggcgaactgaagcggctctcatacatttcggaaggagcattcgaaggcttgtcaaatctacggtatctgaacttggccatgtgcaacctccgcgaaattcccaaccttacacctttaattaagctggatgagcttgatctatcaggaaatcatctgtccgctatcaggcctggctctttccagggtctcatgcacctgcagaagttatggatgatccaatcccagatccaggtcattgaaaggaacgccttcgataacttacagtcactggtggaaattaatctggcccacaacaatctcactctacttccccacgacctgttcaccccccttcaccacctggagcgtatccaccttcaccacaacccctggaattgcaattgcgacatcctatggctgagttggtggatcaaggacatggccccatccaataccgcctgctgcgcgagatgcaacacaccaccgaatctgaagggtcgctatatcggcgagctggatcagaattatttcacctgttacgcacctgtgattgttgaaccacccgctgatctcaatgtgaccgagggaatggcagcagaactgaaatgcagagcttctacctcactcacatctgtctcctggattacccctaatggaactgtcatgactcatggtgcttataaagtccggatagccgtgttgtccgatggaacccttaacttcacaaacgtgactgtgcaagatactggcatgtacacgtgtatggtgtcaaactccgtggggaacacaaccgccagtgctaccctgaacgttaccgccgctaccacgactccattctcttatttctctaccgtcacagtcgaaactatggaaccctcccaggacgaggcacgaaccacagacaacaatgtcggacccactccggtggtcgactgggagacaacgaatgtgactacctccctgactccccagtctacccgaagcactgaaaaaacatttactatcccggtgacagatattaactccgggattcctggcatcgacgaggtcatgaagaccaccaagatcatcataggttgttttgtcgccatcactctgatggcagccgtgatgcttgtgattttttacaagatgaggaaacaacatcatcgccaaaatcatcacgccccaacaagaactgtggagatcattaacgtggatgatgagatcacaggggataccccaatggagagccatcttccaatgcccgcaattgaacatgagcacctcaaccactataactcctataagtcaccctttaaccatacaacaaccgttaacactatcaactcaatccatagcagcgtgcatgagccactgctaataaggatgaattctaaggacaacgtccaggagactcagatttag

SEQ ID NO: 93204 - DNA, 1923 bp, Artificial Sequence
  derived and/or modified sequence
atgttgaataaaatgacattacatccccaacagattatgatcggacctaggtttaaccgggcactattcgaccctcttttggtcgtgctcctagctctccagctactggtggtggccggtctggtgagggctcagacctgccccagtgtgtgctcatgctcaaatcagtttagcaaagtcatctgtgtgagaaaaaacctaagagaagtccctgacgggatctcaaccaatacccggctgttgaacctccacgagaaccagatacagatcatcaaagttaactccttcaagcacctgagacatctcgaaatattgcaactatctcgcaatcacatccggacaattgagataggagctttcaatggactggccaacctgaacacccttgagttgttcgacaaccgattgactaccatccccaatggggcattcgtctatctctccaagcttaaggagctctggttgaggaataatcctattgagagcatccctagctacgcgttcaaccggatcccatctttaagaaggctggacctgggagagctcaagagactctcctacatcagcgaaggcgcatttgagggtctgagtaacctgagatatcttaacctggctatgtgtaatcttagggaaattcctaatctcaccccactgatcaagctggatgagcttgatctgtccgggaatcacctgtccgccattagacctggtagttttcagggacttatgcatctgcagaagctttggatgatccagagccaaattcaggtgatcgagagaaatgccttcgacaatcttcagtcactggtggaaatcaacttggcccacaacaaccttactctgctaccacatgatctgttcactcctttacaccatcttgagcgcatccacctccaccacaacccatggaattgcaattgtgatatactctggctttcctggtggattaaagacatggcaccatctaatactgcctgttgtgcccgttgtaacactccacccaacctaaaaggcagatatattggtgaactcgaccagaattactttacttgctatgcaccagttatagtggagcctcctgccgatctcaacgtgaccgaagggatggctgcagagctcaagtgccgggctagcacttcactgacctccgtctcctggattacgcccaatgggactgtcatgacgcatggagcttataaggtcagaatcgcagtgcttagcgatggtacattaaattttaccaacgtgaccgtccaggatacagggatgtatacttgtatggtgtcaaacagtgtgggaaacactacagcctccgccaccttaaatgtgactgctgctaccacaactcccttttcatatttctcgaccgtgactgttgagaccatggagcccagccaagacgaggccaggacgacagataacaatgtgggtcctacaccagttgtggattgggagaccacgaacgtgaccacttcccttacacctcagtctacgcgaagtacagagaagaccttcacaatccctgtgaccgatatcaacagtgggatcccaggaattgatgaagtgatgaaaaccacgaagatcattataggatgtttcgtggccattactctcatggccgctgtaatgctggtcattttttacaagatgcggaagcagcaccaccgccaaaaccaccatgcccctactcgcacagtggaaattataaatgtagacgatgagattacaggggatacacctatggagtctcacctccccatgccagctatcgaacacgaacatctgaaccattacaactcctacaaaagtcctttcaaccacacaactaccgttaataccataaatagcatccacagcagcgtgcacgaaccattgctcattcgcatgaactcaaaagataacgtgcaagagacccagatctag

SEQ ID NO: 93205 - DNA, 1923 bp, Artificial Sequence
  derived and/or modified sequence
atgctgaataagatgactcttcaccctcaacagattatgattggacctcggttcaatagagccctttttgatccgctgcttgttgttctgctcgccctgcagctcctggttgtcgccggactggtacgagctcaaacgtgcccgtctgtgtgcagctgttccaatcagttcagcaaagtgatttgcgttcgtaaaaacctgcgcgaggtcccggacggaatatcaaccaatacgcgactgctcaacttgcacgagaaccagatccagattattaaagtaaatagttttaagcatctgagacacctcgaaattctgcagctgtctcggaaccacattaggacgatcgaaatcggggcttttaacgggcttgctaatctcaacaccttggagctcttcgataaccgccttacgacaatcccaaacggcgcttttgtgtatctttcgaaacttaaggagctttggcttcgaaacaacccaattgagtccatcccctcctatgcctttaaccggattccatcactccgcaggctggacctcggtgagctcaagcggttatcctacatttctgaaggggcatttgagggattgtctaacctgcggtaccttaacctggccatgtgtaacctccgtgagatccctaatctgacaccactgataaaactggatgagctcgacctgagcggaaaccatctgtctgcgattcggccaggatcctttcagggactgatgcacctccagaaactttggatgatacagagccagatccaagtaatcgaaagaaacgccttcgataatctgcagtccctcgttgagatcaacctggctcataataatctgaccctgctgcctcatgacctgttcactcccttacaccacctggagcggatccacctccatcataacccttggaattgtaactgcgacatactgtggctgagctggtggataaaggacatggccccatctaatacagcctgctgtgctcgatgcaatacccctccaaatctgaaaggacgctatatcggtgaactggatcagaactactttacatgttatgcgcctgtgattgttgaacccccagcagacctgaacgttacagaggggatggcagctgagttgaagtgcagagcctccacatcgctcacctctgtaagttggatcaccccgaacgggaccgtgatgactcacggcgcttataaggtcaggatcgcagttctgagtgacgggacactgaacttcacgaacgtcacagttcaggacacggggatgtatacatgcatggttagtaattccgtcgggaacacgacggcatctgctaccctcaacgtcacagctgccaccaccactccattttcctattttagtacagtcacggtagagactatggagccttcacaggacgaagcgaggacaactgataacaatgtgggtcctacgcctgtggtggactgggagacaactaacgtgactacctccctgacaccccaaagtacacgatcaaccgaaaagacattcaccatcccagtgactgatattaacagtgggattccgggaatcgacgaagtgatgaaaacaacaaagattataattggatgtttcgtcgccatcaccttgatggcagctgttatgcttgtaattttttataagatgcgcaagcagcaccaccgacagaatcatcacgccccaacccggactgtggaaatcattaatgtagacgacgagatcaccggagataccccaatggaatcccacctgccaatgccagccatcgaacatgaacacctgaaccactacaacagctacaagtcccccttcaaccatacaaccacagtcaacacaatcaattctattcactcctccgttcatgaacctctgctgataagaatgaatagcaaagacaatgttcaggagacccagatttag

SEQ ID NO: 93206 - DNA, 126 bp, Artificial Sequence
  derived and/or modified sequence
atgctgaataaaatgaccttgcatccccagcagattatgattgggcctcgttttaaccgagccctgtttgatcccctactcgtggtcctcctagctttacaacttttggtcgtagcaggcttatag

SEQ ID NO: 93207 - DNA, 1923 bp, Artificial Sequence
  derived and/or modified sequence
atgctgaacaagatgaccctgcacccccagcagatcatgatcggccccagattcaacagagccctgttcgaccccctgctggtggtgctgctggccctgcagctgctggtggtggccggcctggtgagagcccagacctgccccagcgtgtgcagctgcagcaaccagttcagcaaggtgatctgcgtgagaaagaacctgagagaggtgcccgacggcatcagcaccaacaccagactgctgaacctgcacgagaaccagatccagatcatcaaggtgaacagcttcaagcacctgagacacctggagatcctgcagctgagcagaaaccacatcagaaccatcgagatcggcgccttcaacggcctggccaacctgaacaccctggagctgttcgacaacagactgaccaccatccccaacggcgccttcgtgtacctgagcaagctgaaggagctgtggctgagaaacaaccccatcgagagcatccccagctacgccttcaacagaatccccagcctgagaagactggacctgggcgagctgaagagactgagctacatcagcgagggcgccttcgagggcctgagcaacctgagatacctgaacctggccatgtgcaacctgagagagatccccaacctgacccccctgatcaagctggacgagctggacctgagcggcaaccacctgagcgccatcagacccggcagcttccagggcctgatgcacctgcagaagctgtggatgatccagagccagatccaggtgatcgagagaaacgccttcgacaacctgcagagcctggtggagatcaacctggcccacaacaacctgaccctgctgccccacgacctgttcacccccctgcaccacctggagagaatccacctgcaccacaacccctggaactgcaactgcgacatcctgtggctgagctggtggatcaaggacatggcccccagcaacaccgcctgctgcgccagatgcaacaccccccccaacctgaagggcagatacatcggcgagctggaccagaactacttcacctgctacgcccccgtgatcgtggagccccccgccgacctgaacgtgaccgagggcatggccgccgagctgaagtgcagagccagcaccagcctgaccagcgtgagctggatcacccccaacggcaccgtgatgacccacggcgcctacaaggtgagaatcgccgtgctgagcgacggcaccctgaacttcaccaacgtgaccgtgcaggacaccggcatgtacacctgcatggtgagcaacagcgtgggcaacaccaccgccagcgccaccctgaacgtgaccgccgccaccaccacccccttcagctacttcagcaccgtgaccgtggagaccatggagcccagccaggacgaggccagaaccaccgacaacaacgtgggccccacccccgtggtggactgggagaccaccaacgtgaccaccagcctgaccccccagagcaccagaagcaccgagaagaccttcaccatccccgtgaccgacatcaacagcggcatccccggcatcgacgaggtgatgaagaccaccaagatcatcatcggctgcttcgtggccatcaccctgatggccgccgtgatgctggtgatcttctacaagatgagaaagcagcaccacagacagaaccaccacgcccccaccagaaccgtggagatcatcaacgtggacgacgagatcaccggcgacacccccatggagagccacctgcccatgcccgccatcgagcacgagcacctgaaccactacaacagctacaagagccccttcaaccacaccaccaccgtgaacaccatcaacagcatccacagcagcgtgcacgagcccctgctgatcagaatgaacagcaaggacaacgtgcaggagacccagatctag

SEQ ID NO: 93208 - DNA, 126 bp, Artificial Sequence
  derived and/or modified sequence
atgctgaacaagatgaccctgcacccccagcagatcatgatcggccccagattcaacagagccctgttcgaccccctgctggtggtgctgctggccctgcagctgctggtggtggccggcctgtag

SEQ ID NO: 93209 - protein, 403 aa, Artificial Sequence
  derived and/or modified sequence
MNYDSQQPPLPPLPYAGCRRASGFPALGRGGTVPVGVWGGAGQGREGRSWGEGPRGPGLGRRDLSSADPAVLGATMESRCYGCAVKFTLFKKEYGCKNCGRAFCSGCLSFSAAVPRTGNTQQKVCKQCHEVLTRGSSANASKWSPPQNYKKRVAALEAKQKPSTSQSQGLTRQDQMIAERLARLRQENKPKLVPSQAEIEARLAALKDERQGSIPSTQEMEARLAALQGRVLPSQTPQPAHHTPDTRTQAQQTQDLLTQLAAEVAIDESWKGGGPVTLQDYRLPDSDDDEDEETAIQRVLQQLTEEASLDEASGFNIPAEQASRPWTQPRGAEPEAQDVDPRPEAEEEELPWCCICNEDATLRCAGCDGDLFCARCFREGHDAFELKEHQTSAYSPPRAGQEH

SEQ ID NO: 93210 - DNA, 1212 bp, Artificial Sequence
  derived and/or modified sequence
atgaactacgacagccagcagccccccctgccccccctgccctacgccggctgcagaagagccagcggcttccccgccctgggcagaggcggcaccgtgcccgtgggcgtgtggggcggcgccggccagggcagagagggcagaagctggggcgagggccccagaggccccggcctgggcagaagagacctgagcagcgccgaccccgccgtgctgggcgccaccatggagagcagatgctacggctgcgccgtgaagttcaccctgttcaagaaggagtacggctgcaagaactgcggcagagccttctgcagcggctgcctgagcttcagcgccgccgtgcccagaaccggcaacacccagcagaaggtgtgcaagcagtgccacgaggtgctgaccagaggcagcagcgccaacgccagcaagtggagccccccccagaactacaagaagagagtggccgccctggaggccaagcagaagcccagcaccagccagagccagggcctgaccagacaggaccagatgatcgccgagagactggccagactgagacaggagaacaagcccaagctggtgcccagccaggccgagatcgaggccagactggccgccctgaaggacgagagacagggcagcatccccagcacccaggagatggaggccagactggccgccctgcagggcagagtgctgcccagccagaccccccagcccgcccaccacacccccgacaccagaacccaggcccagcagacccaggacctgctgacccagctggccgccgaggtggccatcgacgagagctggaagggcggcggccccgtgaccctgcaggactacagactgcccgacagcgacgacgacgaggacgaggagaccgccatccagagagtgctgcagcagctgaccgaggaggccagcctggacgaggccagcggcttcaacatccccgccgagcaggccagcagaccctggacccagcccagaggcgccgagcccgaggcccaggacgtggaccccagacccgaggccgaggaggaggagctgccctggtgctgcatctgcaacgaggacgccaccctgagatgcgccggctgcgacggcgacctgttctgcgccagatgcttcagagagggccacgacgccttcgagctgaaggagcaccagaccagcgcctacagcccccccagagccggccaggagcactag

SEQ ID NO: 93211 - DNA, 1212 bp, Artificial Sequence
  derived and/or modified sequence
atgaactatgactctcagcagcctcctttgcctccactgccttatgcgggatgccgaagagcatccgggtttcctgctctgggccgaggaggaaccgtgcccgtcggggtgtgggggggcgccggacaggggcgggagggccgttcctggggcgaggggcccagaggtcccgggctggggcgcagggatctaagctcggctgaccctgcggttctgggggctaccatggagagcagatgttacggctgcgccgttaagtttactctgtttaagaaggaatatgggtgcaagaactgcggtagggcgttctgcagtggctgtctatccttcagcgccgcagtaccgcggaccggcaatacgcaacagaaggtctgcaaacagtgtcacgaggtgctgacacggggctcatccgccaatgcctcaaagtggtcaccaccccagaactataaaaagagggtggccgcgctagaggccaagcagaagccatccacttcacagtcccaggggctgacacgacaggaccaaatgatagccgaaaggctggctcggcttcggcaggagaacaagcctaaactcgtgccgtcacaggcagagattgaagcaagactggccgccctcaaagacgagcggcagggatccattccctcaacccaggagatggaagccagacttgcagctttgcaaggacgggttcttccctctcagaccccgcagcccgcgcatcacactcctgatactagaacgcaggctcaacaaacacaagacctgctcacccagctcgcggccgaagtggcaatagacgagtcctggaagggggggggcccggtaacactgcaggactacaggctcccagatagcgatgatgacgaggatgaagaaactgcgatccagagggtgttgcaacagcttacggaagaagcatcactcgacgaagcatccggattcaatatccctgccgagcaggcgagccgcccatggacccagccgaggggggctgaacccgaagcccaggatgtggatccccgaccagaagcggaggaggaagagctcccttggtgctgtatttgcaatgaagatgctactcttaggtgcgccggatgcgatggagatctgttctgcgccaggtgtttccgggagggacacgacgcctttgaactgaaagaacatcaaaccagcgcatacagtcccccacgcgccggtcaggagcattag

SEQ ID NO: 93212 - DNA, 1212 bp, Artificial Sequence
  derived and/or modified sequence
atgaactatgacagccagcagccccccctgccccccctgccctatgccggctgcagaagagccagcggcttccctgccctgggccggggcggcaccgtgcctgtgggcgtgtggggcggggccggccagggccgggagggccgctcctggggcgagggcccccggggccctggcctgggcagaagagacctgagcagcgctgaccctgctgtgctgggcgccaccatggagagccgctgctacggctgtgctgtgaagttcaccctcttcaagaaggagtatggctgcaagaactgtggccgggccttctgcagcggctgcctgtccttctctgctgctgtgcccaggactggaaacacccagcagaaggtgtgcaagcagtgccacgaggtgctgacccggggcagcagcgccaatgccagcaagtggagccccccccagaactacaagaagagggtggccgccctggaggccaagcagaagcccagcaccagccagagccagggcctgacccggcaggaccagatgattgctgagcggctggcccggctgcggcaggagaacaagcccaagctggtgcccagccaggccgagattgaggcccggctggccgccctgaaggatgagcggcagggcagcatccccagcacccaggagatggaggcccggctggccgccctgcagggccgggtgctgcccagccagaccccccagcctgcccaccacaccccagacaccaggacccaggcccagcagacccaggacctgctgacccagctggccgctgaggtggccattgatgagagctggaagggcggcggccctgtgaccctgcaggactaccgcctgcctgacagtgatgatgatgaagatgaggagacagccatccagagggtgctgcagcagctgacagaggaggccagcctggatgaggccagcggcttcaacatcccagctgagcaggccagccggccctggacccagcccagaggagctgagcctgaggcccaggatgtggaccccaggcctgaggccgaggaggaggagctgccctggtgctgcatctgcaatgaagatgccaccctgcgctgtgccggctgtgatggagacctcttctgtgcccgctgcttccgggagggccatgatgcctttgagctgaaggagcaccagaccagcgcctacagcccccccagggctggccaggagcactag

SEQ ID NO: 93213 - DNA, 1212 bp, Artificial Sequence
  derived and/or modified sequence
atgaactacgacagccagcagccccccctgccccccctgccctacgcaggttgcagacgagccagtggttttcccgctctgggaaggggtggtactgtgcctgtgggcgtgtggggcggtgctggtcagggaagggagggccgaagttggggagagggtccgcgcggaccagggcttggcagaagagatctgtctagcgctgacccagctgttttgggagctaccatggaaagtcggtgctatgggtgcgccgttaagttcactttgtttaaaaaagagtatggatgcaaaaattgcggcagagctttttgtagcggctgtctgagtttcagcgccgccgtgccccgtaccgggaacacacagcaaaaagtatgcaagcaatgtcatgaagtgctcacccgaggatcaagcgctaacgccagcaagtggagcccgccgcagaattacaaaaaacgggtggccgctctggaagccaaacaaaagccctccacaagtcaaagtcaaggccttacccgccaagatcagatgatcgccgagcgactggcaaggctgcgccaggagaacaaacctaagcttgtcccaagtcaggccgaaatagaagcacgtctggcggcactgaaggacgaaagacagggcagcatcccttccacccaagagatggaggctagactcgccgcccttcagggccgtgtcctgcccagccaaacaccacagcctgctcatcacacaccagacacaaggacccaggcccaacagactcaggatctgctaacccaactggccgcagaagtagccatcgacgagagctggaaaggaggcggcccagttaccctgcaagattatcgcctgccagacagcgacgacgacgaggatgaagagaccgcaattcagagagtcctgcagcaacttacagaggaggctagtctggacgaagccagtgggtttaatatccccgcagagcaggcaagtcgtccatggacacagcccagaggggcagaaccggaagcccaggacgtcgacccaaggcctgaggccgaggaggaagaactgccctggtgttgtatttgtaacgaggacgccacccttcggtgcgccggatgtgatggtgacctcttctgcgcacgttgcttcagagagggccatgacgcgtttgagctgaaagagcatcagacttccgcctattctccccctagagctggacaggaacattag

SEQ ID NO: 93214 - DNA, 1212 bp, Artificial Sequence
  derived and/or modified sequence
atgaactacgactcccagcagccgccactgcctccactcccgtatgccggttgccgcagggcaagcggtttccccgctctaggcagaggaggaacagtccctgtgggggtgtggggcggtgcaggacagggcagggagggacgcagctggggggaaggaccaagaggacccggactgggcaggagagatttgtcaagcgctgacccagccgttttaggcgctacgatggaatccaggtgctatggctgtgccgtgaaatttacactatttaagaaagaatatgggtgcaaaaactgtggccgagcattctgctccggatgtctttctttttcagcagccgttccgcgaacgggaaatacccaacaaaaggtttgtaagcagtgtcacgaggtgttgaccagaggaagttccgcaaacgctagtaaatggtcccccccacagaactacaaaaagagagtagcagctctggaagcaaagcagaagccttccacctcccagtctcagggcctcactcgacaggatcaaatgatagcagaacgcctggcaaggctaagacaggagaacaagccaaaactagtcccttctcaggctgagatcgaggcaaggctggccgctctgaaggatgagcggcagggctccattccctccacccaagagatggaagctaggttagcggctctccagggtcgcgtacttccatcccagacgccccagcctgctcaccatactccagatactaggacacaagctcagcagacgcaggatctgttaacacagctggctgctgaagtagctatcgacgagagctggaagggaggcggacccgtcactctgcaggactacaggctccctgatagtgatgatgacgaggatgaggagacagccattcagagggtcttacagcagctgactgaggaggcaagcctggacgaagcctcaggcttcaacataccagctgagcaagcatcacgcccttggactcagccgagaggggctgaaccagaggcgcaggacgtcgaccctcgccctgaggctgaggaggaagagctgccttggtgctgtatatgtaatgaggacgctacattgcgatgcgctggctgtgatggggatttgttctgcgccagatgttttagggagggacacgatgcctttgagctgaaggaacaccagacaagcgcctacagtcctccacgggcagggcaggagcactag

SEQ ID NO: 93215 - DNA, 2030 bp, Artificial Sequence
  derived and/or modified sequence
tctaggagacaggggccacggggagagcacagccacccggcgcgaagagccctctgtaccccgcttcctcttgaggccctcggaccgtccaggaaatgtctgggagcccgcctgcggagggcatagcgccgaccctcgctccccgcccaggacccgaatgaacctggagagcggatgccagcagtggccgaggcgctaggacaggaaggaccgccagacctctcaagatcagccttcctcgccaccgttctcacctctttgtccgctgccttctcctcaatgcctagcagcgcgtacaggtccatctgtaagagctccttggtcactgccatggttccggcctgacggattcgtactacaactcccaagagtctaagcgcgcgtgaggactgcaggctccgagcggcgcctagccctctgggaattgtgttctgggtcaggcttgactgactctgagggaggccggcagtcgtgaatgaactacgactcccagcagcccccgttgccgccgctgccgtacgctggctgcaggagagcgtccggattccctgctctaggtcgcggcgggacagtgccagtgggcgtgtggggcggggcagggcagggaagggaagggcggagctggggtgagggtccaaggggcccaggacttggccggcgtgatctcagctctgcagaccctgcggtgctgggagccaccatggagagtaggtgctacggctgcgctgtcaagttcaccctcttcaagaaggagtacggctgtaagaattgtggcagggccttctgttcaggctgcctaagcttcagtgcagcagtgcctcggactgggaacacccaacagaaagtctgcaagcaatgccatgaggtcctgaccagagggtcttctgccaatgcctccaagtggtcaccacctcagaactataagaagcgtgtggcagccttggaagccaagcaaaagcccagcacttcccagagccagggactgacacgacaagaccagatgattgctgagcgcctagcacgactccgccaggagaacaagcccaagttagtcccctcacaggcagagatagaggcacggctggctgccctaaaggatgaacgtcagggttccatcccttccacccaggaaatggaggcacgacttgcagcgttgcagggcagagttctaccttctcaaaccccccagccggcacatcacacaccggacaccaggacccaagcccagcagacacaggatctgctaacgcagctggcagctgaggtggctatcgatgaaagctggaaaggaggaggcccagtgaccctccaggactatcgcctcccagacagtgatgacgacgaggatgaggagacagccatccaaagagtcctgcagcagctcactgaagaagcttccctggatgaggcaagtggctttaacatccctgcagagcaggcttctcgaccctggacgcaaccccgcggggcagagcctgaggcccaggatgtggaccccaggcctgaggctgaggaagaggagctcccctggtgctgcatctgcaatgaggatgccaccctacgctgcgctggctgcgatggggacctcttctgtgcccgctgcttccgagagggccatgatgcctttgagcttaaagagcaccagacatctgcctactctcctccacgtgcaggccaagagcactgaagacaccctggtcctcccggaagggcagtcccacaggcagcggcacccatttctgggcccagccacaggacgtccgatgggagagcttgtctggctctactgatgatggataggccccttcctgagccttggtgtccctggaatgaggaaagattctccattcgagagaatgactgggagggaagaagtcggggccctcctattagaagcccagactggaagtgagaggcatgatggggagagaccagactgaatctacgggtgagccctgtaacctggctctagggcacaggcccctcccctggcacttagtgggtctaataaagtatgttgattcattggg

SEQ ID NO: 93216 - DNA, 891 bp, Artificial Sequence
  derived and/or modified sequence
atgatcgccgagagactggccagactgagacaggagaacaagcccaagctggtgcccagccaggccgagatcgaggccagactggccgccctgaaggacgagagacagggcagcatccccagcacccaggagatggaggccagactggccgccctgcagggcagagtgctgcccagccagaccccccagcccgcccaccacacccccgacaccagaacccaggcccagcagacccaggacctgctgacccagctggccgccgaggtggccatcgacgagagctggaagggcggcggccccgccgccagcctgcagaacgacctgaaccagggcggccccggcagcaccaacagcaagagacaggccaactggagcctggaggaggagaagagcagactgctggccgaggccgccctggagctgagagaggagaacaccagacaggagagaatcctggccctggccaagagactggccatgctgagaggccaggaccccgagagagtgaccctgcaggactacagactgcccgacagcgacgacgacgaggacgaggagaccgccatccagagagtgctgcagcagctgaccgaggaggccagcctggacgaggccagcggcttcaacatccccgccgagcaggccagcagaccctggacccagcccagaggcgccgagcccgaggcccaggacgtggaccccagacccgaggccgaggaggaggagctgccctggtgctgcatctgcaacgaggacgccaccctgagatgcgccggctgcgacggcgacctgttctgcgccagatgcttcagagagggccacgacgccttcgagctgaaggagcaccagaccagcgcctacagcccccccagagccggccaggagcactag

SEQ ID NO: 93217 - DNA, 891 bp, Artificial Sequence
  derived and/or modified sequence
atgatcgccgagaggttggcaaggctcaggcaggagaataaacccaaactggtgcctagtcaagccgagattgaggctagactggcagctctgaaggacgaaagacagggatcaataccatctacacaggagatggaggcccgactggccgccttacagggtagagtgctgccaagccagactccacagccagcgcatcacacacctgatactagaacgcaagcccagcagacacaagatcttttgacccagctggcagcggaggtggctatagatgaatcttggaagggcgggggcccagccgcaagcctacaaaacgatcttaatcagggcggtccaggatcaaccaattctaagcgccaggctaactggagcctggaggaagagaaatctcgactactggctgaagccgccttagagcttcgggaggaaaataccagacaggagaggatcctcgctttagccaagcggctggccatgttacgtggtcaggatcctgagcgggttaccctgcaagactatcgcctccccgatagtgacgacgatgaggacgaggaaactgccatccagagagtcttacagcagttgacagaggaagccagcctggatgaagcttcaggcttcaatatcccggccgaacaagcaagcagaccatggactcagcctagaggagctgaaccggaggctcaggacgtggatcctcgccccgaggccgaagaagaagaactgccttggtgctgcatttgcaacgaagacgccaccctgcgctgtgctgggtgtgatggcgacttgttttgtgccagatgtttccgggaaggtcatgatgcatttgaattaaaggaacatcagacttccgcttattcccccccccgggccggccaagaacactag

SEQ ID NO: 93218 - DNA, 891 bp, Artificial Sequence
  derived and/or modified sequence
atgattgctgagcggctggcccggctgcggcaggagaacaagcccaagctggtgcccagccaggccgagattgaggcccggctggccgccctgaaggatgagcggcagggcagcatccccagcacccaggagatggaggcccggctggccgccctgcagggccgggtgctgcccagccagaccccccagcctgcccaccacaccccagacaccaggacccaggcccagcagacccaggacctgctgacccagctggccgctgaggtggccattgatgagagctggaagggcggcggccctgctgccagcctgcagaatgacctgaaccagggcggccctggcagcaccaacagcaagaggcaggccaactggagcctggaggaggagaagagccggctgctggccgaggccgccctggagctgcgggaggagaacacccggcaggagcgcatcctggccctggccaagaggctggccatgctgcggggccaggaccctgagcgggtgaccctgcaggactaccgcctgcctgacagtgatgatgatgaagatgaggagacagccatccagagggtgctgcagcagctgacagaggaggccagcctggatgaggccagcggcttcaacatcccagctgagcaggccagccggccctggacccagcccagaggagctgagcctgaggcccaggatgtggaccccaggcctgaggccgaggaggaggagctgccctggtgctgcatctgcaatgaagatgccaccctgcgctgtgccggctgtgatggagacctcttctgtgcccgctgcttccgggagggccatgatgcctttgagctgaaggagcaccagaccagcgcctacagccccccccgggccggccaggagcactag

SEQ ID NO: 93219 - DNA, 891 bp, Artificial Sequence
  derived and/or modified sequence
atgatcgccgagcggctggcccggctgcggcaggagaacaagcccaagctggtgccttcgcaagcagaaatagaagcaagactcgctgccttaaaggacgagcgccaaggctcgattccaagcacccaggaaatggaggctagactggcggctctgcaaggccgggttcttccaagccagaccccccagccggcgcatcacacacccgataccagaacccaagcccaacagacccaggatctgcttactcagctcgctgcagaggttgcaatagacgagagctggaaaggcggcggtccagccgcttccctacaaaatgatctgaaccaggggggccctgggtcaaccaattcaaagcggcaggctaattggagccttgaggaggagaagtctcgcctcctggccgaggcggccctcgaactgcgtgaggagaatacaagacaagaaagaatcctggctctggcaaagagactggcgatgctgcgagggcaagaccctgagagagtgactctacaagactacagacttccggattccgacgacgacgaagatgaagaaaccgcgattcaaagggtgctgcagcagctgacagaggaagccagcctggacgaggccagcgggtttaacatcccagcagaacaagcctctcggccctggactcagccccgaggggccgaaccagaagctcaggacgtggaccctcggcccgaggccgaagaagaggaacttccctggtgttgcatatgtaatgaggacgcaacactccggtgcgcaggatgtgatggtgatttattctgcgctagatgttttcgcgagggtcacgatgccttcgagctcaaagagcaccaaacttccgcttattccccaccgagagccggccaggaacactag

SEQ ID NO: 93220 - DNA, 891 bp, Artificial Sequence
  derived and/or modified sequence
atgattgctgaaaggctggctcgtcttagacaggaaaataaaccgaaactggtcccatctcaagcagaaatcgaagcaaggctggccgcacttaaagacgaaaggcaaggctctatcccctctacgcaggagatggaagccaggctggccgcactgcaggggagagtcctacctagccagacaccacaacctgcccaccacacacccgacacccgcacacaggcacagcaaacccaggaccttctgacccagctcgccgcagaggtggccattgatgaaagttggaaaggcggaggcccagcagcctcactccagaacgatctgaatcaggggggaccagggtctacgaactctaagcgccaggctaattggtccctggaggaagagaagtctagacttcttgcagaggcagcccttgagctgagagaagaaaatactcggcaggaaaggatccttgccctggcgaaacgtctggccatgctccgcggacaggatccggaaagagtaaccttgcaggactatcggctacctgactctgatgatgatgaagacgaggagaccgcaatccaaagagtcctgcagcagctgacagaggaagcctccctggatgaggccagcggttttaatataccagccgaacaggccagtcgtccctggacccagccaaggggtgctgaacctgaggctcaagacgtggacccaagacccgaggccgaggaagaagaattgccatggtgctgtatttgcaacgaagatgctacactgcgctgcgcaggttgcgacggtgacctcttttgtgctcgctgcttccgggaggggcatgacgctttcgagctaaaagagcatcaaacctccgcctatagcccaccaagggccggtcaagagcattag

SEQ ID NO: 93221 - protein, 313 aa, Artificial Sequence
  derived and/or modified sequence
MAAARHSTLDFMLGAKADGETILKGLQSIFQEQGMAESVHTWQDHGYLATYTNKNGRLPPIVRGGAIDRYWPTADGRLVEYDIDEVVYDEDSPYQNIKILHSKQFGNILILSGDVNLAESDLAYTRAIMGSGKEDYTGKDVLILGGGDGGILCEIVKLKPKMVTMVEIDQMVIDGCKKYMRKTCGDVLDNLKGDCYQVLIEDCIPVLKRYAKEGREFDYVINDLTAVPISTSPEEDSTWEFLRLILDLSMKVLKQDGKYFTQGNCVNLTEALSLYEEQLGRLYCPVEFSKEIVCVPSYLELWVFYTVWKKAKP

SEQ ID NO: 93222 - DNA, 942 bp, Artificial Sequence
  derived and/or modified sequence
atggccgccgccagacacagcaccctggacttcatgctgggcgccaaggccgacggcgagaccatcctgaagggcctgcagagcatcttccaggagcagggcatggccgagagcgtgcacacctggcaggaccacggctacctggccacctacaccaacaagaacggcagactgccccccatcgtgagaggcggcgccatcgacagatactggcccaccgccgacggcagactggtggagtacgacatcgacgaggtggtgtacgacgaggacagcccctaccagaacatcaagatcctgcacagcaagcagttcggcaacatcctgatcctgagcggcgacgtgaacctggccgagagcgacctggcctacaccagagccatcatgggcagcggcaaggaggactacaccggcaaggacgtgctgatcctgggcggcggcgacggcggcatcctgtgcgagatcgtgaagctgaagcccaagatggtgaccatggtggagatcgaccagatggtgatcgacggctgcaagaagtacatgagaaagacctgcggcgacgtgctggacaacctgaagggcgactgctaccaggtgctgatcgaggactgcatccccgtgctgaagagatacgccaaggagggcagagagttcgactacgtgatcaacgacctgaccgccgtgcccatcagcaccagccccgaggaggacagcacctgggagttcctgagactgatcctggacctgagcatgaaggtgctgaagcaggacggcaagtacttcacccagggcaactgcgtgaacctgaccgaggccctgagcctgtacgaggagcagctgggcagactgtactgccccgtggagttcagcaaggagatcgtgtgcgtgcccagctacctggagctgtgggtgttctacaccgtgtggaagaaggccaagccctag

SEQ ID NO: 93223 - DNA, 942 bp, Artificial Sequence
  derived and/or modified sequence
atggccgctgctcggcatagtacactggatttcatgttgggagccaaggccgacggcgaaaccattctgaaaggcctacaatctatctttcaggagcaagggatggctgaaagtgtgcacacatggcaggaccacggttatctcgcaacctataccaacaagaacgggcggcttccacccatcgtacgaggtggagctattgacagatattggccaacagccgatggcaggctagtagagtatgatattgatgaagttgtttacgatgaggattcaccctatcaaaatattaaaattttacatagcaagcaattcggcaatatactgattttgtctggggacgtgaatcttgcagagagcgatcttgcatacaccagagcaattatgggatccggcaaggaggattacacaggaaaggacgtgctaatcttggggggaggagacggcggaatcctttgtgaaatagtgaagctgaagcctaagatggtgacaatggtcgaaatcgaccagatggtgattgatggctgtaagaagtatatgaggaaaacctgtggtgacgtgctggacaatttaaagggggactgttatcaggtgctgatagaagattgtatccccgtgctgaaacggtacgcgaaggaggggcgggaattcgactacgtcatcaacgacctgaccgccgtgcccataagcacaagcccagaggaggactctacctgggagtttcttaggctgattctagacctatcaatgaaggtgctgaagcaggacgggaaatacttcacgcagggaaactgcgtgaacctaaccgaggccctgagtctgtacgaggagcagttgggtcgactgtactgtccggtggaattctcgaaagagatagtgtgcgtgccttcatatctggaactctgggtgttctatactgtgtggaaaaaagcaaagccatag

SEQ ID NO: 93224 - DNA, 942 bp, Artificial Sequence
  derived and/or modified sequence
atggctgctgcccggcacagcaccctggacttcatgctgggcgccaaggcagatggagagaccatcctgaagggcctgcagagcatcttccaggagcagggcatggccgagagcgtgcacacctggcaggaccacggctacctggccacctacaccaacaagaatggccgcctgccccccatcgtgcggggcggggccatcgaccgctactggcccacagcagatggccgcctggtggagtatgacattgatgaggtggtgtatgatgaggacagcccctaccagaacatcaagatcctgcacagcaagcagtttggaaacatcctgatcctgtctggagatgtgaacctggccgagagtgacctggcctacacccgggccatcatgggcagcggcaaggaggactacacaggcaaggatgtgctgatcctgggcggcggagatggcggcatcctgtgtgaaattgtgaagctgaagcccaagatggtgaccatggtggagattgaccagatggtgattgatggctgcaagaagtacatgaggaagacctgtggagatgtgctggacaacctgaagggggactgctaccaggtgctgattgaggactgcatccctgtgctgaagagatatgccaaggagggccgggagtttgattatgtgatcaatgacctgacagctgtgcccatcagcaccagccctgaggaggacagcacctgggagttcctgcggctcatcctggacctgtccatgaaggtgctgaagcaggacggcaagtacttcacccagggcaactgtgtgaacctgacagaggccctgagcctgtatgaggagcagctgggccgcctgtactgccctgtggagttcagcaaggagatcgtgtgtgtgcccagctacctggagctgtgggtgttctacacagtgtggaagaaggccaagccctag

SEQ ID NO: 93225 - DNA, 942 bp, Artificial Sequence
  derived and/or modified sequence
atggccgccgcccggcacagcaccctggacttcatgctgggcgccaaggcagatggtgagacgatcttgaaagggctgcagagtatctttcaggaacagggcatggcggagtccgtgcacacatggcaagatcacggatacttagctacatacactaataaaaacggacgcctgccccccatcgtccgggggggtgctattgaccggtattggccaaccgcagacggccgcctggtcgagtatgatattgacgaggttgtgtatgacgaggactctccataccaaaacattaaaatcttgcacagtaagcagttcgggaacattctcatcctgtctggtgacgttaaccttgcggaatctgacctcgcctatacccgcgcgataatgggctctgggaaggaggactacactggcaaggatgttctgatccttggtggaggagacggaggcatactgtgcgagatcgttaagctgaagccaaaaatggtgacaatggtggaaattgaccaaatggtaattgatggctgcaagaagtatatgcgcaaaacttgtggtgatgtgctggataacttgaaaggcgattgttatcaggtgctgatagaggattgtattcctgtgctgaagcggtatgcaaaggaagggagagaatttgattatgtgatcaatgacctcactgcggttcctattagcacctcacccgaggaggattctacgtgggaatttttgaggctcattctggacctcagcatgaaggtgctgaagcaggacggcaaatacttcactcagggaaactgtgtgaacctgactgaggctctgagcctgtacgaggagcagctgggaagactttattgtccagtcgagtttagcaaggagattgtgtgcgtcccatcttatctggagttgtgggtgttttacaccgtttggaaaaaagccaagccatag

SEQ ID NO: 93226 - DNA, 942 bp, Artificial Sequence
  derived and/or modified sequence
atggctgctgcccgacactccactctggacttcatgctgggggcaaaggcagatggcgaaactatactcaagggactacagagtatttttcaagagcagggtatggccgagtcagttcacacttggcaggaccacgggtacctagctacgtacaccaacaaaaacggacggctgccccctattgtgagagggggagcgattgaccgttattggcctacagccgacgggagacttgttgagtatgacattgacgaggtcgtgtacgatgaggatagcccataccagaacattaagattttgcacagcaaacagtttggcaacatcctaatactgtcaggcgacgtcaacctcgccgaaagcgacctggcttatactagagcaattatggggtcaggaaaggaggattacacgggaaaagatgtcctcatcttaggagggggagacggaggcatcttgtgtgagatcgtcaagctgaagccaaagatggtcaccatggtggaaattgaccagatggtgatcgacggctgcaagaaatacatgagaaaaacgtgtggcgacgtgctggacaatctgaagggagattgttaccaggtgcttatagaggactgtatccccgttttgaagcgctatgccaaagagggcagggaatttgattacgttatcaacgacctaaccgccgtgcccattagcactagccccgaggaggatagcacttgggagttccttagactgattctggacctatcaatgaaagtcctaaaacaggacggcaagtattttacccaggggaactgcgtaaatctgaccgaagcgctgtcattgtatgaagagcagctggggaggctgtattgtcccgttgagttcagtaaggaaatcgtgtgtgttccctcctatttggagctttgggtcttttacaccgtttggaagaaagctaagccctag

SEQ ID NO: 93227 - DNA, 1174 bp, Artificial Sequence
  derived and/or modified sequence
ggcctccccgggcgcagcacactcccagccggccgcagcctgacacgccgcgcggccccccagtctcccgcggctgctcccccaggcatggcacagggcctcgcctcactatggcagcagcacggcacagcacgctcgacttcatgctcggcgccaaagctgatggtgagaccattctaaaaggcctccagtccattttccaggagcaggggatggcggagtcggtgcacacctggcaggaccatggctatttagcaacctacacaaacaagaacggcagattaccacccatagtgcgaggaggagccatcgacagatactggcccaccgccgacgggcgcctggttgaatatgacatagatgaagtggtatatgacgaagattcaccttatcaaaatataaaaattctacactcgaagcagtttggaaatattctcatccttagtggggatgttaatttggcagagagtgatttggcatatacccgggccatcatgggcagtggcaaagaagattacactggcaaagatgtactcattctgggaggtggagacggaggcatattgtgtgaaatagtcaaactaaaaccaaagatggtcactatggtagagattgaccaaatggtgattgatgggtgtaagaaatacatgcgaaaaacgtgtggcgatgtcttagacaatcttaaaggagactgctatcaggttctaatagaagactgtatcccggtactgaagaggtacgccaaagaagggagagaatttgattatgtgattaatgatttgacagctgttccaatctccacgtctccagaagaagattccacatgggagtttctcagactgattcttgacctctcaatgaaagtgttgaaacaggatgggaaatattttacacaggggaactgtgtcaatctgacagaagcactgtcgctctatgaagaacagctggggcgcctgtattgtcctgtggaattttcaaaggagatcgtctgtgtcccttcatacttggaattgtgggtattttacactgtttggaagaaagctaaaccctgaagatcagtagcccctaatcacatgtgctgcaaatagccttcctgacctccatatgctgtacatgacatcaaaatgagtcaggcaattgattgtgaattccttaaagttttcctttttttaat

SEQ ID NO: 93228 - protein, 945 aa, Artificial Sequence
  derived and/or modified sequence
MEMKLPGQEGFEASSAPRNIPSGELDSNPDPGTGPSPDGPSDTESKELGVPKDPLLFIQLNELLGWPQALEWRETGRWVLFEEKLEVAAGRWSAPHVPTLALPSLQKLRSLLAEGLVLLDCPAQSLLELVEQVTRVESLSPELRGQLQALLLQRPQHYNQTTGTRPCWGSTHPRKASDNEEAPLREQCQNPLRQKLPPGAEAGTVLAGELGFLAQPLGAFVRLRNPVVLGSLTEVSLPSRFFCLLLGPCMLGKGYHEMGRAAAVLLSDPQFQWSVRRASNLHDLLAALDAFLEEVTVLPPGRWDPTARIPPPKCLPSQHKRLPSQQREIRGPAVPRLTSAEDRHRHGPHAHSPELQRTGRKVPWYPSDFLDALHLQCFSAVLYIYLATVTNAITFGGLLGDATDGAQGVLESFLGTAVAGAAFCLMAGQPLTILSSTGPVLVFERLLFSFSRDYSLDYLPFRLWVGIWVATFCLVLVATEASVLVRYFTRFTEEGFCALISLIFIYDAVGKMLNLTHTYPIQKPGSSAYGCLCQYPGPGGNESQWIRTRPKDRDDIDLGLINASLLPPPECTRQGGHPRGPGCHTVPDIAFFSLLLFLTSFFFAMALKCVKTSRFFPSVVRKGLSDFSSVLAILLGCGLDAFLGLATPKLMVPREFKPTLPGRGWLVSPFGANPWWWSVAAALPALLLSILIFMDQQITAVILNRMEYRLQKGAGFHLDLFCVAVLMLLTSALGLPWYVSATVISLAHMDSLRRESRACAPGERPNFLGIREQRLTGLVVFILTGASIFLAPVLKFIPMPVLYGIFLYMGVAALSSIQFTNRVKLLLMPAKHQPDLLLLRHVPLTRVHLFTAIQLACLGLLWIIKSTPAAIIFPLMLLGLVGVRKALERVFSPQELLWLDELMPEEERSIPEKGLEPEHSFSGSDSEDSELMYQPKAPEINISVN

SEQ ID NO: 93229 - DNA, 2838 bp, Artificial Sequence
  derived and/or modified sequence
atggagatgaagctgcccggccaggagggcttcgaggccagcagcgcccccagaaacatccccagcggcgagctggacagcaaccccgaccccggcaccggccccagccccgacggccccagcgacaccgagagcaaggagctgggcgtgcccaaggaccccctgctgttcatccagctgaacgagctgctgggctggccccaggccctggagtggagagagaccggcagatgggtgctgttcgaggagaagctggaggtggccgccggcagatggagcgccccccacgtgcccaccctggccctgcccagcctgcagaagctgagaagcctgctggccgagggcctggtgctgctggactgccccgcccagagcctgctggagctggtggagcaggtgaccagagtggagagcctgagccccgagctgagaggccagctgcaggccctgctgctgcagagaccccagcactacaaccagaccaccggcaccagaccctgctggggcagcacccaccccagaaaggccagcgacaacgaggaggcccccctgagagagcagtgccagaaccccctgagacagaagctgccccccggcgccgaggccggcaccgtgctggccggcgagctgggcttcctggcccagcccctgggcgccttcgtgagactgagaaaccccgtggtgctgggcagcctgaccgaggtgagcctgcccagcagattcttctgcctgctgctgggcccctgcatgctgggcaagggctaccacgagatgggcagagccgccgccgtgctgctgagcgacccccagttccagtggagcgtgagaagagccagcaacctgcacgacctgctggccgccctggacgccttcctggaggaggtgaccgtgctgccccccggcagatgggaccccaccgccagaatccccccccccaagtgcctgcccagccagcacaagagactgcccagccagcagagagagatcagaggccccgccgtgcccagactgaccagcgccgaggacagacacagacacggcccccacgcccacagccccgagctgcagagaaccggcagaaaggtgccctggtaccccagcgacttcctggacgccctgcacctgcagtgcttcagcgccgtgctgtacatctacctggccaccgtgaccaacgccatcaccttcggcggcctgctgggcgacgccaccgacggcgcccagggcgtgctggagagcttcctgggcaccgccgtggccggcgccgccttctgcctgatggccggccagcccctgaccatcctgagcagcaccggccccgtgctggtgttcgagagactgctgttcagcttcagcagagactacagcctggactacctgcccttcagactgtgggtgggcatctgggtggccaccttctgcctggtgctggtggccaccgaggccagcgtgctggtgagatacttcaccagattcaccgaggagggcttctgcgccctgatcagcctgatcttcatctacgacgccgtgggcaagatgctgaacctgacccacacctaccccatccagaagcccggcagcagcgcctacggctgcctgtgccagtaccccggccccggcggcaacgagagccagtggatcagaaccagacccaaggacagagacgacatcgacctgggcctgatcaacgccagcctgctgcccccccccgagtgcaccagacagggcggccaccccagaggccccggctgccacaccgtgcccgacatcgccttcttcagcctgctgctgttcctgaccagcttcttcttcgccatggccctgaagtgcgtgaagaccagcagattcttccccagcgtggtgagaaagggcctgagcgacttcagcagcgtgctggccatcctgctgggctgcggcctggacgccttcctgggcctggccacccccaagctgatggtgcccagagagttcaagcccaccctgcccggcagaggctggctggtgagccccttcggcgccaacccctggtggtggagcgtggccgccgccctgcccgccctgctgctgagcatcctgatcttcatggaccagcagatcaccgccgtgatcctgaacagaatggagtacagactgcagaagggcgccggcttccacctggacctgttctgcgtggccgtgctgatgctgctgaccagcgccctgggcctgccctggtacgtgagcgccaccgtgatcagcctggcccacatggacagcctgagaagagagagcagagcctgcgcccccggcgagagacccaacttcctgggcatcagagagcagagactgaccggcctggtggtgttcatcctgaccggcgccagcatcttcctggcccccgtgctgaagttcatccccatgcccgtgctgtacggcatcttcctgtacatgggcgtggccgccctgagcagcatccagttcaccaacagagtgaagctgctgctgatgcccgccaagcaccagcccgacctgctgctgctgagacacgtgcccctgaccagagtgcacctgttcaccgccatccagctggcctgcctgggcctgctgtggatcatcaagagcacccccgccgccatcatcttccccctgatgctgctgggcctggtgggcgtgagaaaggccctggagagagtgttcagcccccaggagctgctgtggctggacgagctgatgcccgaggaggagagaagcatccccgagaagggcctggagcccgagcacagcttcagcggcagcgacagcgaggacagcgagctgatgtaccagcccaaggcccccgagatcaacatcagcgtgaactag

SEQ ID NO: 93230 - DNA, 2838 bp, Artificial Sequence
  derived and/or modified sequence
atggagatgaaactgcccggccaagagggcttcgaagccagctctgctccccggaatataccatcaggcgagctagactccaaccccgaccctggaaccggcccttcgcccgatggaccttctgacacggagagcaaagagcttggtgtgcccaaggatcctctactgtttatccagctgaatgagttgctggggtggccgcaggccctggagtggcgcgaaaccggaagatgggtgttattcgaagagaaactggaagtggctgccggacggtggagcgctccccacgttccgaccctggctttaccaagcctccagaaacttcgttccttgcttgcagagggattggtgctgcttgattgcccggctcaaagcctgctggagctcgtagagcaggtgacacgggtggagagcttaagtcctgagcttcgcgggcagctgcaggctttgctgctccagcgcccacagcactacaatcaaaccacaggaacccggccatgctggggctctacacatccgcggaaagcaagtgacaatgaggaagccccacttcgggaacaatgccaaaaccctctgagacagaagttgccacctggggccgaggcaggtaccgtgctggccggtgagttgggattcctggctcagccgcttggcgcttttgtcaggctccggaacccagtggtcttggggtcgctgactgaagtttcgcttcctagtaggtttttttgcctattgctcgggccatgcatgcttggcaagggttatcatgagatggggcgggcggcagcagtcttgctcagtgatccacagtttcaatggtcagtgcggagggcgtcaaacctccacgatctgcttgcggcgctggatgcatttttggaagaagtcaccgtgctgccacctggcaggtgggaccctaccgctaggataccgcctcctaaatgcctgccttcccaacacaagaggctacccagccagcagcgggagatccgcgggcccgccgtccctagacttacaagtgcagaagatcggcaccgccacggcccccacgctcattcaccagagttgcagcgcacagggagaaaagtcccatggtatccaagtgatttcctggatgccttacacctccagtgcttctccgcagtcctgtatatctacctggctacggtgacaaacgctatcaccttcggagggctgcttggagacgccactgacggggcgcaaggcgtgctggagtccttcctcggtactgcagtggctggtgctgctttctgcttaatggctggtcaacctctaaccatcctttcctctactggaccagtgctcgtgttcgagcgcctgctattcagtttttcgcgcgattactcattggattatttaccttttcgcttgtgggtgggtatctgggtcgctacgttttgcctagtgttagtggctactgaagcttcagtgctggtgaggtattttacccgttttacagaggaaggattttgcgccctgattagcctcatctttatctacgatgctgtgggtaaaatgctgaacctcacgcacacataccccatacagaagcctggctctagtgcttacggttgtctgtgccagtaccccggacctgggggaaacgaaagtcagtggatccggactaggcccaaggatcgggacgacatcgacttaggcctgataaacgctagcctgctccctccccccgagtgcaccagacagggcggacaccctaggggacctgggtgccatacggttccagacatcgcattcttcagcttgctgctgtttctcacttcttttttcttcgcaatggcactgaagtgcgtgaagactagcaggtttttcccgtcagtagtacgaaaggggctgtcggatttcagctctgtccttgctatcctcttgggctgcggactcgacgccttcttaggcttggcgacacctaaactcatggtgccacgagagtttaaacctactcttcctgggcgcggatggctggtgagcccctttggcgcaaacccctggtggtggtctgtggctgccgccttgcctgccttgctcctgtccattttgatttttatggaccaacagattactgccgtgatacttaataggatggaatatagattgcaaaagggggctgggtttcaccttgatctcttctgtgtggcagtgctgatgctcctaacttccgcactcgggttaccctggtacgtctccgcgaccgtaatatccttagcacatatggattctcttaggcgggagagcagggcctgcgccccaggagaaagacccaacttcctgggtatccgggagcagcgcctgactggtctcgtggtatttattctcaccggcgcttctattttcctggcccctgtattaaagttcatccccatgccggtgctgtacggcatattcctctacatgggcgtggcagccctctcttcaatccaatttaccaatagagtaaaactgctgctaatgcccgcaaaacatcagcccgacctacttttgttacgtcatgttccccttaccagggtgcacttatttaccgccatccagcttgcctgcctgggccttctttggatcatcaagtccacccctgcggcgattatatttcccctgatgctgttgggcctcgtaggggtccgcaaagcactcgagcgggttttctcaccgcaggagctgttgtggctagacgaactcatgcctgaggaagagcgcagcattcccgagaagggcctggagccggagcacagcttctcaggaagcgacagtgaggattcagaactgatgtatcagccgaaagctccggagatcaacatctcagtcaactag

SEQ ID NO: 93231 - DNA, 2838 bp, Artificial Sequence
  derived and/or modified sequence
atggagatgaagctgcccggccaggagggctttgaggccagcagcgcccccaggaacatccccagcggggagctggacagcaacccagaccccggcaccggccccagcccagatggccccagcgacacagagagcaaggagctgggcgtgcccaaggaccccctgctcttcatccagctgaatgagctgctgggctggccccaggccctggagtggagggagaccggccgctgggtgctgtttgaggagaagctggaggtggccgccggccgctggagcgccccccacgtgcccaccctggccctgcccagcctgcagaagctgcggagcctgctggccgagggcctggtgctgctggactgcccagcccagagcctgctggagctggtggagcaggtgaccagggtggagagcctgagccctgagctgcggggccagctgcaggccctgctgctgcagaggccccagcactacaaccagaccaccggcacccggccctgctggggcagcacccaccccaggaaggccagtgacaatgaggaggcccccctgcgggagcagtgccagaaccccctgcggcagaagctgcccccaggagctgaggccggcaccgtgctggccggggagctgggcttcctggcccagcccctgggcgcctttgtgcggctgaggaaccctgtggtgctgggcagcctgacagaggtgtccctgcccagccgcttcttctgcctgctgctgggcccctgcatgctgggcaagggctaccacgagatgggccgggctgctgctgtgctgctgagtgacccccagttccagtggagcgtgcggcgggccagcaacctgcatgacctgctggccgccctggatgccttcctggaggaggtgacagtgctgcccccaggccgctgggaccccacagcccgcatccccccacccaagtgcctgcccagccagcacaagaggctgcccagccagcagcgggagatccggggccctgctgtgccccggctgaccagcgcagaagatagacaccgccacggcccccacgcccacagccctgagctgcagaggacaggcaggaaggtgccctggtaccccagcgacttcctggatgccctgcacctgcagtgcttctctgctgtgctgtacatctacctggccaccgtgaccaatgccatcacctttggaggcctgctgggagatgccacagatggagcccagggcgtgctggagagcttcctgggcacagctgtggccggggccgccttctgcctgatggccggccagcccctgaccatcctgagcagcactggacctgtgctggtgtttgagcggctgctcttctccttcagccgggactacagcctggactacctgcccttccggctgtgggtgggcatctgggtggccaccttctgcctggtgctggtggccacagaggcctctgtgctggtgcgctacttcacccgcttcacagaggagggcttctgtgccctgatcagcctcatcttcatctatgatgctgtgggcaagatgctgaacctgacccacacctaccccatccagaagccaggcagcagcgcctacggctgcctgtgccagtacccaggccctggaggaaatgaaagccagtggatccgcacccggcccaaggacagagatgacatcgacctgggcctcatcaatgccagcctgctgcccccacctgagtgcacccggcagggcggccacccccggggccctggctgccacacagtgcctgacatcgccttcttcagcctgctgctcttcctgaccagcttcttctttgccatggccctgaagtgtgtgaagaccagccgcttcttccccagcgtggtgaggaagggcctgagtgacttcagctctgtgctggccatcctgctgggctgcggcctggatgccttcctgggcctggccacccccaagctgatggtgccccgggagttcaagcccaccctgcccggccggggctggctggtgagcccctttggagccaacccctggtggtggagcgtggccgccgccctgcctgccctgctgctgagcatcctgatcttcatggaccagcagatcacagctgtgatcctgaacaggatggagtaccgcctgcagaagggggccggcttccacctggacctcttctgtgtggccgtgctgatgctgctgaccagcgccctgggcctgccctggtacgtgtctgccaccgtcatcagcctggcccacatggacagcctgcggcgggagagccgggcctgtgcccctggagagcggcccaacttcctgggcatccgggagcagaggctgaccggcctggtggtgttcatcctgaccggggccagcatcttcctggcccctgtgctgaagttcatccccatgcctgtgctgtatggcatcttcctgtacatgggcgtggccgccctgagcagcatccagttcaccaacagagtgaagctgctgctgatgcctgccaagcaccagcctgacctgctgctgctgcggcacgtgcccctgaccagggtgcacctgttcaccgccatccagctggcctgcctgggcctgctgtggatcatcaagagcaccccagctgccatcatcttccccctgatgctgctgggcctggtgggcgtgaggaaggccctggagagggtcttcagcccccaggagctgctgtggctggatgagctgatgcctgaggaggagaggagcatccctgagaagggcctggagcctgagcacagcttcagcggcagtgacagtgaagattctgagctgatgtaccagcccaaggcccctgagatcaacatctctgtgaactag

SEQ ID NO: 93232 - DNA, 2838 bp, Artificial Sequence
  derived and/or modified sequence
atggagatgaagctgcccggccaggagggcttcgaggccagcagcgcacccagaaacattccatctggagagctcgacagcaatccagacccagggaccgggccatctcccgacggaccttcagacaccgagagcaaggagttaggtgtccctaaggatcccctcctgttcattcagctcaacgagctactgggctggccccaggcactggagtggcgggagacgggtaggtgggtgttgttcgaggaaaagctggaagtggctgcaggccgctggagtgccccccacgtgcctaccctagcccttccatctctacagaagctccgctctctgctcgcagaagggcttgtgcttctggattgtcctgcacagtctctccttgaactcgtggaacaggtcacccgcgtcgagtctcttagtcccgagctgagaggccaactccaggcgctactcttgcagaggccccaacactataaccagacgactggtaccaggccctgttggggaagtacacacccacgaaaggccagcgacaacgaagaagctcccttgagagaacagtgtcagaaccccttaaggcagaagttgccgcccggggctgaggctggaaccgttctcgcaggcgaactcggctttctagcccagcccctcggagcctttgtgcgcctgcgcaatccagtagtactgggatccctcacggaagttagtctacccagtcggttcttttgcttgctgttgggcccatgcatgttgggcaaaggatatcatgagatgggccgcgccgccgccgtgctcttatcggatccccagttccagtggtctgttagacgcgcaagcaacctccacgacctgttagccgctctggacgcctttttagaggaagtgacggtgcttccccccgggcggtgggacccaactgcaagaattcccccacccaaatgtctgccctcgcaacataagcggttgccctcccagcagcgagagattcgcgggcctgcagtgccacggcttacaagcgccgaggacaggcatcgccacggaccccatgcccactcaccggaattgcagaggactggcaggaaggtgccttggtacccctcagactttctggatgctcttcacctccagtgtttcagcgccgtgctctatatttacttagccactgtcacaaatgcaatcacatttggggggcttctgggagatgcgactgacggagctcaaggcgtgttagagtctttcctgggaacagctgtggccggcgccgcattctgtctgatggccgggcagcctctcacgatcctcagttctacaggacctgttctagtctttgaacgcctgcttttctcattcagcagggattactctcttgattacctcccttttcgtttgtgggtgggaatttgggtcgccactttctgcctggtgcttgtggccaccgaagcttctgtcctggtgcgctatttcacccgctttacagaggagggtttttgtgccttaatcagtctgatttttatctacgatgctgtgggcaagatgctaaatctaactcatacttaccctatacagaaacccggatctagtgcttacgggtgtctgtgccagtacccgggcccgggcgggaatgagtcacagtggatccgaacccggccaaaggacagggatgacattgatttgggtctgataaatgcctccctgctgccccctccagagtgtacccggcaggggggtcacccacggggccccgggtgtcatacggtgcccgacatcgccttcttttcactgctactgttcctaacttcatttttcttcgctatggcactgaaatgcgtcaaaacgtcaaggttcttcccaagcgtggttcggaaagggctctctgattttagttctgtgctagccatcctgttgggttgtggacttgatgcctttctgggcctcgccactccgaaattgatggtaccacgtgagttcaaacctacactccctggccgggggtggttagttagtcccttcggagctaacccttggtggtggtcagtcgctgcggcgttgccagcactgctactgagcatcctgatttttatggaccaacaaattaccgctgtgatactcaatagaatggaatatcgcttgcagaaaggcgctggctttcacctggatcttttctgcgtcgccgttctgatgctgctgacaagcgccctaggactgccctggtacgtcagcgcaacggtcataagcctcgctcacatggactcccttcgtagggaaagcagagcttgcgctccaggcgagcggccaaatttcctcggaattcgagagcaaagactgacaggactcgtcgtgttcatcctgacaggcgctagtatttttctggctcctgtgctgaagttcatacccatgcccgttctctacggcatatttttgtacatgggcgtggccgctctttcatcaatccagtttactaacagagtcaaacttctcttgatgccagccaagcaccagcccgaccttctgctacttagacatgtgccccttacccgcgtgcacctgttcacggccatccaactagcctgtctcgggctcctgtggatcatcaagtccacccccgctgccattatctttcctttaatgctccttggactggtgggtgtacggaaggcactggaacgtgtattttccccccaggaactgctctggttggacgagctcatgcccgaagaagagcgctcaatccccgagaagggcttggagcctgaacactcttttagtggcagcgattcagaggatagtgaattgatgtaccagcctaaggccccggagatcaatataagtgtcaactag

SEQ ID NO: 93233 - DNA, 2838 bp, Artificial Sequence
  derived and/or modified sequence
atggaaatgaagctgcccggacaggaggggttcgaagctagcagcgcgccaaggaacattccatcaggggaacttgatagcaatccagatcccggaacaggacccagccccgacggtccatccgatacggaaagcaaagaattgggagtccccaaggaccccctcctcttcatacaattaaatgaactgcttggatggccacaggcgctggaatggagagagaccgggaggtgggtgctctttgaggaaaaattggaagtggcagccggaagatggagtgcgcctcatgtaccaactctggccttaccttctttgcagaaactccggtcgctgctagcggaaggacttgttctgctcgattgtccagcccagagcctgctagagttggtggaacaggtgacccgagtagaatctctgagccccgaactcaggggacagctgcaggcccttctactccagcgcccacagcactacaatcagactaccggcacaagaccgtgttggggaagtactcaccccaggaaagcatctgacaacgaggaggcgcctctccgggaacagtgccagaaccctctgcgccagaaattgccaccaggcgcagaagcaggcaccgtgttagctggtgagttgggtttcctcgcgcagcctctcggggctttcgtgcggctgaggaacccggttgtgctgggcagtttgaccgaggtgtctctgccctcacgttttttttgcctcctcttggggccatgcatgctgggcaaaggttaccacgagatggggcgagccgcagcggtgcttctgtcggatcctcagttccagtggtcagtgagacgggcatccaacctgcatgatctattggcagcgctagacgcttttctggaagaagtcactgtcctgcctccaggtaggtgggaccctaccgctagaatcccccctcccaaatgcctgccatcgcagcacaagcgactgcctagccagcagagggagattaggggccctgctgtgccacggcttacatccgctgaggaccgacatagacacggtccacacgctcacagccctgagcttcagcgtaccggcagaaaagttccatggtatccatctgattttctggacgctctccacctacagtgttttagcgcagttttatatatctatctggccactgttaccaacgctattaccttcggaggactcctgggcgatgccactgacggggctcagggcgtacttgagagcttcctcggtacagctgtggccggagcagcattctgtctgatggccggtcagcccctgacaatcctatcttctactgggcctgtgctggtattcgagcgcctgttattttccttttcacgggactacagcctggattatctgccattccgcctgtgggtaggcatttgggtggcgacgttctgccttgtgcttgtggcgactgaagctagtgtgctcgtgcgttacttcacccggtttaccgaggaggggttctgcgctttaataagtctcatcttcatttacgacgccgtcggtaagatgctcaacctgacgcacacgtatcctattcagaagccgggatcgtctgcatatggatgtttgtgccaataccccggaccgggaggcaatgagtcacagtggattaggacgcgcccaaaagaccgggacgacatagacctagggcttattaacgcctctctactgcccccaccagaatgcaccaggcagggcggacatccccgagggccaggctgtcacactgtccctgatatcgctttcttttctctactgcttttcttaacctccttcttctttgctatggccctcaaatgcgtgaagacctctcggttcttcccctcagtcgtaaggaagggtttgtctgatttctcttccgtgctagccattcttctcgggtgtggactcgatgccttcctggggctggctacgcctaaattgatggtaccacgtgagttcaagccaaccctgcctgggaggggctggctggtgtccccattcggagccaacccttggtggtggagtgtggcagctgctttgccagctctgctgctttccattctaatcttcatggaccaacagatcactgctgtgatattgaaccggatggagtaccgcctgcaaaagggcgctggattccacctcgatctattctgcgtggcggtgctgatgctcctgacatcagccctcggcttgccttggtatgtaagcgctaccgttatttccctggcgcacatggacagcctcaggcgcgagtcccgggcttgcgctcctggcgagaggcccaattttttaggcattagggagcagaggctgaccggccttgtggtgttcatactgacgggggcttccatctttctggccccagtgcttaagttcattcccatgccagttctatacgggatatttctttatatgggggttgccgctctgtcgtctatccaatttacaaaccgtgttaagctgttactgatgccagctaaacaccagcccgatcttctccttctcaggcacgtgccactgacacgagtgcacttattcaccgccatccagctggcttgcttgggactgttgtggatcatcaagagtaccccagcggctatcatctttcctctgatgctcttgggcctggtaggcgttcggaaggcccttgagcgtgttttctctcctcaggaacttctttggctggatgagctgatgccggaggaagaaaggtccatcccagaaaagggcttggagcccgagcacagcttttctggtagtgattccgaggattccgagttgatgtaccaacccaaggcgccagagattaatatctctgtcaactag

SEQ ID NO: 93234 - protein, 896 aa, Artificial Sequence
  derived and/or modified sequence
MEMKLPGQEGFEASSAPRNIPSGELDSNPDPGTGPSPDGPSDTESKELGVPKDPLLFIQLNELLGWPQALEWRETGRWVLFEEKLEVAAGRWSAPHVPTLALPSLQKLRSLLAEGLVLLDCPAQSLLELVEQVTRVESLSPELRGQLQALLLQRPQHYNQTTGTRPCWGSTHPRKASDNEEAPLREQCQNPLRQKLPPGAEAGTVLAGELGFLAQPLGAFVRLRNPVVLGSLTEVSLPSRFFCLLLGPCMLGKGYHEMGRAAAVLLSDPQFQWSVRRASNLHDLLAALDAFLEEVTVLPPGRWDPTARIPPPKCLPSQHKRLPSQQREIRGPAVPRLTSAEDRHRHGPHAHSPELQRTGRLFGGLIQDVRRKVPWYPSDFLDALHLQCFSAVLYIYLATVTNAITFGGLLGDATDGAQGVLESFLGTAVAGAAFCLMAGQPLTILSSTGPVLVFERLLFSFSRDYSLDYLPFRLWVGIWVATFCLVLVATEASVLVRYFTRFTEEGFCALISLIFIYDAVGKMLNLTHTYPIQKPGSSAYGCLCQYPGPGGNESQWIRTRPKDRDDIVSMVRKGLSDFSSVLAILLGCGLDAFLGLATPKLMVPREFKPTLPGRGWLVSPFGANPWWWSVAAALPALLLSILIFMDQQITAVILNRMEYRLQKGAGFHLDLFCVAVLMLLTSALGLPWYVSATVISLAHMDSLRRESRACAPGERPNFLGIREQRLTGLVVFILTGASIFLAPVLKFIPMPVLYGIFLYMGVAALSSIQFTNRVKLLLMPAKHQPDLLLLRHVPLTRVHLFTAIQLACLGLLWIIKSTPAAIIFPLMLLGLVGVRKALERVFSPQELLWLDELMPEEERSIPEKGLEPEHSFSGSDSEDSELMYQPKAPEINISVN

SEQ ID NO: 93235 - DNA, 2691 bp, Artificial Sequence
  derived and/or modified sequence
atggagatgaagctgcccggccaggagggcttcgaggccagcagcgcccccagaaacatccccagcggcgagctggacagcaaccccgaccccggcaccggccccagccccgacggccccagcgacaccgagagcaaggagctgggcgtgcccaaggaccccctgctgttcatccagctgaacgagctgctgggctggccccaggccctggagtggagagagaccggcagatgggtgctgttcgaggagaagctggaggtggccgccggcagatggagcgccccccacgtgcccaccctggccctgcccagcctgcagaagctgagaagcctgctggccgagggcctggtgctgctggactgccccgcccagagcctgctggagctggtggagcaggtgaccagagtggagagcctgagccccgagctgagaggccagctgcaggccctgctgctgcagagaccccagcactacaaccagaccaccggcaccagaccctgctggggcagcacccaccccagaaaggccagcgacaacgaggaggcccccctgagagagcagtgccagaaccccctgagacagaagctgccccccggcgccgaggccggcaccgtgctggccggcgagctgggcttcctggcccagcccctgggcgccttcgtgagactgagaaaccccgtggtgctgggcagcctgaccgaggtgagcctgcccagcagattcttctgcctgctgctgggcccctgcatgctgggcaagggctaccacgagatgggcagagccgccgccgtgctgctgagcgacccccagttccagtggagcgtgagaagagccagcaacctgcacgacctgctggccgccctggacgccttcctggaggaggtgaccgtgctgccccccggcagatgggaccccaccgccagaatccccccccccaagtgcctgcccagccagcacaagagactgcccagccagcagagagagatcagaggccccgccgtgcccagactgaccagcgccgaggacagacacagacacggcccccacgcccacagccccgagctgcagagaaccggcagactgttcggcggcctgatccaggacgtgagaagaaaggtgccctggtaccccagcgacttcctggacgccctgcacctgcagtgcttcagcgccgtgctgtacatctacctggccaccgtgaccaacgccatcaccttcggcggcctgctgggcgacgccaccgacggcgcccagggcgtgctggagagcttcctgggcaccgccgtggccggcgccgccttctgcctgatggccggccagcccctgaccatcctgagcagcaccggccccgtgctggtgttcgagagactgctgttcagcttcagcagagactacagcctggactacctgcccttcagactgtgggtgggcatctgggtggccaccttctgcctggtgctggtggccaccgaggccagcgtgctggtgagatacttcaccagattcaccgaggagggcttctgcgccctgatcagcctgatcttcatctacgacgccgtgggcaagatgctgaacctgacccacacctaccccatccagaagcccggcagcagcgcctacggctgcctgtgccagtaccccggccccggcggcaacgagagccagtggatcagaaccagacccaaggacagagacgacatcgtgagcatggtgagaaagggcctgagcgacttcagcagcgtgctggccatcctgctgggctgcggcctggacgccttcctgggcctggccacccccaagctgatggtgcccagagagttcaagcccaccctgcccggcagaggctggctggtgagccccttcggcgccaacccctggtggtggagcgtggccgccgccctgcccgccctgctgctgagcatcctgatcttcatggaccagcagatcaccgccgtgatcctgaacagaatggagtacagactgcagaagggcgccggcttccacctggacctgttctgcgtggccgtgctgatgctgctgaccagcgccctgggcctgccctggtacgtgagcgccaccgtgatcagcctggcccacatggacagcctgagaagagagagcagagcctgcgcccccggcgagagacccaacttcctgggcatcagagagcagagactgaccggcctggtggtgttcatcctgaccggcgccagcatcttcctggcccccgtgctgaagttcatccccatgcccgtgctgtacggcatcttcctgtacatgggcgtggccgccctgagcagcatccagttcaccaacagagtgaagctgctgctgatgcccgccaagcaccagcccgacctgctgctgctgagacacgtgcccctgaccagagtgcacctgttcaccgccatccagctggcctgcctgggcctgctgtggatcatcaagagcacccccgccgccatcatcttccccctgatgctgctgggcctggtgggcgtgagaaaggccctggagagagtgttcagcccccaggagctgctgtggctggacgagctgatgcccgaggaggagagaagcatccccgagaagggcctggagcccgagcacagcttcagcggcagcgacagcgaggacagcgagctgatgtaccagcccaaggcccccgagatcaacatcagcgtgaactag

SEQ ID NO: 93236 - DNA, 2691 bp, Artificial Sequence
  derived and/or modified sequence
atggagatgaaactcccaggacaggaaggctttgaggcctcatcggcaccacggaatatacccagcggagaattggatagcaacccagatccaggcaccgggccaagccccgatgggcccagtgatacagaaagcaaagaactaggtgtcccgaaggacccactgctgtttatccagctgaacgagctcctcggctggccacaggctctcgagtggagagagacgggtaggtgggtattgtttgaagagaagctggaagttgccgccggaaggtggtcagcaccccatgtacccacattggccttgccctcccttcagaagttgagatccctgctggctgagggcctggtgctcctcgactgtcccgcacagtcactgctggaactggtggaacaggtgacccgggtggaatccctgtcccccgaattgcgtgggcagctccaagctctcctgctccagagaccccagcactacaaccagaccaccggtacacgtccatgctggggatctacccacccccggaaggctagtgataacgaagaggcccctttaagagaacagtgccagaatccactgaggcagaagctgccaccaggagcagaggccgggactgtcctcgcaggagagcttgggtttctggcacaacctctgggagctttcgttcgtcttagaaacccagtggtcctcggttctttgactgaagtctctctgccttctcggtttttttgtctcttgctagggccatgtatgttgggaaaggggtatcatgagatgggcagggctgccgccgtgctgttgtctgatccccagttccagtggtccgtcaggcgtgcttcaaacttgcacgatttgctcgccgcactggacgcatttctggaggaagtcacagttctgccccctggacgctgggatcccacagctcggatcccgccccctaaatgcctcccttcccagcataaaaggctaccttcccagcagagagaaatccgggggcctgcagtgcctcggctcacatctgctgaagatcggcataggcacggtccccatgcacactctccagaactccaaaggacaggtaggttgtttggtggcttaattcaggatgtgaggcggaaagttccttggtatcccagtgattttttggatgcacttcatttgcagtgctttagcgccgtgctgtatatttacctcgcaacagtgacaaacgcgatcacatttggcgggctcctcggcgatgcaactgacggcgcccagggagtgttggagagctttctgggcacagccgtagccggcgcagctttctgcttgatggccgggcaacccctcactatcctgtcctctactgggcccgtgctagttttcgaacggctgctcttttctttctccagagactattctctggattatttgccctttcggctatgggtaggaatatgggtggccacattctgtctggtgctcgtagctactgaagcctcagttctcgtgcgttactttactagatttactgaagaaggcttttgtgcgttaatcagtctgattttcatttacgacgccgttggcaagatgctgaatctgactcacacctaccccattcagaagccagggagttccgcgtacggctgcctgtgtcaatatcccgggccgggggggaacgagtctcagtggatccgtacaaggccaaaagatcgagacgatatcgtcagcatggtgcggaaggggctcagcgacttctcctccgtgctggcaatcttgctagggtgtgggttagacgcattcttgggcctggccaccccaaaacttatggtgccgcgcgaattcaagcctaccctgccaggacgagggtggctcgtctctccctttggtgcaaacccgtggtggtggtccgtggctgccgcacttccagctctcctgttgtctatcctgatcttcatggatcagcaaattactgcagtcatacttaacaggatggagtataggttgcagaagggggcaggattccatcttgacttattctgtgtggccgtattgatgctgctgaccagcgccctcggactgccttggtacgtgtccgcaaccgtgatctcactggctcatatggactccttgagacgggagtcaagggcctgcgcacccggggaacgcccgaacttccttggaattagggaacaacgtttgacagggttggttgttttcattctgacgggcgcgagcatctttctagccccagtattgaaattcatccctatgcctgtgctgtatgggatcttcctgtacatgggggtcgcagcgctttcttccattcagtttaccaatagggtaaagttgttgctaatgccagcaaaacatcagccagacctgctgctgctgcggcatgtgccactgacgagggttcacctgttcactgcaatccaactggcctgtctgggactgctgtggattataaagtcgactcccgcagctatcatctttcccctgatgttgttaggcctggtcggcgtccgcaaagcattggagcgcgttttttcaccacaggagttgctctggctcgatgagctcatgccggaggaagaaagatctatccctgaaaaggggctggagccagagcattccttctccgggtctgattcagaggactctgaactgatgtatcagcccaaggccccagagattaacatctcggttaactag

SEQ ID NO: 93237 - DNA, 2691 bp, Artificial Sequence
  derived and/or modified sequence
atggagatgaagctgcccggccaggagggctttgaggccagcagcgcccccaggaacatccccagcggggagctggacagcaacccagaccccggcaccggccccagcccagatggccccagcgacacagagagcaaggagctgggcgtgcccaaggaccccctgctcttcatccagctgaatgagctgctgggctggccccaggccctggagtggagggagaccggccgctgggtgctgtttgaggagaagctggaggtggccgccggccgctggagcgccccccacgtgcccaccctggccctgcccagcctgcagaagctgcggagcctgctggccgagggcctggtgctgctggactgcccagcccagagcctgctggagctggtggagcaggtgaccagggtggagagcctgagccctgagctgcggggccagctgcaggccctgctgctgcagaggccccagcactacaaccagaccaccggcacccggccctgctggggcagcacccaccccaggaaggccagtgacaatgaggaggcccccctgcgggagcagtgccagaaccccctgcggcagaagctgcccccaggagctgaggccggcaccgtgctggccggggagctgggcttcctggcccagcccctgggcgcctttgtgcggctgaggaaccctgtggtgctgggcagcctgacagaggtgtccctgcccagccgcttcttctgcctgctgctgggcccctgcatgctgggcaagggctaccacgagatgggccgggctgctgctgtgctgctgagtgacccccagttccagtggagcgtgcggcgggccagcaacctgcatgacctgctggccgccctggatgccttcctggaggaggtgacagtgctgcccccaggccgctgggaccccacagcccgcatccccccacccaagtgcctgcccagccagcacaagaggctgcccagccagcagcgggagatccggggccctgctgtgccccggctgaccagcgcagaagatagacaccgccacggcccccacgcccacagccctgagctgcagaggacaggccgcctgtttggaggcctcatccaggatgtgcggaggaaggtgccctggtaccccagcgacttcctggatgccctgcacctgcagtgcttctctgctgtgctgtacatctacctggccaccgtgaccaatgccatcaccttcggcggcctgctgggagatgccacagatggagcccagggcgtgctggagagcttcctgggcacagctgtggccggggccgccttctgcctgatggccggccagcccctgaccatcctgagcagcacaggccctgtgctggtgtttgagcggctgctcttctccttcagccgggactacagcctggactacctgcccttccggctgtgggtgggcatctgggtggccaccttctgcctggtgctggtggccacagaggcctctgtgctggtgcgctacttcacccgcttcacagaggagggcttctgtgccctgatcagcctcatcttcatctatgatgctgtgggcaagatgctgaacctgacccacacctaccccatccagaagccaggcagcagcgcctacggctgcctgtgccagtacccaggccctggaggaaatgaaagccagtggatccgcacccggcccaaggacagagatgacatcgtgtccatggtgaggaagggcctgagtgacttcagctctgtgctggccatcctgctgggctgcggcctggatgccttcctgggcctggccacccccaagctgatggtgccccgggagttcaagcccaccctgcccggccggggctggctggtgagcccctttggagccaacccctggtggtggagcgtggccgccgccctgcctgccctgctgctgagcatcctgatcttcatggaccagcagatcacagctgtgatcctgaacaggatggagtaccgcctgcagaagggagctggcttccacctggacctcttctgtgtggccgtgctgatgctgctgaccagcgccctgggcctgccctggtacgtgtctgccaccgtcatcagcctggcccacatggacagcctgcggcgggagagccgggcctgtgcccctggagagcggcccaacttcctgggcatccgggagcagaggctgaccggcctggtggtgttcatcctgactggagccagcatcttcctggcccctgtgctgaagttcatccccatgcctgtgctgtatggcatcttcctgtacatgggcgtggccgccctgagcagcatccagttcaccaacagagtgaagctgctgctgatgcctgccaagcaccagcctgacctgctgctgctgcggcacgtgcccctgaccagggtgcacctgttcaccgccatccagctggcctgcctgggcctgctgtggatcatcaagagcaccccagctgccatcatcttccccctgatgctgctgggcctggtgggcgtgaggaaggccctggagagggtcttcagcccccaggagctgctgtggctggatgagctgatgcctgaggaggagaggagcatccctgagaagggcctggagcctgagcacagcttcagcggcagtgacagcgaggacagcgagctgatgtaccagcccaaggcccctgagatcaacatctctgtgaactag

SEQ ID NO: 93238 - DNA, 2691 bp, Artificial Sequence
  derived and/or modified sequence
atggagatgaagctgcccggccaggagggcttcgaggccagcagcgcaccccgtaacatcccttctggcgagctagactcaaaccccgatcccggaacaggccccagtccagatggaccatcagacaccgaatccaaagagcttggggtgcccaaggatccattgctattcattcaactgaacgagcttctaggttggcctcaggccctagagtggcgtgaaaccggacggtgggtgttgttcgaagagaaactggaagttgctgcggggagatggtctgctccgcacgttcccaccttagccttaccatccctgcagaagctgagaagcctactggccgaaggcctggtcctgctggattgccctgcccagagtctcctggagctcgtcgagcaagtaacccgcgtcgagagcctcagccccgagctccggggtcaactgcaggcgctgctgctccagcggcctcagcactataatcagaccaccggaacccggccttgctgggggtccacacacccacgtaaggcctctgataacgaggaggctcctctaagggagcagtgccagaatccactgcgtcagaagttacctccaggcgccgaggccggcacagtgctggctggggaactcggattcctagcacaacccttgggcgcttttgtaagattgaggaatccagtggtgctgggaagtttaactgaagtgagcctgccctccagattcttttgtttgcttcttgggccttgcatgctgggcaaaggatatcatgagatgggacgggctgccgcggtgctgttgagtgacccgcagttccaatggtccgtccggagggcatccaacctgcacgacctgctggcagctttggatgcatttttggaggaggtcacggttctccctcccggacgttgggaccctaccgcaagaattccaccccctaagtgtctgccatctcaacataaaagactgccatcccagcaacgagaaatccggggccccgccgtaccccgacttacctctgccgaggacaggcaccgccatggcccccatgcccactctcccgaactgcagagaacaggtagactgttcggcgggctgattcaagacgtgcgacgaaaggtgccctggtatccttcagatttcttggatgcccttcacctgcagtgtttctccgccgtgctgtatatctacctcgccactgtgactaacgccatcacttttggcggcttactgggggacgctactgatggtgctcaaggcgtgctcgaaagctttttggggactgcagtggctggggccgcattttgcctgatggccggacagccactgacgatcctgtcctcaacaggcccagtgctcgtgttcgaaaggttactgttttccttctcacgagattactctctggactaccttcctttcagattatgggtcggaatttgggttgcgactttttgccttgtgctcgtagcgaccgaagcaagcgtcctggtgcgctatttcacccggttcacagaagaggggttttgcgcgctcatctctctaatcttcatttatgatgctgtcggaaagatgctgaatctcacacacacctatcccatccagaaaccaggatcctcagcgtacgggtgtctctgccagtacccaggcccaggaggaaatgaaagtcaatggatccgtacccgcccaaaggaccgggatgatatagtcagtatggtcaggaaagggctgagtgacttctcgtcagttttggcaattcttctgggctgtgggctggacgcattcctcggccttgccacaccgaagctaatggtccccagagagttcaagcccactctgcccggaagagggtggttggtcagccctttcggtgccaatccttggtggtggtcggtggctgcagctctccctgccctgcttttatccattctcatcttcatggaccaacagatcactgctgtcatcctgaaccggatggagtataggctacagaagggcgcgggctttcacctggatctcttttgcgtggccgtcctgatgttgctcactagtgcactggggctgccctggtatgtgtccgccaccgttatctctcttgcacacatggacagtctgagaagggaaagtagagcttgcgcacccggggagcggccgaacttcctgggcatcagagagcaacgccttacaggtctggtggtgtttattctgacaggggccagcatctttctcgcaccggttctgaagtttatccctatgccagtcctttacggaatttttctgtatatgggagtagcagctctgtccagcattcagttcactaaccgagtgaaactcttgctgatgcccgccaaacatcagcccgacctgttgttgctccggcacgtccccctcaccagggttcatctgttcacggccattcagctcgcttgcctggggctcctctggatcatcaaaagtacgcctgccgccattatatttcccttaatgctcctgggtttggtgggggtacgtaaggcccttgagcgcgtctttagcccgcaggagctgctgtggcttgacgaactcatgcctgaagaagagagatccatccctgagaagggattagagcccgagcacagtttttccggctctgatagcgaggatagtgaactgatgtaccagcccaaggccccggaaatcaacatctccgttaattag

SEQ ID NO: 93239 - DNA, 2691 bp, Artificial Sequence
  derived and/or modified sequence
atggagatgaagttgccgggtcaggaggggtttgaggcctcaagcgccccacgcaacatcccgtcaggcgaacttgattctaacccggatcccggtaccggaccaagtcctgacggcccttctgatacagaatcaaaggaactaggcgtgcctaaagaccctctcctctttatccagttaaacgagctactcggatggccacaagcgttagagtggcgcgagacagggaggtgggtgctgtttgaagagaaactggaggttgctgcagggagatggagtgctccccatgtacctaccctggccctgcctagtttacaaaaactgcgatccctgctcgccgagggcctcgtgctactggattgtcctgctcaatcactcctcgagcttgttgagcaggtcacccgcgtagaatctctgtctcccgaactgcgcggacagctccaagccctgctgctgcagcggccacagcactataaccaaactactggtaccagaccgtgctggggaagcactcacccaagaaaagcctcagacaacgaggaagcacccctgagagaacaatgccagaaccccctcaggcaaaagctcccaccaggtgcggaggctggtaccgtgctggccggagagcttggttttcttgctcaacccctaggcgcattcgtcaggctacgaaacccagtggtcctgggaagcttaactgaagtctccctgccttcgaggttcttttgtttgctgctgggtccctgcatgctggggaaaggctaccatgaaatggggagggccgctgcggtccttctgagcgatcctcagttccaatggtcagtgagacgggcttccaatttacatgatctgctcgctgctctggatgcattcctggaagaagtcactgtgcttccccctggacggtgggatccaacagccagaataccacctccaaagtgtctgccctcccagcataagagactcccctcacagcagcgcgagatacgtggtccagcagttcctcgactcacatcagctgaagatcgccatcggcacggccctcacgctcactccccggagctgcagagaactggcagacttttcgggggactaattcaggacgttagacgtaaagtgccctggtatcctagtgatttcttggacgctctccatctgcagtgtttcagtgctgtcctgtacatctacctcgcgacagtgactaatgccatcacgttcgggggactgctgggtgacgcaaccgatggggcacagggagtgttggagtcatttttgggcaccgcagtcgccggagctgccttttgtctgatggcagggcagcctctgaccatcctttcaagcactgggcctgtactggtcttcgaacgcctgctgttcagcttcagccgggattacagtctcgattatctgccatttcggctctgggtgggtatttgggtggccactttttgcctggtgctggttgccaccgaggcctccgtgctggtcaggtactttacgcggtttaccgaagagggtttctgtgccctgatttctctcatcttcatctacgatgcagtaggcaaaatgttgaatcttacccacacatatcctatccagaaaccaggcagttccgcctatggctgtctatgccagtatcccggacctgggggtaacgagtctcagtggatcaggacacgacctaaggatagggatgacatcgtgtccatggtgcggaaaggattgtccgatttctccagtgtgctcgctattctgcttggctgtggtctcgatgcatttctgggtctggctactccaaagctgatggttcccagggagttcaaaccaactctccccggaaggggctggctggtgtctcctttcggagccaacccttggtggtggagtgttgcagcagcactgcctgctcttttgctgtccattctgatattcatggatcagcagataacagctgttattcttaatagaatggagtaccgcctgcaaaagggagcgggatttcacctggacctgttctgcgttgcagtgctcatgttacttaccagtgctctgggactaccctggtacgtctccgccaccgtgattagtctcgcacacatggactcgttgcgcagggagagccgggcttgcgcccctggcgagcggcctaactttctggggattagggaacaaagactgaccggactcgtggtgtttatcctgaccggggctagcattttcttggcacccgtgctcaaattcatccctatgccagttctatatggaatcttcctctacatgggagtagcagccctctcctctatccagttcacaaatcgggtgaaactgctgctgatgcccgcaaaacaccagccagaccttctgttactgcgtcatgtgcctctgacaagggttcacctgttcacagccattcagctagcctgcctgggcctgttatggattattaagagcacccccgcagctattatttttcccctcatgctgttaggcctcgtcggcgtgcggaaagcactggaaagggtcttctctccccaggagctgctctggctcgatgagcttatgccagaggaggagaggagcatccccgaaaagggtcttgagccagaacacagcttctctggtagcgacagcgaagactcagagctgatgtaccagccaaaagctcctgagatcaacatatccgtcaattag

SEQ ID NO: 93240 - protein, 983 aa, Artificial Sequence
  derived and/or modified sequence
MEMKLPGQEGFEASSAPRNIPSGELDSNPDPGTGPSPDGPSDTESKELGVPKDPLLFIQLNELLGWPQALEWRETGSSSASLLLDMGEMPSITLSTHLHHRWVLFEEKLEVAAGRWSAPHVPTLALPSLQKLRSLLAEGLVLLDCPAQSLLELVEQVTRVESLSPELRGQLQALLLQRPQHYNQTTGTRPCWGSTHPRKASDNEEAPLREQCQNPLRQKLPPGAEAGTVLAGELGFLAQPLGAFVRLRNPVVLGSLTEVSLPSRFFCLLLGPCMLGKGYHEMGRAAAVLLSDPQFQWSVRRASNLHDLLAALDAFLEEVTVLPPGRWDPTARIPPPKCLPSQHKRLPSQQREIRGPAVPRLTSAEDRHRHGPHAHSPELQRTGRLFGGLIQDVRRKVPWYPSDFLDALHLQCFSAVLYIYLATVTNAITFGGLLGDATDGAQGVLESFLGTAVAGAAFCLMAGQPLTILSSTGPVLVFERLLFSFSRDYSLDYLPFRLWVGIWVATFCLVLVATEASVLVRYFTRFTEEGFCALISLIFIYDAVGKMLNLTHTYPIQKPGSSAYGCLCQYPGPGGNESQWIRTRPKDRDDIVSMDLGLINASLLPPPECTRQGGHPRGPGCHTVPDIAFFSLLLFLTSFFFAMALKCVKTSRFFPSVVRKGLSDFSSVLAILLGCGLDAFLGLATPKLMVPREFKPTLPGRGWLVSPFGANPWWWSVAAALPALLLSILIFMDQQITAVILNRMEYRLQKGAGFHLDLFCVAVLMLLTSALGLPWYVSATVISLAHMDSLRRESRACAPGERPNFLGIREQRLTGLVVFILTGASIFLAPVLKFIPMPVLYGIFLYMGVAALSSIQFTNRVKLLLMPAKHQPDLLLLRHVPLTRVHLFTAIQLACLGLLWIIKSTPAAIIFPLMLLGLVGVRKALERVFSPQELLWLDELMPEEERSIPEKGLEPEHSFSGSDSEDSELMYQPKAPEINISVN

SEQ ID NO: 93241 - protein, 174 aa, Artificial Sequence
  derived and/or modified sequence
MAAANKGNKPRVRSIRFAAGHDAEGSHSHVHFDEKLHDSVVMVTQESDSSFLVKVGFLKILHRYEITFTLPPVHRLSKDVREAPVPSLHLKLLSVVPVPEGYSVKCEYSAHKEGVLKEEILLACEGGTGTCVRVTVQARVMDRHHGTPMLLDGVKCVGAELEYDSEHSDWHGFD

SEQ ID NO: 93242 - DNA, 1886 bp, Artificial Sequence
  derived and/or modified sequence
gttctgatgcttctccaggccgggccaggcacccgggacgcgtctcgggcccgcacgggggttgcttctttcgagacaggggatggggtggaaggggaagaggtccaaaccctggggtcgaaacaggagtgatggagggttcctcagctcctgaacgagaccaacacggcccgtatcgatggccgaagccggcgtggaagcccagggagaaaggccaccttcgggagctccacccagccccgagacgcgcccgacagccctcccgagagcgaagggcccaagggaggtgcgtcctaagcaaggttcaaggctagaggcgctatcccccaggcggaagaaggagcgggggcggggcctatccgaggccctccttctccctcttcgagtggtcggttctggcccctggcctagttgggccgcctgcccgtcttcctcgcgagagctcgcccggcaggcgcggactagcagggcgctgcctcggcgaccctggcacgtgacgtaggcggccctcgccagttggccgttctttggagcccgctcattggtccggagcgtccctcgccccaccctcccagatcaaccaatgggcggaggcgggggcgtgccgacgggagggcggccgcggcgcggggctcccttcctcgtgctcggcgttgagctcctgcagccgccgccgctgcagtggtcgtccctgccctccccggccccggggtgcaccccgcaaggctcccgctggtgtccctggagcatgggaggctgctgagcgtgagtggcggtgtctggcaggagctgcgtggcagggagggcgtccatggctgcagccaacaagggcaacaagcccagagtccggagtatccgctttgcggcaggccacgatgcagaaggatcccacagccacgtccactttgatgagaagctgcatgactcggtggtcatggtcacccaggagagtgacagcagctttctggtcaaggttggcttcctgaagatcctgcacaggtatgagattaccttcactctgcccccagtgcacaggctgagcaaggatgtccgcgaggcacctgtccccagcctgcacctcaagctcctcagcgtggtgcccgtccctgaaggttatagtgtcaagtgtgagtactcggcgcacaaagagggcgtcctcaaagaggagatactgctagcctgcgaaggtggcactggcacctgtgtgcgcgtgacggtgcaggcccgcgtcatggaccggcaccacggcacgcccatgctgctggatggtgtcaagtgtgtgggcgccgagctggaatacgactcagagcacagcgactggcacggctttgactgaggcccgaggccccgcctgccccgggcccctcagccttaaaccccgccttgtccccccgacatgctgcgtgatggtgtggcttcctcgcccctctctggggtgggtgtgggggtggagtggccttgcccacgcctctcacctctgccttcatttgtgctgccaccctgcccctccctcgtcctcctctcccacttcctcctctctgtgtgcctcagtctcctgccggaagaaatgggttgagcccgaaaggaggctgtctgaggaagggagagggagggcctggggtgggtcccccactccccaccccaagccacagggactcccaccagggtctgggagaggacggagctggctctgtggcgtcgtggccccattactgctgccttgcttcagccacctctcctgcccctccctagtccccactgctgtccaccatgagtaggagggaggtgcagtccccagcccccacccctcaggtctgtgttacttggtttttaagcgactggttgggatagaaccctaaagaaataaacttccagtggataccgga

SEQ ID NO: 93243 - DNA, 1734 bp, Artificial Sequence
  derived and/or modified sequence
gacgggagggcggccgcggcgcggggctcccttcctcgtgctcggcgttgagctcctgcagccgccgccgctgcagtggtcgtccctgccctccccggccccggggtgcaccccgcaaggtgaggccacccctctgctccctgcctcccggttccttcccgttcgccgaggtcccctcccggtcccggccctgtcctgagcagtcagtgcctgggaccccagcggccgtgatggcagggctggggtggggggctccgctgtcggggccgggcctggaggactccccagcacctgaactagagtgatgtcaggttcccggggcgcagtgaccgttagctggtgcagctggggtgttttccgcgaagcgattgtccgggggcatgagtgcggtagtgagggcgggggcgtaatggggtcagcgccccctcctccccacgaccctgttcattgccgctgcctcgctgcatgaccttggaccagtagcatctctgagcctccgagcctcagcaccctcaggaaggagggcagtgatgtctgggagtgcgggctccggagactcctgcgtcagccgaggctcccgctggtgtccctggagcatgggaggctgctgagcgtgagtggcggtgtctggcaggagctgcgtggcagggagggcgtccatggctgcagccaacaagggcaacaagcccagagtccggagtatccgctttgcggcaggccacgatgcagaaggatcccacagccacgtccactttgatgagaagctgcatgactcggtggtcatggtcacccaggagagtgacagcagctttctggtcaaggttggcttcctgaagatcctgcacaggtatgagattaccttcactctgcccccagtgcacaggctgagcaaggatgtccgcgaggcacctgtccccagcctgcacctcaagctcctcagcgtggtgcccgtccctgaaggttatagtgtcaagtgtgagtactcggcgcacaaagagggcgtcctcaaagaggagatactgctagcctgcgaaggtggcactggcacctgtgtgcgcgtgacggtgcaggcccgcgtcatggaccggcaccacggcacgcccatgctgctggatggtgtcaagtgtgtgggcgccgagctggaatacgactcagagcacagcgactggcacggctttgactgaggcccgaggccccgcctgccccgggcccctcagccttaaaccccgccttgtccccccgacatgctgcgtgatggtgtggcttcctcgcccctctctggggtgggtgtgggggtggagtggccttgcccacgcctctcacctctgccttcatttgtgctgccaccctgcccctccctcgtcctcctctcccacttcctcctctctgtgtgcctcagtctcctgccggaagaaatgggttgagcccgaaaggaggctgtctgaggaagggagagggagggcctggggtgggtcccccactccccaccccaagccacagggactcccaccagggtctgggagaggacggagctggctctgtggcgtcgtggccccattactgctgccttgcttcagccacctctcctgcccctccctagtccccactgctgtccaccatgagtaggagggaggtgcagtccccagcccccacccctcaggtctgtgttacttggtttttaagcgactggttgggatagaaccctaaagaaataaacttccagtggataccgga

SEQ ID NO: 93244 - DNA, 525 bp, Artificial Sequence
  derived and/or modified sequence
atggccgccgccaacaagggcaacaagcccagagtgagaagcatcagattcgccgccggccacgacgccgagggcagccacagccacgtgcacttcgacgagaagctgcacgacagcgtggtgatggtgacccaggagagcgacagcagcttcctggtgaaggtgggcttcctgaagatcctgcacagatacgagatcaccttcaccctgccccccgtgcacagactgagcaaggacgtgagagaggcccccgtgcccagcctgcacctgaagctgctgagcgtggtgcccgtgcccgagggctacagcgtgaagtgcgagtacagcgcccacaaggagggcgtgctgaaggaggagatcctgctggcctgcgagggcggcaccggcacctgcgtgagagtgaccgtgcaggccagagtgatggacagacaccacggcacccccatgctgctggacggcgtgaagtgcgtgggcgccgagctggagtacgacagcgagcacagcgactggcacggcttcgactag

SEQ ID NO: 93245 - DNA, 525 bp, Artificial Sequence
  derived and/or modified sequence
atggccgccgcaaacaaaggcaacaagcctcgcgtcaggtctattagatttgctgccggacacgatgccgaaggctcccattcccatgtccatttcgatgaaaagctgcatgattcggtggtgatggtgactcaagaatcagactcatcttttctggtcaaagttggcttcctcaaaatcttgcacagatatgagatcacatttaccctgccacctgtgcacaggcttagcaaggacgttcgagaggccccagttccgtccctgcatttgaagctgctcagcgtggttccagtgccggaaggttattcggtgaagtgtgaatactctgctcacaaggagggagtgttgaaagaagaaattcttctcgcctgtgaaggcggaaccgggacttgcgtccgggtgactgtgcaggcacgcgtgatggacagacatcacggcactcccatgctactcgatggagtgaaatgcgtcggtgccgaattagagtacgattctgaacatagcgactggcatggattcgactag

SEQ ID NO: 93246 - DNA, 525 bp, Artificial Sequence
  derived and/or modified sequence
atggcggccgccaacaaggggaataaaccgcgcgtgagatctattagattcgccgccggccatgacgctgaaggttctcacagtcatgttcactttgacgagaaactgcatgactcagttgttatggttacccaggagtcagactcctcctttctggtgaaggtcggcttcttaaagatcctgcatcggtacgagattactttcactctgccccccgtgcacaggctaagtaaagatgtccgcgaagcgccagtcccctctctgcacctcaaactgctctcggtggtgccggtgccagagggctatagtgtgaaatgcgagtattcagctcacaaggaaggagttctaaaagaggaaatcctgctcgcatgtgagggaggtacaggcacttgcgtcagggtgaccgtccaggcccgcgttatggatcgtcaccacggcacccctatgctgctggacggcgtgaagtgcgttggggctgaactcgagtacgattccgagcactcagactggcacggcttcgactag

SEQ ID NO: 93247 - DNA, 525 bp, Artificial Sequence
  derived and/or modified sequence
atggctgctgccaacaagggcaacaagccccgggtgcgcagcatccgctttgctgctggccatgatgctgagggcagccacagccacgtgcactttgatgagaagctgcatgattctgtggtgatggtgacccaggagagtgacagcagcttcctggtgaaggtgggcttcctgaagatcctgcacagatatgagatcaccttcaccctgccccctgtgcaccggctgagcaaggatgtgcgggaggcccctgtgcccagcctgcacctgaagctgctgtctgtggtgcctgtgcctgagggctacagcgtgaagtgtgagtacagcgcccacaaggagggcgtgctgaaggaggagatcctgctggcctgtgagggcggcaccggcacctgtgtgcgggtgacagtgcaggcccgggtgatggacagacaccacggcacccccatgctgctggatggagtgaagtgtgtgggcgctgagctggagtatgattctgagcacagcgactggcacggctttgattag

SEQ ID NO: 93248 - DNA, 525 bp, Artificial Sequence
  derived and/or modified sequence
atggccgccgccaacaagggcaacaagccccgggtgcggagcatcaggtttgctgcgggccacgacgcagagggttcccattcccatgttcattttgacgaaaaacttcacgactccgtagtgatggtgacccaggagagcgactcatcctttctggtgaaggttggctttctaaaaattctacacaggtatgaaattacctttacactgcccccagttcatcggctcagcaaagacgtgagggaggcccccgtgcctagccttcacctgaaactactatctgtagtgcctgtacctgaagggtactccgtaaaatgcgagtatagcgctcataaagaaggcgtgctgaaagaggaaattctgttagcctgtgaaggaggaactggaacatgcgtgcgggtgaccgtgcaagccagagtcatggacagacatcacgggactcccatgctcttggatggagttaaatgtgtaggcgccgagctcgagtatgacagcgagcactctgattggcacgggtttgattag

SEQ ID NO: 93249 - DNA, 525 bp, Artificial Sequence
  derived and/or modified sequence
atggccgccgccaacaagggcaacaagccccgggtgcggagcatcaggttcgccgcaggccacgacgctgagggttcacacagccatgttcatttcgatgagaagctccatgactctgtcgtgatggtgacgcaggagtccgacagtagttttctcgtgaaggttggatttttgaaaatcctgcacagatatgagattactttcacactcccaccagtgcatcgcctctctaaggatgtgcgagaggccccagtccctagtctgcatttaaagctgctgagtgtagtacccgttcctgaggggtactctgtgaagtgtgaatattccgctcataaggagggggtcctgaaggaagagatcctgctggcttgtgagggaggtacaggaacctgtgttcgagtgactgtgcaagccagagtaatggatcgccaccatggaactcccatgctgctcgacggagtgaagtgtgtgggggccgaattagagtatgactcagaacattctgactggcatggttttgactag

SEQ ID NO: 93250 - DNA, 525 bp, Artificial Sequence
  derived and/or modified sequence
atggcagcagccaataagggaaacaagcctcgggtgcggtcaattaggtttgcggcaggtcatgacgcagagggctcacatagccacgttcactttgacgagaagctgcacgattctgtggtgatggtgactcaggagagtgactccagcttcttagtcaaggttggcttccttaaaattctgcacaggtatgagatcacttttacactgcccccagtccatcgtctcagtaaggatgttcgggaggcacccgtgccttctcttcatttaaaactactttcagttgtacctgtccctgaaggctatagcgtcaagtgcgagtactcagctcacaaggaaggggtgttaaaagaggagatccttttggcctgcgagggtggaacaggaacttgcgtgcgcgtcaccgtccaggcaagagtcatggacagacatcacggcaccccaatgctcctggacggtgtaaagtgcgtgggagccgaactggagtatgacagtgagcacagcgattggcatggcttcgattag

SEQ ID NO: 93251 - DNA, 525 bp, Artificial Sequence
  derived and/or modified sequence
atggctgctgctaacaaaggcaacaagcctagggtccgatccatccggttcgcagccggacacgatgcagaagggtcccattctcacgtccattttgacgaaaaactgcacgacagcgtggtaatggtcacccaggagtccgattccagcttcttggtcaaggttggctttctgaagatcttgcacagatatgagattactttcacactcccacctgttcacagactcagcaaggatgtgagagaggccccagtcccttctctccatcttaagcttctttcagttgtgccggtccctgaaggatattccgttaagtgcgagtattccgcccacaaggagggagttctgaaagaggagatcctgttagcatgcgaggggggaacaggtacatgtgtgcgcgtgacggtgcaggcgagagtgatggatagacaccatggcacacccatgctgctggacggcgttaaatgtgttggagctgagctggagtatgacagcgagcacagtgactggcacgggttcgactag

SEQ ID NO: 93252 - DNA, 2918 bp, Artificial Sequence
  derived and/or modified sequence
aaacctcgcctggctcccagctggtgctgaagctcgtcagttcaccatccgccctcggcttccgcggggcgctgggccgccagcctcggcaccgtcctttcctttctccctcgcgttaggcaggtgacagcagggacatgtctcgggagatgcaggatgtagacctcgctgaggtgaagcctttggtggagaaaggggagaccatcaccggcctcctgcaagagtttgatgtccagacaaaacctgctacaaccccctcttcaactacgaggacatgcaggagatcacccagcactttgccgtctgccacgtggacgcccctggccagcaggacggcgcagcctccttccccgcagggtacatgtacccctccatggatcagctggctgaaatgcttcctggagtccttcaacagtttgggctgaaaagcattattggcatgggaacaggagcaggcgcctacatcctaactcgatttgctctaaacaaccctgagatggtggagggccttgtccttatcaacgtgaacccttgtgcggaaggctggatggactgggccgcctccaagatctcaggatggacccaagctctgccggacatggtggtgtcccacctttttgggaaggaagaaatgcagagtaacgtggaagtggtccacacctaccgccagcacattgtgaatgacatgaaccccggcaacctgcacctgttcatcaatgcctacaacagccggcgcgacctggagattgagcgaccaatgccgggaacccacacagtcaccctgcagtgccctgctctgttggtggttggggacagctcgcctgcagtggatgccgtggtggagtgcaactcaaaattggacccaacaaagaccactctcctcaagatggcggactgtggcggcctcccgcagatctcccagccggccaagctcgctgaggccttcaagtacttcgtgcagggcatgggatacatgccctcggctagcatgacccgcctgatgcggtcccgcacagcctctggttccagcgtcacttctctggatggcacccgcagccgctcccacaccagcgagggcacccgaagccgctcccacaccagcgagggcacccgcagccgctcgcacaccagcgagggggcccacctggacatcacccccaactcgggtgctgctgggaacagcgccgggcccaagtccatggaggtctcctgctaggcggcctgcccagctgccgcccccggactctgatctctgtagtggccccctcctccccggccccttttcgccccctgcctgccatactgcgcctaactcggtattaatccaaagcttattttgtaagagtgagctctggtggagacaaatgaggtctattacgtgggtgccctctccaaaggcggggtggcggtggaccaaaggaaggaagcaagcatctccgcatcgcatcctcttccattaaccagtggccggttgccactctcctcccctccctcagagacaccaaactgccaaaaacaagacgcgtagcagcacacacttcacaaagccaagcctaggccgccctgagcatcctggttcaaacgggtgcctggtcagaaggccagccgcccacttcccgtttcctctttaactgaggagaagctgatccagtttccggaaacaaaatccttttctcatttggggaggggggtaatagtgacatgcaggcacctcttttaaacaggcaaaacaggaagggggaaaaggtgggattcatgtcgaggctagaggcatttggaacaacaaatctacgtagttaacttgaagaaaccgatttttaaagttggtgcatctagaaagctttgaatgcagaagcaaacaagcttgatttttctagcatcctcttaatgtgcagcaaaagcaggcgacaaaatctcctggctttacagacaaaaatatttcagcaaacgttgggcatcatggtttttgaaggctttagttctgctttctgcctctcctccacagccccaacctcccacccctgatacatgagccagtgattattcttgttcagggagaagatcatttagatttgttttgcattccttagaatggagggcaacattccacagctgccctggctgtgatgagtgtccttgcaggggccggagtaggagcactggggtgggggtggaattggggttactcgatgtaagggattccttgttgttgtgttgagatccagtgcagttgtgatttctgtggatcccagcttggttccaggaattttgtgtgattggcttaaatccagttttcaatcttcgacagctgggctggaacgtgaactcagtagctgaacctgtctgacccggtcacgttcttggatcctcagaactctttgctcttgtcggggtgggggtgggaactcacgtggggagcggtggctgagaaaatgtaaggattctggaatacatattccatgggactttccttccctctcctgcttcctcttttcctgctccctaacctttcgccgaatggggcagcaccactgacgtttctgggcggccagtgcggctgccaggttcctgtactactgccttgtacttttcattttggctcaccgtggattttctcataggaagtttggtcagagtgaattgaatattgtaagtcagccactgggacccgaggatttctgggaccccgcagttgggaggaggaagtagtccagccttccaggtggcgtgagaggcaatgactcgttacctgccgcccatcaccttggaggccttccctggccttgagtagaaaagtcggggatcggggcaagagaggctgagtacggatgggaaactattgtgcacaagtctttccagaggagtttcttaatgagatatttgtatttatttccagaccaataaatttgtaactttgc

SEQ ID NO: 93253 - protein, 324 aa, Artificial Sequence
  derived and/or modified sequence
MSREMQDVDLAEVKPLVEKGETITGLLQEFDVQEQDIETLHGSVHVTLCGTPKGNRPVILTYHDIGMNHKTCAYILTRFALNNPEMVEGLVLINVNPCAEGWMDWAASKISGWTQALPDMVVSHLFGKEEMQSNVEVVHTYRQHIVNDMNPGNLHLFINAYNSRRDLEIERPMPGTHTVTLQCPALLVVGDSSPAVDAVVECNSKLDPTKTTLLKMADCGGLPQISQPAKLAEAFKYFVQGMGYMPSASMTRLMRSRTASGSSVTSLDGTRSRSHTSEGTRSRSHTSEGTRSRSHTSEGAHLDITPNSGAAGNSAGPKSMEVSC

SEQ ID NO: 93254 - protein, 222 aa, Artificial Sequence
  derived and/or modified sequence
MDWAASKISGWTQALPDMVVSHLFGKEEMQSNVEVVHTYRQHIVNDMNPGNLHLFINAYNSRRDLEIERPMPGTHTVTLQCPALLVVGDSSPAVDAVVECNSKLDPTKTTLLKMADCGGLPQISQPAKLAEAFKYFVQGMGYMPSASMTRLMRSRTASGSSVTSLDGTRSRSHTSEGTRSRSHTSEGTRSRSHTSEGAHLDITPNSGAAGNSAGPKSMEVSC

SEQ ID NO: 93255 - protein, 313 aa, Artificial Sequence
  derived and/or modified sequence
MQEITQHFAVCHVDAPGQQDGAASFPAGYMYPSMDQLAEMLPGVLQQFGLKSIIGMGTGAGAYILTRFALNNPEMVEGLVLINVNPCAEGWMDWAASKISGWTQALPDMVVSHLFGKEEMQSNVEVVHTYRQHIVNDMNPGNLHLFINAYNSRRDLEIERPMPGTHTVTLQCPALLVVGDSSPAVDAVVECNSKLDPTKTTLLKMADCGGLPQISQPAKLAEAFKYFVQGMGYMPSASMTRLMRSRTASGSSVTSLDGTRSRSHTSEGTRSRSHTSEGTRSRSHTSEGAHLDITPNSGAAGNSAGPKSMEVSC

SEQ ID NO: 93256 - DNA, 975 bp, Artificial Sequence
  derived and/or modified sequence
atgtctcgtgaaatgcaggacgttgacctggcagaagtgaaaccccttgtcgagaaaggggaaaccattaccggattgctgcaggagttcgacgtccaggaacaagacatagaaacactacacggttctgtccacgtgaccctgtgtggaaccccaaaaggcaacagaccggtaatcctcacgtatcatgatattggtatgaaccataagacatgcgcttacatcttgactagatttgccctgaataaccctgagatggtggagggattggtcctgatcaacgtgaatccctgtgccgagggttggatggattgggctgcttctaagatctcggggtggacccaggcactgccagatatggtcgtgagtcacctgtttggcaaagaagagatgcagtccaacgttgaagtcgttcacacatatagacaacacattgtgaacgatatgaatccgggaaatttgcacctctttataaacgcttataattctagacgagatttagaaatcgaacgtccaatgccgggaacacacaccgtaacccttcagtgcccagccctcctcgtggttggagattcttccccggcagtggatgcagtcgtggaatgcaattccaagttggatcctacaaaaacaaccctgctcaaaatggcagattgcggtgggctccctcagatatcacagcccgcaaaacttgctgaggccttcaaatattttgtccaaggcatgggatatatgcccagcgctagtatgacaaggctgatgaggtctcgcacagcctctggctctagtgtgacctccctagacggcacgcgttcccgctctcacacgtctgaagggactaggtctcggtcgcacacctcagaggggactcggagccgtagccacacctcagaaggggctcacctggatattactcctaattccggcgccgccggtaattctgcaggccccaaatctatggaagtaagctgttag

SEQ ID NO: 93257 - DNA, 669 bp, Artificial Sequence
  derived and/or modified sequence
atggactgggccgccagcaagataagcggatggacgcaggccctgcctgatatggtggtctctcatctgttcggcaaggaggagatgcagagcaatgtcgaagtagtacacacctaccgacaacatatcgttaatgacatgaatcccggcaatctgcatcttttcatcaatgcatataactcacggcgggatctcgaaatcgagagacccatgccaggaacgcacacagtaactctgcaatgtccggctctcctggtggttggagactcatctcccgcagtcgatgcagtcgtcgaatgcaactccaagttggaccctacaaaaacaactttactaaaaatggccgactgtgggggtctcccccagatctctcagccggcgaaactggcagaggccttcaaatattttgttcagggaatgggctacatgccaagtgcctccatgactcggctcatgagatcccggacagcttctggctccagtgtgacatcactcgatggtactaggtccagatcccacacctccgaagggaccaggagccggagtcacacttccgaaggcacccgatcccggagtcacacctctgaaggcgctcatttggatatcactcccaactcaggagccgctggcaatagcgcagggcctaaaagtatggaggtgtcctgttag

SEQ ID NO: 93258 - DNA, 942 bp, Artificial Sequence
  derived and/or modified sequence
atgcaggagataacacagcattttgcagtgtgtcatgtcgacgcacctggtcaacaggatggcgccgcctcttttcctgcaggttatatgtacccaagtatggatcagttagccgagatgcttcctggtgtgctgcagcagttcggcctgaaatcaattatcggtatgggcaccggagccggcgcctatatactcactcgttttgctctaaataacccggagatggttgaaggtttggtgctcatcaatgtaaatccctgtgccgaaggctggatggactgggccgctagcaaaatcagtggctggacacaggccctccctgatatggtggtatcacacctttttggaaaagaagaaatgcagtccaacgttgaagtcgtccacacgtacagacagcatattgtaaatgatatgaaccccggcaatctccatctcttcataaatgcctacaattctcggcgagacctcgaaatagagaggcctatgccaggcacccacacagttacacttcagtgcccagccctgttggttgtgggagacagcagtcccgcagtggatgccgtggtggagtgcaactccaagctggatcccacaaaaactactctgcttaagatggctgactgcgggggccttccgcagatctcacagcctgccaaacttgccgaggcctttaagtacttcgtgcagggtatgggttacatgccctccgcatccatgacccgtctcatgcgtagtcgtactgcatccgggtcctctgtcacaagtcttgacgggactagaagccggtctcatacgagcgagggcacaagaagccgaagccataccagcgaaggcacaaggagcaggtcccatacatccgagggtgcccatctggatatcacaccaaatagcggggccgccggtaattcggcgggacctaaaagcatggaagttagttgttag

SEQ ID NO: 93259 - DNA, 975 bp, Artificial Sequence
  derived and/or modified sequence
atgagccgggagatgcaggatgtggacctggccgaggtgaagcccctggtggagaagggggagaccatcaccggcctgctgcaggagtttgatgtgcaggagcaggacatcgagaccctgcacggctctgtgcacgtgaccctgtgtggcacccccaagggcaacagacctgtgatcctgacctaccatgacatcggcatgaaccacaagacctgtgcctacatcctgaccaggtttgccctgaacaaccctgagatggtggagggcctggtgctgatcaacgtgaacccctgtgccgagggctggatggactgggccgccagcaagatcagcggctggacccaggccctgcctgacatggtggtgagccacctgtttgggaaggaggagatgcagagcaatgtggaggtggtgcacacctaccggcagcacatcgtgaatgacatgaaccctggcaacctgcacctgttcatcaatgcctacaacagccggcgggacctggagattgagcggcccatgcctggcacccacacagtgaccctgcagtgcccagccctgctggtggtgggggacagcagccctgctgtggatgctgtggtggagtgcaacagcaagctggaccccaccaagaccaccctgctgaagatggctgactgtggcggcctgccccagatcagccagcctgccaagctggccgaggccttcaagtactttgtgcagggcatgggctacatgcccagcgcctccatgacccggctgatgaggagcaggacagccagcggcagctctgtgaccagcctggatggcaccaggagccgcagccacaccagcgagggcaccaggagccgcagccacaccagcgagggcaccaggagccgcagccacaccagcgagggcgcccacctggacatcacccccaacagcggggctgctggcaacagcgctggccccaagtccatggaggtgtcctgctag

SEQ ID NO: 93260 - DNA, 669 bp, Artificial Sequence
  derived and/or modified sequence
atggactgggccgccagcaagatcagcggctggacccaggccctgcctgacatggtggtgagccacctgtttgggaaggaggagatgcagagcaatgtggaggtggtgcacacctaccggcagcacatcgtgaatgacatgaaccctggcaacctgcacctgttcatcaatgcctacaacagccggcgggacctggagattgagcggcccatgcctggcacccacacagtgaccctgcagtgcccagccctgctggtggtgggggacagcagccctgctgtggatgctgtggtggagtgcaacagcaagctggaccccaccaagaccaccctgctgaagatggctgactgtggcggcctgccccagatcagccagcctgccaagctggccgaggccttcaagtactttgtgcagggcatgggctacatgcccagcgcctccatgacccggctgatgaggagcaggacagccagcggcagctctgtgaccagcctggatggcaccaggagccgcagccacaccagcgagggcaccaggagccgcagccacaccagcgagggcaccaggagccgcagccacaccagcgagggcgcccacctggacatcacccccaacagcggggctgctggcaacagcgctggccccaagtccatggaggtgtcctgctag

SEQ ID NO: 93261 - DNA, 942 bp, Artificial Sequence
  derived and/or modified sequence
atgcaggagatcacccagcactttgctgtgtgccacgtggatgcccctggccagcaggatggagctgccagcttccctgctggctacatgtaccccagcatggaccagctggccgagatgctgcccggggtgctgcagcagtttggcctgaagagcatcatcggcatgggcaccggggccggggcctacatcctgaccaggtttgccctgaacaaccctgagatggtggagggcctggtgctgatcaacgtgaacccctgtgccgagggctggatggactgggccgccagcaagatcagcggctggacccaggccctgcctgacatggtggtgagccacctgtttgggaaggaggagatgcagagcaatgtggaggtggtgcacacctaccggcagcacatcgtgaatgacatgaaccctggcaacctgcacctgttcatcaatgcctacaacagcagaagagacctggagattgaaagacccatgcctggcacccacacagtgaccctgcagtgcccagccctgctggtggtgggggacagcagccctgctgtggatgctgtggtggagtgcaacagcaagctggaccccaccaagaccaccctgctgaagatggctgactgtggcggcctgccccagatcagccagcctgccaagctggccgaggccttcaagtactttgtgcagggcatgggctacatgcccagcgcctccatgacccggctgatgaggagcaggacagccagcggcagctctgtgaccagcctggatggcaccaggagccgcagccacaccagcgagggcaccaggagccgcagccacaccagcgagggcaccaggagccgcagccacaccagcgagggcgcccacctggacatcacccccaacagcggggccgccggcaacagcgctggccccaagtccatggaggtgtcctgctag

SEQ ID NO: 93262 - DNA, 975 bp, Artificial Sequence
  derived and/or modified sequence
atgagccgggagatgcaggacgtggacctggccgaggtgaagcccttagttgagaagggagagacgataaccggcctgctgcaagaattcgatgtgcaggaacaagacattgagacactgcatggcagcgttcacgtcaccctgtgtggaacacctaaggggaataggcccgtgattctgacctatcacgatatcgggatgaatcacaaaacctgtgcatacattttgacccgtttcgcactaaataatccagagatggtggaaggactggttctgatcaacgttaacccttgcgccgaaggctggatggattgggccgcctcaaagatttccgggtggactcaggcactaccagacatggtggtctcgcatctctttggtaaagaagagatgcagtctaacgttgaagtggttcatacttaccgccaacacatcgtcaatgatatgaatccagggaacttgcatctgttcatcaatgcttacaacagccggagagacctcgaaatagagcgtccaatgccaggtacacataccgttactttacaatgccctgccttactggtcgtgggggactcatctcctgctgtggacgccgtggttgaatgtaattcaaagctggaccccacgaaaacaacattactgaaaatggcagactgtggcggcctccctcagatcagccaacctgccaaattggctgaagcatttaaatacttcgtgcagggaatgggctacatgccgtcggcctccatgacaagacttatgaggagccggacagcatcggggtcctcagtcacatcgctcgatggcaccaggtcgagatctcacacaagtgagggcacaagatctcgtagccacacttctgaggggaccagaagccggtctcatacctctgagggagcgcacctggatatcacacctaattctggcgcagctggaaactcggcagggccaaaatccatggaggttagctgttag

SEQ ID NO: 93263 - DNA, 669 bp, Artificial Sequence
  derived and/or modified sequence
atggactgggccgccagcaagatcagcggctggacccaggccctgcccgacatggttgtgagtcacctgttcgggaaagaagagatgcaatccaacgtagaagtggtgcacacttacaggcagcacatagtgaatgatatgaatcctggtaatctccatctgttcataaacgcctataactcacgtagggacttagaaatcgaacggcccatgccaggaactcacaccgttactctgcaatgtcctgctttactggtggtcggcgacagttctccagccgtggacgccgtggtagagtgtaactccaaactggaccccacaaagactactctactgaagatggcggactgtggcgggctgccccaaattagtcagccggcaaaattggctgaagcattcaaatacttcgtgcagggcatgggctacatgccttcggcatccatgaccagactgatgaggtccagaacagctagcggttcttctgtgactagtttggacggcacacggtcccgttctcacacgtcggagggcacgcggagccggagccacacttcagagggtacacgttcaaggtcacacacaagcgaaggagcacatctggatatcactcccaacagtggtgccgctgggaactccgccggaccaaagagcatggaagtgtcatgctag

SEQ ID NO: 93264 - DNA, 942 bp, Artificial Sequence
  derived and/or modified sequence
atgcaggagatcacccagcacttcgccgtgtgccacgtggacgcccccggtcagcaggatggcgccgcaagttttccagctgggtacatgtacccttccatggatcagctggccgagatgctccctggagtgcttcagcaatttggactcaaatccattatcgggatgggaactggagccggcgcctacatcttgacccgtttcgcccttaataatcctgaaatggtggaaggtttggtactcattaatgtgaacccgtgtgcggagggctggatggattgggccgccagcaagatatcaggctggactcaggctctgccagacatggtagtttctcacttgtttggaaaagaggagatgcagtccaacgtcgaagtggttcatacttaccgccaacacattgtgaatgatatgaaccctggcaacctccatcttttcataaacgcatataattcacggagagatctggaaattgagcgccctatgccagggactcacactgtgactctccagtgccctgccctgctcgtggtgggcgactcttcacccgcggtcgacgctgtagtggaatgcaatagcaagttggacccgacaaagaccactctcctcaagatggcggactgcggagggctgccccagattagtcaaccagcgaaactagccgaagcttttaaatatttcgtccaaggaatggggtacatgccaagcgccagtatgacaagattaatgcgctcccggacagcctcaggatcttctgtgacgagcctggacggcacgcgatccagatcccacaccagtgaaggaactcgttcgagatcccacacaagcgaagggacgaggagtagatcacatacctctgagggagcacatcttgatattacccctaactctggcgccgccgggaactccgcagggcctaaatctatggaagtgtcatgttag

SEQ ID NO: 93265 - DNA, 2818 bp, Artificial Sequence
  derived and/or modified sequence
aaacctcgcctggctcccagctggtgctgaagctcgtcagttcaccatccgccctcggcttccgcggggcgctgggccgccagcctcggcaccgtcctttcctttctccctcgcgttaggcaggtgacagcagggacatgtctcgggagatgcaggatgtagacctcgctgaggtgaagcctttggtggagaaaggggagaccatcaccggcctcctgcaagagtttgatgtccaggagcaggacatcgagactttacatggctctgttcacgtcacgctgtgtgggactcccaagggaaaccggcctgtcatcctcacctaccatgacatcggcatgaaccacaaaacctgcgcctacatcctaactcgatttgctctaaacaaccctgagatggtggagggccttgtccttatcaacgtgaacccttgtgcggaaggctggatggactgggccgcctccaagatctcaggatggacccaagctctgccggacatggtggtgtcccacctttttgggaaggaagaaatgcagagtaacgtggaagtggtccacacctaccgccagcacattgtgaatgacatgaaccccggcaacctgcacctgttcatcaatgcctacaacagccggcgcgacctggagattgagcgaccaatgccgggaacccacacagtcaccctgcagtgccctgctctgttggtggttggggacagctcgcctgcagtggatgccgtggtggagtgcaactcaaaattggacccaacaaagaccactctcctcaagatggcggactgtggcggcctcccgcagatctcccagccggccaagctcgctgaggccttcaagtacttcgtgcagggcatgggatacatgccctcggctagcatgacccgcctgatgcggtcccgcacagcctctggttccagcgtcacttctctggatggcacccgcagccgctcccacaccagcgagggcacccgaagccgctcccacaccagcgagggcacccgcagccgctcgcacaccagcgagggggcccacctggacatcacccccaactcgggtgctgctgggaacagcgccgggcccaagtccatggaggtctcctgctaggcggcctgcccagctgccgcccccggactctgatctctgtagtggccccctcctccccggccccttttcgccccctgcctgccatactgcgcctaactcggtattaatccaaagcttattttgtaagagtgagctctggtggagacaaatgaggtctattacgtgggtgccctctccaaaggcggggtggcggtggaccaaaggaaggaagcaagcatctccgcatcgcatcctcttccattaaccagtggccggttgccactctcctcccctccctcagagacaccaaactgccaaaaacaagacgcgtagcagcacacacttcacaaagccaagcctaggccgccctgagcatcctggttcaaacgggtgcctggtcagaaggccagccgcccacttcccgtttcctctttaactgaggagaagctgatccagtttccggaaacaaaatccttttctcatttggggaggggggtaatagtgacatgcaggcacctcttttaaacaggcaaaacaggaagggggaaaaggtgggattcatgtcgaggctagaggcatttggaacaacaaatctacgtagttaacttgaagaaaccgatttttaaagttggtgcatctagaaagctttgaatgcagaagcaaacaagcttgatttttctagcatcctcttaatgtgcagcaaaagcaggcgacaaaatctcctggctttacagacaaaaatatttcagcaaacgttgggcatcatggtttttgaaggctttagttctgctttctgcctctcctccacagccccaacctcccacccctgatacatgagccagtgattattcttgttcagggagaagatcatttagatttgttttgcattccttagaatggagggcaacattccacagctgccctggctgtgatgagtgtccttgcaggggccggagtaggagcactggggtgggggtggaattggggttactcgatgtaagggattccttgttgttgtgttgagatccagtgcagttgtgatttctgtggatcccagcttggttccaggaattttgtgtgattggcttaaatccagttttcaatcttcgacagctgggctggaacgtgaactcagtagctgaacctgtctgacccggtcacgttcttggatcctcagaactctttgctcttgtcggggtgggggtgggaactcacgtggggagcggtggctgagaaaatgtaaggattctggaatacatattccatgggactttccttccctctcctgcttcctcttttcctgctccctaacctttcgccgaatggggcagcaccactgacgtttctgggcggccagtgcggctgccaggttcctgtactactgccttgtacttttcattttggctcaccgtggattttctcataggaagtttggtcagagtgaattgaatattgtaagtcagccactgggacccgaggatttctgggaccccgcagttgggaggaggaagtagtccagccttccaggtggcgtgagaggcaatgactcgttacctgccgcccatcaccttggaggccttccctggccttgagtagaaaagtcggggatcggggcaagagaggctgagtacggatgggaaactattgtgcacaagtctttccagaggagtttcttaatgagatatttgtatttatttccagaccaataaatttgtaactttgcagcg

SEQ ID NO: 93266 - DNA, 1442 bp, Artificial Sequence
  derived and/or modified sequence
acaaacctcgcctggctcccagctggtgctgaagctcgtcagttcaccatccgccctcggcttccgcggggcgctgggccgccagcctcggcaccgtcctttcctttctccctcgcgttaggcaggtgacagcagggacatgtctcgggagatgcaggatgtagacctcgctgaggtgaagcctttggtggagaaaggggagaccatcaccggcctcctgcaagagtttgatgtccaggagcaggacatcgagactttacatggctctgttcacgtcacgctgtgtgggactcccaagggaaaccggcctgtcatcctcacctaccatgacatcggcatgaaccacaaaacctgctacaaccccctcttcaactacgaggacatgcaggagatcacccagcactttgccgtctgccacgtggacgcccctggccagcaggacggcgcagcctccttccccgcagggccttgtccttatcaacgtgaacccttgtgcggaaggctggatggactgggccgcctccaagatctcaggatggacccaagctctgccggacatggtggtgtcccacctttttgggaaggaagaaatgcagagtaacgtggaagtggtccacacctaccgccagcacattgtgaatgacatgaaccccggcaacctgcacctgttcatcaatgcctacaacagccggcgcgacctggagattgagcgaccaatgccgggaacccacacagtcaccctgcagtgccctgctctgttggtggttggggacagctcgcctgcagtggatgccgtggtggagtgcaactcaaaattggacccaacaaagaccactctcctcaagatggcggactgtggcggcctcccgcagatctcccagccggccaagctcgctgaggccttcaagtacttcgtgcagggcatgggatacatgccctcggctagcatgacccgcctgatgcggtcccgcacagcctctggttccagcgtcacttctctggatggcacccgcagccgctcccacaccagcgagggcacccgaagccgctcccacaccagcgagggcacccgcagccgctcgcacaccagcgagggggcccacctggacatcacccccaactcgggtgctgctgggaacagcgccgggcccaagtccatggaggtctcctgctaggcggcctgcccagctgccgcccccggactctgatctctgtagtggccccctcctccccggccccttttcgccccctgcctgccatactgcgcctaactcggtattaatccaaagcttattttgtaagagtgagctctggtggagacaaatgaggtctattacgtgggtgccctctccaaaggcggggtggcggtggaccaaaggaaggaagcaagcatctccgcatcgcatcctcttccattaaccagtggccggttgccactctcc

SEQ ID NO: 93267 - DNA, 975 bp, Artificial Sequence
  derived and/or modified sequence
atgtcaagggagatgcaggatgtggatctcgccgaggtcaagccactagtggaaaaaggcgaaactattaccggcctcctccaagaattcgacgtgcaggagcaggacattgaaaccctgcacggtagtgttcacgttactttatgtggaacaccgaagggaaatcgccctgttattctcacttatcatgacatcgggatgaaccataagacctgtgcttacatcctcacccggttcgccttgaataatcccgaaatggtggagggactggtgctaattaatgtcaatccttgtgccgagggctggatggactgggccgcatcgaaaatctctgggtggacccaagccttacccgatatggtggtgagccacctgtttggaaaggaggaaatgcagtcaaatgtggaagttgtgcacacctaccgccagcatattgtgaatgatatgaacccaggaaatttacaccttttcataaacgcgtataactcaagaagagatctagaaatcgaacgccctatgccaggtactcacaccgtgactctgcaatgcccagccttgctcgtggttggtgactcgagcccggcagtggatgctgtcgtggagtgcaattccaaacttgatccgacaaaaactaccctgttgaagatggccgactgtgggggtctgcctcagatttctcaaccagccaagctggcggaggccttcaaatactttgtgcaggggatgggctacatgcccagcgcatctatgactaggctgatgcggtctagaaccgctagcggcagctcagttacctcactggatggtacccgttcgcgttctcataccagcgagggcactaggtcacgatctcacacaagcgaaggcaccaggtctcgttcccacaccagcgagggagctcacttagacattaccccaaattccggagccgctggcaactccgcaggaccaaagagtatggaggtcagttgttag

SEQ ID NO: 93268 - DNA, 669 bp, Artificial Sequence
  derived and/or modified sequence
atggactgggccgcttctaaaatttcaggttggacacaggccctccccgatatggtggtgagccacctctttggcaaggaagaaatgcagtcaaacgtcgaagtcgtgcacacatatagacagcatatcgtgaatgacatgaacccagggaatctacaccttttcatcaatgcctacaactcccgcagagatctggagatcgagcgccctatgcccggtactcacaccgtcacccttcagtgtcccgcactcctggtggtgggcgattccagtccagctgtagatgccgtcgtcgagtgcaactccaaactggaccctaccaagactaccttgctcaagatggcagattgtggtggccttccgcagattagccagcccgcaaaactggctgaagccttcaagtactttgtgcaaggcatggggtatatgccatccgctagcatgaccaggctcatgcgcagccggaccgcgtccggctctagtgtgaccagcctcgacgggacacgaagtagatcgcacacaagtgaaggaactaggtcaagaagtcacacatcagagggtacccgaagccgcagtcacacaagcgaaggcgctcacctcgacatcacgccaaattccggcgcagcaggcaactcagcaggtccgaagagtatggaagtgagttgctag

SEQ ID NO: 93269 - DNA, 942 bp, Artificial Sequence
  derived and/or modified sequence
atgcaagagattacccagcattttgctgtgtgccacgttgatgccccaggccaacaggacggagccgcttctttccctgccggatatatgtaccccagcatggatcagcttgccgagatgctccccggtgtgctgcagcagttcggcctcaaatctatcatcggcatgggcactggcgctggcgcatacattttaacaaggttcgcacttaacaatcccgagatggtcgagggcctcgtgctgattaatgttaatccatgcgccgaaggctggatggactgggctgccagcaaaatctccggctggacccaggcactgccggacatggttgtgagccacctcttcggcaaagaggaaatgcagagtaacgttgaggtcgttcatacataccggcagcacattgtgaacgacatgaatccaggaaacctgcacctgtttattaacgcatataatagcagacgggaccttgagatagagaggccaatgccaggcactcacaccgtcacgctccagtgccctgctttgttagttgttggcgacagttcccccgcagttgacgctgtggtcgagtgcaatagtaagctcgaccctaccaaaactacacttcttaaaatggcagattgcggcggattgccccaaatttcccagcccgcaaagctggcagaggccttcaaatatttcgttcagggaatgggatatatgccatccgcttccatgacacgcctgatgcggtcccgcactgcttctggcagctccgtaacaagtctcgacggcacgcgatctagatctcacacctccgaaggtacgcgatccagaagccacacaagtgaaggcactcggtcccggagtcacacctccgagggggctcacttggatatcacccccaattcaggagccgcaggcaattctgctggcccaaaaagtatggaagtgtcctgttag

SEQ ID NO: 93270 - DNA, 975 bp, Artificial Sequence
  derived and/or modified sequence
atgagcagagagatgcaggacgtggacctggccgaggtgaagcccctggtggagaagggcgagaccatcaccggcctgctgcaggagttcgacgtgcaggagcaggacatcgagaccctgcacggcagcgtgcacgtgaccctgtgcggcacccccaagggcaacagacccgtgatcctgacctaccacgacatcggcatgaaccacaagacctgcgcctacatcctgaccagattcgccctgaacaaccccgagatggtggagggcctggtgctgatcaacgtgaacccctgcgccgagggctggatggactgggccgccagcaagatcagcggctggacccaggccctgcccgacatggtggtgagccacctgttcggcaaggaggagatgcagagcaacgtggaggtggtgcacacctacagacagcacatcgtgaacgacatgaaccccggcaacctgcacctgttcatcaacgcctacaacagcagaagagacctggagatcgagagacccatgcccggcacccacaccgtgaccctgcagtgccccgccctgctggtggtgggcgacagcagccccgccgtggacgccgtggtggagtgcaacagcaagctggaccccaccaagaccaccctgctgaagatggccgactgcggcggcctgccccagatcagccagcccgccaagctggccgaggccttcaagtacttcgtgcagggcatgggctacatgcccagcgccagcatgaccagactgatgagaagcagaaccgccagcggcagcagcgtgaccagcctggacggcaccagaagcagaagccacaccagcgagggcaccagaagcagaagccacaccagcgagggcaccagaagcagaagccacaccagcgagggcgcccacctggacatcacccccaacagcggcgccgccggcaacagcgccggccccaagagcatggaggtgagctgctag

SEQ ID NO: 93271 - DNA, 669 bp, Artificial Sequence
  derived and/or modified sequence
atggactgggccgccagcaagatcagcggctggacccaggccctgcccgacatggtggtgagccacctgttcggcaaggaggagatgcagagcaacgtggaggtggtgcacacctacagacagcacatcgtgaacgacatgaaccccggcaacctgcacctgttcatcaacgcctacaacagcagaagagacctggagatcgagagacccatgcccggcacccacaccgtgaccctgcagtgccccgccctgctggtggtgggcgacagcagccccgccgtggacgccgtggtggagtgcaacagcaagctggaccccaccaagaccaccctgctgaagatggccgactgcggcggcctgccccagatcagccagcccgccaagctggccgaggccttcaagtacttcgtgcagggcatgggctacatgcccagcgccagcatgaccagactgatgagaagcagaaccgccagcggcagcagcgtgaccagcctggacggcaccagaagcagaagccacaccagcgagggcaccagaagcagaagccacaccagcgagggcaccagaagcagaagccacaccagcgagggcgcccacctggacatcacccccaacagcggcgccgccggcaacagcgccggccccaagagcatggaggtgagctgctag

SEQ ID NO: 93272 - DNA, 942 bp, Artificial Sequence
  derived and/or modified sequence
atgcaggagatcacccagcacttcgccgtgtgccacgtggacgcccccggccagcaggacggcgccgccagcttccccgccggctacatgtaccccagcatggaccagctggccgagatgctgcccggcgtgctgcagcagttcggcctgaagagcatcatcggcatgggcaccggcgccggcgcctacatcctgaccagattcgccctgaacaaccccgagatggtggagggcctggtgctgatcaacgtgaacccctgcgccgagggctggatggactgggccgccagcaagatcagcggctggacccaggccctgcccgacatggtggtgagccacctgttcggcaaggaggagatgcagagcaacgtggaggtggtgcacacctacagacagcacatcgtgaacgacatgaaccccggcaacctgcacctgttcatcaacgcctacaacagcagaagagacctggagatcgagagacccatgcccggcacccacaccgtgaccctgcagtgccccgccctgctggtggtgggcgacagcagccccgccgtggacgccgtggtggagtgcaacagcaagctggaccccaccaagaccaccctgctgaagatggccgactgcggcggcctgccccagatcagccagcccgccaagctggccgaggccttcaagtacttcgtgcagggcatgggctacatgcccagcgccagcatgaccagactgatgagaagcagaaccgccagcggcagcagcgtgaccagcctggacggcaccagaagcagaagccacaccagcgagggcaccagaagcagaagccacaccagcgagggcaccagaagcagaagccacaccagcgagggcgcccacctggacatcacccccaacagcggcgccgccggcaacagcgccggccccaagagcatggaggtgagctgctag

SEQ ID NO: 93273 - protein, 723 aa, Artificial Sequence
  derived and/or modified sequence
MFEEKASSPSGKMGGEEKPIGAGEEKQKEGGKKKNKEGSGDGGRAELNPWPEYIYTRLEMYNILKAEHDSILAEKAEKDSKPIKVTLPDGKQVDAESWKTTPYQIACGISQGLADNTVIAKVNNVVWDLDRPLEEDCTLELLKFEDEEAQAVYWHSSAHIMGEAMERVYGGCLCYGPPIENGFYYDMYLEEGGVSSNDFSSLEALCKKIIKEKQAFERLEVKKETLLAMFKYNKFKCRILNEKVNTPTTTVYRCGPLIDLCRGPHVRHTGKIKALKIHKNSSTYWEGKADMETLQRIYGISFPDPKMLKEWEKFQEEAKNRDHRKIGRDQELYFFHELSPGSCFFLPKGAYIYNALIEFIRSEYRKRGFQEVVTPNIFNSRLWMTSGHWQHYSENMFSFEVEKELFALKPMNCPGHCLMFDHRPRSWRELPLRLADFGVLHRNELSGALTGLTRVRRFQQDDAHIFCAMEQIEDEIKGCLDFLRTVYSVFGFSFKLNLSTRPEKFLGDIEVWDQAEKQLENSLNEFGEKWELNSGDGAFYGPKIDIQIKDAIGRYHQCATIQLDFQLPIRFNLTYVSHDGDDKKRPVIVHRAILGSVERMIAILTENYGGKWPFWLSPRQVMVVPVGPTCDEYAQKVRQQFHDAKFMADIDLDPGCTLNKKIRNAQLAQYNFILVVGEKEKISGTVNIRTRDNKVHGERTISETIERLQQLKEFRSKQAEEEF

SEQ ID NO: 93274 - protein, 129 aa, Artificial Sequence
  derived and/or modified sequence
MFEEKASSPSGKMGGEEKPIGAGEEKQKEGGKKKNKEGSGDGGRAELNPWPEYIYTRLEMYNILKAEHDSILAEKAEKDSKPIKVTLPDGKQVDAESWKTTPYQIACGISQGLADNTVIAKVNNVVWDL

SEQ ID NO: 93275 - protein, 619 aa, Artificial Sequence
  derived and/or modified sequence
MEVELSQGLADNTVIAKVNNVVWDLDRPLEEDCTLELLKFEDEEAQAVYWHSSAHIMGEAMERVYGGCLCYGPPIENGFYYDMYLEEGGVSSNDFSSLEALCKKIIKEKQAFERLEVKKETLLAMFKYNKFKCRILNEKVNTPTTTVYRCGPLIDLCRGPHVRHTGKIKALKIHKNSSTYWEGKADMETLQRIYGISFPDPKMLKEWEKFQEEAKNRDHRKIGRDQELYFFHELSPGSCFFLPKGAYIYNALIEFIRSEYRKRGFQEVVTPNIFNSRLWMTSGHWQHYSENMFSFEVEKELFALKPMNCPGHCLMFDHRPRSWRELPLRLADFGVLHRNELSGALTGLTRVRRFQQDDAHIFCAMEQIEDEIKGCLDFLRTVYSVFGFSFKLNLSTRPEKFLGDIEVWDQAEKQLENSLNEFGEKWELNSGDGAFYGPKIDIQIKDAIGRYHQCATIQLDFQLPIRFNLTYVSHDGDDKKRPVIVHRAILGSVERMIAILTENYGGKWPFWLSPRQVMVVPVGPTCDEYAQKVRQQFHDAKFMADIDLDPGCTLNKKIRNAQLAQYNFILVVGEKEKISGTVNIRTRDNKVHGERTISETIERLQQLKEFRSKQAEEEF

SEQ ID NO: 93276 - DNA, 2172 bp, Artificial Sequence
  derived and/or modified sequence
atgttcgaggagaaggccagcagccccagcggcaagatgggcggcgaggagaagcccatcggcgccggcgaggagaagcagaaggagggcggcaagaagaagaacaaggagggcagcggcgacggcggcagagccgagctgaacccctggcccgagtacatctacaccagactggagatgtacaacatcctgaaggccgagcacgacagcatcctggccgagaaggccgagaaggacagcaagcccatcaaggtgaccctgcccgacggcaagcaggtggacgccgagagctggaagaccaccccctaccagatcgcctgcggcatcagccagggcctggccgacaacaccgtgatcgccaaggtgaacaacgtggtgtgggacctggacagacccctggaggaggactgcaccctggagctgctgaagttcgaggacgaggaggcccaggccgtgtactggcacagcagcgcccacatcatgggcgaggccatggagagagtgtacggcggctgcctgtgctacggcccccccatcgagaacggcttctactacgacatgtacctggaggagggcggcgtgagcagcaacgacttcagcagcctggaggccctgtgcaagaagatcatcaaggagaagcaggccttcgagagactggaggtgaagaaggagaccctgctggccatgttcaagtacaacaagttcaagtgcagaatcctgaacgagaaggtgaacacccccaccaccaccgtgtacagatgcggccccctgatcgacctgtgcagaggcccccacgtgagacacaccggcaagatcaaggccctgaagatccacaagaacagcagcacctactgggagggcaaggccgacatggagaccctgcagagaatctacggcatcagcttccccgaccccaagatgctgaaggagtgggagaagttccaggaggaggccaagaacagagaccacagaaagatcggcagagaccaggagctgtacttcttccacgagctgagccccggcagctgcttcttcctgcccaagggcgcctacatctacaacgccctgatcgagttcatcagaagcgagtacagaaagagaggcttccaggaggtggtgacccccaacatcttcaacagcagactgtggatgaccagcggccactggcagcactacagcgagaacatgttcagcttcgaggtggagaaggagctgttcgccctgaagcccatgaactgccccggccactgcctgatgttcgaccacagacccagaagctggagagagctgcccctgagactggccgacttcggcgtgctgcacagaaacgagctgagcggcgccctgaccggcctgaccagagtgagaagattccagcaggacgacgcccacatcttctgcgccatggagcagatcgaggacgagatcaagggctgcctggacttcctgagaaccgtgtacagcgtgttcggcttcagcttcaagctgaacctgagcaccagacccgagaagttcctgggcgacatcgaggtgtgggaccaggccgagaagcagctggagaacagcctgaacgagttcggcgagaagtgggagctgaacagcggcgacggcgccttctacggccccaagatcgacatccagatcaaggacgccatcggcagataccaccagtgcgccaccatccagctggacttccagctgcccatcagattcaacctgacctacgtgagccacgacggcgacgacaagaagagacccgtgatcgtgcacagagccatcctgggcagcgtggagagaatgatcgccatcctgaccgagaactacggcggcaagtggcccttctggctgagccccagacaggtgatggtggtgcccgtgggccccacctgcgacgagtacgcccagaaggtgagacagcagttccacgacgccaagttcatggccgacatcgacctggaccccggctgcaccctgaacaagaagatcagaaacgcccagctggcccagtacaacttcatcctggtggtgggcgagaaggagaagatcagcggcaccgtgaacatcagaaccagagacaacaaggtgcacggcgagagaaccatcagcgagaccatcgagagactgcagcagctgaaggagttcagaagcaagcaggccgaggaggagttctag

SEQ ID NO: 93277 - DNA, 1809 bp, Artificial Sequence
  derived and/or modified sequence
atgatccccttctggcagaagagacagaagaagatcgccagccagctgaagagcctgtgcctgatggtgaacagactgatgagaaacctgggcaagctgcaccacatcaagctgcccgtggagctggccatggagagagtgtacggcggctgcctgtgctacggcccccccatcgagaacggcttctactacgacatgtacctggaggagggcggcgtgagcagcaacgacttcagcagcctggaggccctgtgcaagaagatcatcaaggagaagcaggccttcgagagactggaggtgaagaaggagaccctgctggccatgttcaagtacaacaagttcaagtgcagaatcctgaacgagaaggtgaacacccccaccaccaccgtgtacagatgcggccccctgatcgacctgtgcagaggcccccacgtgagacacaccggcaagatcaaggccctgaagatccacaagaacagcagcacctactgggagggcaaggccgacatggagaccctgcagagaatctacggcatcagcttccccgaccccaagatgctgaaggagtgggagaagttccaggaggaggccaagaacagagaccacagaaagatcggcagagaccaggagctgtacttcttccacgagctgagccccggcagctgcttcttcctgcccaagggcgcctacatctacaacgccctgatcgagttcatcagaagcgagtacagaaagagaggcttccaggaggtggtgacccccaacatcttcaacagcagactgtggatgaccagcggccactggcagcactacagcgagaacatgttcagcttcgaggtggagaaggagctgttcgccctgaagcccatgaactgccccggccactgcctgatgttcgaccacagacccagaagctggagagagctgcccctgagactggccgacttcggcgtgctgcacagaaacgagctgagcggcgccctgaccggcctgaccagagtgagaagattccagcaggacgacgcccacatcttctgcgccatggagcagatcgaggacgagatcaagggctgcctggacttcctgagaaccgtgtacagcgtgttcggcttcagcttcaagctgaacctgagcaccagacccgagaagttcctgggcgacatcgaggtgtgggaccaggccgagaagcagctggagaacagcctgaacgagttcggcgagaagtgggagctgaacagcggcgacggcgccttctacggccccaagatcgacatccagatcaaggacgccatcggcagataccaccagtgcgccaccatccagctggacttccagctgcccatcagattcaacctgacctacgtgagccacgacggcgacgacaagaagagacccgtgatcgtgcacagagccatcctgggcagcgtggagagaatgatcgccatcctgaccgagaactacggcggcaagtggcccttctggctgagccccagacaggtgatggtggtgcccgtgggccccacctgcgacgagtacgcccagaaggtgagacagcagttccacgacgccaagttcatggccgacatcgacctggaccccggctgcaccctgaacaagaagatcagaaacgcccagctggcccagtacaacttcatcctggtggtgggcgagaaggagaagatcagcggcaccgtgaacatcagaaccagagacaacaaggtgcacggcgagagaaccatcagcgagaccatcgagagactgcagcagctgaaggagttcagaagcaagcaggccgaggaggagttctag

SEQ ID NO: 93278 - DNA, 390 bp, Artificial Sequence
  derived and/or modified sequence
atgttcgaggagaaggccagcagccccagcggcaagatgggcggcgaggagaagcccatcggcgccggcgaggagaagcagaaggagggcggcaagaagaagaacaaggagggcagcggcgacggcggcagagccgagctgaacccctggcccgagtacatctacaccagactggagatgtacaacatcctgaaggccgagcacgacagcatcctggccgagaaggccgagaaggacagcaagcccatcaaggtgaccctgcccgacggcaagcaggtggacgccgagagctggaagaccaccccctaccagatcgcctgcggcatcagccagggcctggccgacaacaccgtgatcgccaaggtgaacaacgtggtgtgggacctgtag

SEQ ID NO: 93279 - DNA, 1860 bp, Artificial Sequence
  derived and/or modified sequence
atggaggtggagctgagccagggcctggccgacaacaccgtgatcgccaaggtgaacaacgtggtgtgggacctggacagacccctggaggaggactgcaccctggagctgctgaagttcgaggacgaggaggcccaggccgtgtactggcacagcagcgcccacatcatgggcgaggccatggagagagtgtacggcggctgcctgtgctacggcccccccatcgagaacggcttctactacgacatgtacctggaggagggcggcgtgagcagcaacgacttcagcagcctggaggccctgtgcaagaagatcatcaaggagaagcaggccttcgagagactggaggtgaagaaggagaccctgctggccatgttcaagtacaacaagttcaagtgcagaatcctgaacgagaaggtgaacacccccaccaccaccgtgtacagatgcggccccctgatcgacctgtgcagaggcccccacgtgagacacaccggcaagatcaaggccctgaagatccacaagaacagcagcacctactgggagggcaaggccgacatggagaccctgcagagaatctacggcatcagcttccccgaccccaagatgctgaaggagtgggagaagttccaggaggaggccaagaacagagaccacagaaagatcggcagagaccaggagctgtacttcttccacgagctgagccccggcagctgcttcttcctgcccaagggcgcctacatctacaacgccctgatcgagttcatcagaagcgagtacagaaagagaggcttccaggaggtggtgacccccaacatcttcaacagcagactgtggatgaccagcggccactggcagcactacagcgagaacatgttcagcttcgaggtggagaaggagctgttcgccctgaagcccatgaactgccccggccactgcctgatgttcgaccacagacccagaagctggagagagctgcccctgagactggccgacttcggcgtgctgcacagaaacgagctgagcggcgccctgaccggcctgaccagagtgagaagattccagcaggacgacgcccacatcttctgcgccatggagcagatcgaggacgagatcaagggctgcctggacttcctgagaaccgtgtacagcgtgttcggcttcagcttcaagctgaacctgagcaccagacccgagaagttcctgggcgacatcgaggtgtgggaccaggccgagaagcagctggagaacagcctgaacgagttcggcgagaagtgggagctgaacagcggcgacggcgccttctacggccccaagatcgacatccagatcaaggacgccatcggcagataccaccagtgcgccaccatccagctggacttccagctgcccatcagattcaacctgacctacgtgagccacgacggcgacgacaagaagagacccgtgatcgtgcacagagccatcctgggcagcgtggagagaatgatcgccatcctgaccgagaactacggcggcaagtggcccttctggctgagccccagacaggtgatggtggtgcccgtgggccccacctgcgacgagtacgcccagaaggtgagacagcagttccacgacgccaagttcatggccgacatcgacctggaccccggctgcaccctgaacaagaagatcagaaacgcccagctggcccagtacaacttcatcctggtggtgggcgagaaggagaagatcagcggcaccgtgaacatcagaaccagagacaacaaggtgcacggcgagagaaccatcagcgagaccatcgagagactgcagcagctgaaggagttcagaagcaagcaggccgaggaggagttctag

SEQ ID NO: 93280 - DNA, 2172 bp, Artificial Sequence
  derived and/or modified sequence
atgttcgaggaaaaggcttcgtctccatccggcaaaatgggtggtgaggaaaaaccgatcggagctggcgaggagaagcagaaggagggaggcaagaagaaaaataaggagggcagcggagatggtggccgagccgagcttaacccctggcccgaatatatttacactcggctagaaatgtacaatatcttgaaggccgaacatgatagcattttggcagaaaaagctgagaaagactcgaaacccatcaaagtaacactgcctgatggaaagcaagtcgatgccgagtcatggaaaacaaccccttaccagattgcctgcggcatctcccaaggcctcgctgataatacagtcattgccaaagtgaacaatgtggtctgggaccttgaccggcctttggaggaagactgtactctcgaactgctaaaattcgaagatgaagaagcacaagctgtgtattggcattccagtgctcatataatgggagaagcaatggaacgagtgtatggcggctgcctttgctatggtccgccaatagagaacggcttctattacgacatgtacctagaagagggcggcgtgagtagcaacgatttcagctcgctggaagccctgtgtaagaagatcatcaaggaaaagcaagcctttgagcgcctggaagtgaaaaaagagacgctgctggctatgttcaagtacaacaaatttaagtgtcggatactgaatgagaaggtaaatactccgacaaccacagtttaccggtgcggtcccctgatcgatctgtgtcgtggtcctcacgtacggcacacaggtaaaatcaaagcgctcaagatccacaagaattcatccacttactgggaaggcaaggctgatatggagaccctgcaacgtatttacggcatatccttcccagaccccaagatgctgaaggagtgggagaaatttcaggaggaggccaaaaaccgcgaccacaggaaaattgggcgcgatcaggaactctatttctttcacgaactgagccccggaagctgcttcttcctgcctaagggggcctacatctataacgcgctcattgagttcatcagatctgagtaccgaaagagagggtttcaggaagttgtgaccccgaacatatttaatagtcgactttggatgactagcggtcactggcagcattacagcgagaacatgttcagcttcgaagtggaaaaggaattgttcgctctcaaaccaatgaactgtcctggccattgcctcatgtttgatcacagaccccgttcctggagggaactgcccctgcggctggctgacttcggtgtgctccaccgcaacgagctcagtggagcactgaccggactgacgcgagtgcgtcgattccaacaggacgacgcccacatattctgtgccatggagcagatagaggatgaaatcaaggggtgtcttgactttctgaggactgtgtattctgtctttggattctcattcaaattgaacctgtccactcgcccagagaaattcttaggtgatattgaggtctgggatcaagccgagaagcagcttgaaaattccctgaatgagttcggggagaaatgggagctgaatagtggcgatggagccttttacggtcccaagatcgacatacagattaaagacgccattggccgctaccatcagtgcgctacgatccaactggatttccaacttcccattaggttcaatctgacgtacgtgtctcacgatggagacgataaaaaaagacctgtaattgtgcaccgagccattcttgggtccgtggaaaggatgatcgcgatccttacagagaattatggggggaaatggcccttttggctcagccccaggcaggtgatggttgttcctgtgggtccaacttgcgacgaatacgctcagaaggtgcgacaacagtttcatgacgcaaagtttatggcagatatcgacctcgaccctggttgtactctcaataaaaagatacggaacgcccaactcgcccagtataacttcatcctggtcgtgggtgaaaaagaaaaaatttctggcaccgtaaacattcgtacccgcgacaataaggtacatggtgaacggacaatctcagaaacaatcgagcggctccaacaacttaaagaatttaggagtaagcaggctgaggaggagttctag

SEQ ID NO: 93281 - DNA, 1809 bp, Artificial Sequence
  derived and/or modified sequence
atgatacccttttggcaaaagcgtcaaaagaaaattgcttcgcaactcaaaagtctttgcctcatggtcaatagactgatgcgcaacttggggaagttacaccacatcaagctccctgtggagctcgcgatggagagggtgtatggaggatgcctgtgctatgggccacccatagaaaatggcttctattatgatatgtaccttgaggaaggcggagtttcatcaaacgatttcagttccttggaggccctgtgtaagaagattattaaagaaaagcaggccttcgaaaggctggaggtgaaaaaagaaacactccttgcgatgtttaagtataataagttcaaatgtcgaatcctaaatgagaaggtgaacacaccaacaacgacagtgtatagatgcgggcccctcatagatctctgcaggggccctcatgtgagacacacaggcaagataaaagcacttaaaatccacaaaaacagctctacctactgggaaggcaaagccgatatggaaacactccagcgtatttacggcatttccttccccgatcctaagatgctgaaagaatgggagaagttccaggaggaagccaaaaaccgagatcatcgtaaaatcggcagagaccaagagctgtacttttttcatgagctgtcacccggttcttgctttttcttgcctaagggagcatacatttataatgctttaattgagtttatcaggtctgagtatcgcaaaaggggatttcaggaggtcgtaacccctaatatcttcaattcccgactatggatgacaagcggccactggcaacactacagcgagaacatgttcagcttcgaagtagagaaagaattattcgccctgaagcctatgaattgtcctggccattgcctcatgtttgaccacaggccgaggtcatggcgggaactacctctgagattggcagattttggagtgctgcataggaatgaattaagcggggcgctcacaggcttaactagagtccgaaggtttcaacaggatgatgctcacatcttttgcgcaatggagcagatcgaagatgaaatcaaggggtgccttgattttctgcgcactgtgtactccgtgtttggattttcgttcaaattaaacctgtccaccagacccgaaaagttcctgggtgatatcgaggtatgggaccaagccgagaaacagctcgagaactcactcaatgaattcggcgagaagtgggaactgaactccggtgatggagcgttctacggccctaaaattgatatccagattaaagatgctattgggcgctaccatcaatgcgccacgattcaactcgactttcagctgccaatacgttttaacctgacttacgtgtcacatgacggtgatgataaaaagcggcccgtcatcgtccatagagccatcctgggctcagtggagagaatgatcgccattctaaccgagaactacggcgggaaatggcctttttggctgagccctcgacaggtgatggtggtgccagtgggtcccacatgcgatgaatatgcccagaaagtcaggcaacagttccacgatgccaagttcatggccgacattgacctcgaccctggatgtacgttaaataaaaagattcgcaacgctcagctggcccagtacaattttattctggtcgttggagaaaaggagaaaatatccggtacggtgaacatcagaactagggacaataaagtccacggggagcgcaccatttcagaaacgattgaacggcttcagcaattgaaagaattccgcagtaagcaggcagaagaggagttctag

SEQ ID NO: 93282 - DNA, 2172 bp, Artificial Sequence
  derived and/or modified sequence
atgtttgaggagaaagcctcttcaccttccggcaaaatgggtggcgaagaaaaacccattggcgccggagaggagaaacagaaggaaggtggcaaaaagaaaaacaaagagggttccggagatggcggccgagcggaactgaatccgtggccggaatacatatatacaagattggaaatgtataacattctgaaggctgagcacgacagcattctggcagagaaagcagagaaagacagcaagcctattaaggtcactttgcccgatggtaaacaggtggacgccgaatcctggaagactaccccctaccagattgcctgtgggatttctcagggactcgctgataacaccgtcattgctaaggtgaacaatgtggtatgggacttggatcgacctctcgaggaggactgtaccctcgaacttctaaaatttgaagatgaagaggcccaggccgtgtactggcattcttctgcccatatcatgggcgaggccatggagcgcgtgtacggggggtgcttgtgctatggaccaccaattgagaacgggttctactacgacatgtatcttgaggaggggggtgtgtcttccaatgacttcagcagtctggaggcactttgtaaaaaaatcatcaaggaaaagcaggccttcgagcgattggaggtcaagaaagagacacttttagccatgtttaaatacaataagttcaagtgccggattctaaatgagaaagtaaatacccccacgacaactgtttaccgatgcggacctctaatcgacctctgccgcggtcctcatgttcggcatacgggcaagatcaaagccctgaagattcataagaactctagcacgtactgggaggggaaggccgatatggaaactttgcaaagaatctacggaattagctttcctgaccccaagatgctcaaggagtgggaaaagtttcaggaggaggccaagaatagagaccaccgaaagattggaagggaccaggaactctactttttccacgaactctcacctggctcatgtttctttctcccaaagggagcgtacatctataacgccctgatcgaattcattcgaagtgaataccggaaacgaggtttccaggaggttgttacccccaacattttcaactccaggttgtggatgaccagcggccactggcagcactattccgagaacatgttttcattcgaggtggagaaagagctttttgcgctcaaacctatgaattgtcctgggcattgcctcatgtttgatcatcgccccaggtcttggagggaactacccctcaggctagctgacttcggggtgcttcatcgcaatgagctctcaggagccctgacaggtctcacccgtgtccggaggttccagcaggatgatgcgcatattttttgtgccatggaacagatagaagatgaaatcaagggctgcttggacttcttgaggaccgtgtatagcgtcttcgggttctcctttaagttaaacctctccactcgccccgaaaaattcctcggcgatatagaggtgtgggatcaggctgagaagcaactggaaaatagcctcaacgaatttggggagaagtgggaactgaattcaggggatggcgccttttacggccctaagattgatatccagataaaagatgctatcggtagatatcaccagtgtgccacaatacagctcgactttcagctgcccatccgttttaatttaacttatgtgagccacgatggcgatgacaaaaagaggccggtcattgtacacagggccatccttggtagcgttgaacggatgatcgccatcctcaccgagaactacgggggaaagtggcctttttggctcagcccacgccaggtgatggttgtacccgtcggcccaacgtgcgatgaatacgcccagaaagtgcgccaacagtttcatgacgcaaaattcatggctgacattgatctggatccgggttgcaccctgaataaaaagataagaaatgcacagttagcccagtataattttatattggttgtgggtgagaaagaaaaaatcagcgggactgtgaacatcaggacccgagataacaaagtgcacggcgagaggacaatcagcgagaccattgaaagactgcagcagctaaaggagtttcggtctaagcaggccgaggaggagttctag

SEQ ID NO: 93283 - DNA, 390 bp, Artificial Sequence
  derived and/or modified sequence
atgtttgaagaaaaagcaagcagcccgagtgggaagatggggggtgaggagaagcctatcggagcaggcgaggaaaaacagaaggaaggcggaaagaagaaaaataaagagggatccggggacggtgggagagccgaactcaacccctggcccgaatatatatacacgcgtctcgagatgtacaatattcttaaagccgaacacgattcaatactggccgaaaaggctgaaaaagattctaagcctataaaagtgacgctccccgacgggaagcaggtggacgcggaatcttggaagacaactccttaccagatcgcctgcggcatctctcagggcctagctgataacaccgttatcgctaaagttaacaacgtggtttgggacctgtag

SEQ ID NO: 93284 - DNA, 1860 bp, Artificial Sequence
  derived and/or modified sequence
atggaagtggaactctctcagggcctcgctgacaataccgttattgccaaggtcaacaacgtggtctgggatctggaccggccccttgaggaggattgcactctggagctgctgaagttcgaagatgaggaggcacaagcagtttattggcactctagtgcacacattatgggtgaggcaatggaacgcgtgtacggcggctgcctgtgttacggcccacctatcgagaacggtttttactacgacatgtacctggaagagggaggcgtctccagtaacgatttctcatctttagaggctctgtgtaagaagatcattaaagagaagcaagcctttgagcggctggaggtgaagaaggagacactgttggcgatgtttaagtacaacaagttcaagtgtcggattctgaatgaaaaggttaacaccccaacgaccacagtctatcgttgcggtcctttaatcgatttgtgtagaggcccgcacgtgcggcataccggaaagatcaaggccctcaagattcataagaacagctccacatattgggaaggaaaagcggacatggagaccctgcagcggatctatggaattagtttccctgatccaaagatgttgaaggagtgggaaaaatttcaggaagaggcaaaaaacagggaccaccgcaagattgggcgggaccaagagttatatttcttccatgagctgagccctgggagctgtttcttcctgccaaagggcgcatacatttacaacgccctgattgaattcatacgctcagaatatagaaaaagggggtttcaggaagtcgttactccaaacatttttaactctagactgtggatgacttccggccattggcagcactatagtgagaatatgttttcattcgaggtcgaaaaagagctgtttgctctcaagcccatgaattgtcctggccattgtctcatgttcgaccataggcccaggtcatggagggagctccccctgaggttagccgattttggggttctgcatagaaacgaattaagcggggcgctgacaggcctcacgagagtccgccggtttcagcaggatgatgcccacatattctgcgctatggagcagatcgaggacgaaataaagggttgcctcgatttcctccgcactgtgtactccgtctttggattcagtttcaaactgaacctaagtaccagacccgaaaagttcctgggcgacatagaagtgtgggatcaggccgaaaaacagcttgaaaattctctcaatgaattcggtgagaagtgggagctgaattccggcgacggggctttctacgggccaaaaatcgatatacagatcaaagacgccatcggacggtatcaccagtgtgccactatccagctggattttcagctgccgattaggtttaatctaacttatgtcagtcatgacggggacgataagaagcgcccagtcatagtacatcgcgcaatccttggctctgtcgagcgcatgatcgccattcttactgaaaactatggtggaaagtggcccttctggttgagcccccggcaggtgatggtggtccccgtggggcctacctgtgatgaatacgctcaaaaggtgcggcagcagtttcacgatgccaagttcatggctgatattgatctggatcccggttgcacattgaataagaagatcaggaacgctcagctggctcaatacaatttcattctggtggtgggcgagaaagaaaaaatatctggaacagttaatatcagaacgagagacaacaaggtgcatggtgaacgcaccatttctgagacaatagaaagactgcaacaactcaaggaatttcgctctaaacaggctgaagaagagttctag

SEQ ID NO: 93285 - DNA, 2172 bp, Artificial Sequence
  derived and/or modified sequence
atgtttgaggagaaggccagcagccccagcggcaagatgggcggggaggagaagcccatcggggccggggaggagaagcagaaggagggcggcaagaagaagaacaaggagggcagcggagatggcggccgggcagagctgaacccctggccagagtacatctacacccggctggagatgtacaacatcctgaaggccgagcatgacagcatcctggccgagaaggccgagaaggacagcaagcccatcaaggtgaccctgcctgatggcaagcaggtggatgctgagagctggaagaccaccccctaccagatcgcctgtggcatcagccagggcctggccgacaacacagtgattgccaaggtgaacaacgtggtgtgggacctggaccggcccctggaggaggactgcaccctggagctgctgaagtttgaagatgaggaggcccaggccgtgtactggcacagcagcgcccacatcatgggagaggccatggagcgggtgtatggaggctgcctgtgctacggcccccccattgaaaatggcttctactatgacatgtacctggaggagggcggcgtgagcagcaatgacttcagcagcctggaggccctgtgcaagaagatcatcaaggagaagcaggcctttgagcggctggaggtgaagaaggagaccctgctggccatgttcaagtacaacaagttcaagtgccgcatcctgaatgagaaggtgaacacccccaccaccaccgtgtaccgctgtggccccctgattgacctgtgccggggcccccacgtgcgccacacaggcaagatcaaggccctgaagatccacaagaacagcagcacctactgggagggcaaggctgacatggagaccctgcagaggatctacggcatctccttcccagaccccaagatgctgaaggagtgggagaagttccaggaggaggccaagaacagagaccacaggaagattggccgggaccaggagctgtacttcttccacgagctgagccctggcagctgcttcttcctgcccaagggggcctacatctacaatgccctgattgagttcatccgctctgagtacaggaagaggggcttccaggaggtggtgacccccaacatcttcaacagccggctgtggatgaccagcggccactggcagcactacagcgagaacatgttctcctttgaggtggagaaggagctgtttgccctgaagcccatgaactgccccggccactgcctgatgtttgaccaccggcccaggtcctggagggagctgcccctgcggctggccgactttggagtgctgcacagaaatgagctgagcggggccctgaccggcctgaccagggtgcggcgcttccagcaggatgatgcccacatcttctgtgccatggagcagattgaagatgagatcaagggctgcctggacttcctgaggacagtgtacagcgtgtttggcttctccttcaagctgaacctgagcaccaggcctgagaagttcctgggggacatcgaggtgtgggaccaggccgagaagcagctggagaacagcctgaatgaatttggagagaagtgggagctgaacagcggagatggagccttctacggccccaagattgacatccagatcaaggatgccatcggccgctaccaccagtgtgccaccatccagctggacttccagctgcccatccgcttcaacctgacctacgtgtcccatgatggagatgacaagaagaggcctgtgattgtgcaccgggccatcctgggctctgtggagaggatgattgccatcctgacagagaactacggcggcaagtggcccttctggctgagcccccggcaggtgatggtggtgcctgtgggccccacctgtgatgaatatgcccagaaggtgcggcagcagttccatgatgccaagttcatggctgacatcgacctggaccccggctgcaccctgaacaagaagatcagaaatgcccagctggcccagtacaacttcatcctggtggtgggggagaaggagaagatctctggaacagtgaacatccgcacccgggacaacaaggtgcacggggagaggaccatcagcgagaccatcgagcggctgcagcagctgaaggagttccgcagcaagcaggccgaggaggagttctag

SEQ ID NO: 93286 - DNA, 1809 bp, Artificial Sequence
  derived and/or modified sequence
atgatccccttctggcagaagaggcagaagaagatcgccagccagctgaagagcctgtgcctgatggtgaaccggctgatgaggaacctgggcaagctgcaccacatcaagctgcctgtggagctggccatggagcgggtgtatggaggctgcctgtgctacggcccccccattgaaaatggcttctactatgacatgtacctggaggagggcggcgtgagcagcaatgacttcagcagcctggaggccctgtgcaagaagatcatcaaggagaagcaggcctttgagcggctggaggtgaagaaggagaccctgctggccatgttcaagtacaacaagttcaagtgccgcatcctgaatgagaaggtgaacacccccaccaccaccgtgtaccgctgtggccccctgattgacctgtgccggggcccccacgtgcgccacacaggcaagatcaaggccctgaagatccacaagaacagcagcacctactgggagggcaaggctgacatggagaccctgcagaggatctacggcatctccttcccagaccccaagatgctgaaggagtgggagaagttccaggaggaggccaagaacagagaccacaggaagattggccgggaccaggagctgtacttcttccacgagctgagccctggcagctgcttcttcctgcccaagggggcctacatctacaatgccctgattgagttcatccgctctgagtacaggaagaggggcttccaggaggtggtgacccccaacatcttcaacagccggctgtggatgaccagcggccactggcagcactacagcgagaacatgttctcctttgaggtggagaaggagctgtttgccctgaagcccatgaactgccccggccactgcctgatgtttgaccaccggcccaggtcctggagggagctgcccctgcggctggccgactttggagtgctgcacagaaatgagctgagcggggccctgaccggcctgaccagggtgcggcgcttccagcaggatgatgcccacatcttctgtgccatggagcagattgaagatgagatcaagggctgcctggacttcctgaggacagtgtacagcgtgtttggcttctccttcaagctgaacctgagcaccaggcctgagaagttcctgggggacatcgaggtgtgggaccaggccgagaagcagctggagaacagcctgaatgaatttggagagaagtgggagctgaacagcggagatggagccttctacggccccaagattgacatccagatcaaggatgccatcggccgctaccaccagtgtgccaccatccagctggacttccagctgcccatccgcttcaacctgacctacgtgtcccatgatggagatgacaagaagaggcctgtgattgtgcaccgggccatcctgggctctgtggagaggatgattgccatcctgacagaaaattatggaggcaagtggcccttctggctgagcccccggcaggtgatggtggtgcctgtgggccccacctgtgatgaatatgcccagaaggtgcggcagcagttccatgatgccaagttcatggctgacatcgacctggaccccggctgcaccctgaacaagaagatcagaaatgcccagctggcccagtacaacttcatcctggtggtgggggagaaggagaagatcagcggcaccgtgaacatccgcacccgggacaacaaggtgcatggagagaggaccatcagcgagaccatcgagcggctgcagcagctgaaggagttccgcagcaagcaggccgaggaggagttctag

SEQ ID NO: 93287 - DNA, 390 bp, Artificial Sequence
  derived and/or modified sequence
atgtttgaggagaaggccagcagccccagcggcaagatgggcggggaggagaagcccatcggggccggggaggagaagcagaaggagggcggcaagaagaagaacaaggagggcagcggagatggcggccgggcagagctgaacccctggccagagtacatctacacccggctggagatgtacaacatcctgaaggccgagcatgacagcatcctggccgagaaggccgagaaggacagcaagcccatcaaggtgaccctgcctgatggcaagcaggtggatgctgagagctggaagaccaccccctaccagatcgcctgtggcatcagccagggcctggccgacaacacagtgattgccaaggtgaacaacgtggtgtgggacctgtag

SEQ ID NO: 93288 - DNA, 1860 bp, Artificial Sequence
  derived and/or modified sequence
atggaggtggagctgagccagggcctggccgacaacacagtgattgccaaggtgaacaacgtggtgtgggacctggaccggcccctggaggaggactgcaccctggagctgctgaagtttgaagatgaggaggcccaggccgtgtactggcacagcagcgcccacatcatgggagaggccatggagcgggtgtatggaggctgcctgtgctacggcccccccattgaaaatggcttctactatgacatgtacctggaggagggcggcgtgagcagcaatgacttcagcagcctggaggccctgtgcaagaagatcatcaaggagaagcaggcctttgagcggctggaggtgaagaaggagaccctgctggccatgttcaagtacaacaagttcaagtgccgcatcctgaatgagaaggtgaacacccccaccaccaccgtgtaccgctgtggccccctgattgacctgtgccggggcccccacgtgcgccacacaggcaagatcaaggccctgaagatccacaagaacagcagcacctactgggagggcaaggctgacatggagaccctgcagaggatctacggcatctccttcccagaccccaagatgctgaaggagtgggagaagttccaggaggaggccaagaacagagaccacaggaagattggccgggaccaggagctgtacttcttccacgagctgagccctggcagctgcttcttcctgcccaagggggcctacatctacaatgccctgattgagttcatccgctctgagtacaggaagaggggcttccaggaggtggtgacccccaacatcttcaacagccggctgtggatgaccagcggccactggcagcactacagcgagaacatgttctcctttgaggtggagaaggagctgtttgccctgaagcccatgaactgccccggccactgcctgatgtttgaccaccggcccaggtcctggagggagctgcccctgcggctggccgactttggagtgctgcacagaaatgagctgagcggggccctgaccggcctgaccagggtgcggcgcttccagcaggatgatgcccacatcttctgtgccatggagcagattgaagatgagatcaagggctgcctggacttcctgaggacagtgtacagcgtgtttggcttctccttcaagctgaacctgagcaccaggcctgagaagttcctgggggacatcgaggtgtgggaccaggccgagaagcagctggagaacagcctgaatgaatttggagagaagtgggagctgaacagcggagatggagccttctacggccccaagattgacatccagatcaaggatgccatcggccgctaccaccagtgtgccaccatccagctggacttccagctgcccatccgcttcaacctgacctacgtgtcccatgatggagatgacaagaagaggcctgtgattgtgcaccgggccatcctgggctctgtggagaggatgattgccatcctgacagagaactacggcggcaagtggcccttctggctgagcccccggcaggtgatggtggtgcctgtgggccccacctgtgatgaatatgcccagaaggtgcggcagcagttccatgatgccaagttcatggctgacatcgacctggaccccggctgcaccctgaacaagaagatcagaaatgcccagctggcccagtacaacttcatcctggtggtgggggagaaggagaagatctctggaacagtgaacatccgcacccgggacaacaaggtgcacggggagaggaccatcagcgagaccatcgagcggctgcagcagctgaaggagttccgcagcaagcaggccgaggaggagttctag

SEQ ID NO: 93289 - DNA, 2172 bp, Artificial Sequence
  derived and/or modified sequence
atgttcgaggagaaggccagcagccccagcggcaagatgggcggcgaggagaaacctattggcgccggagaagagaagcaaaaagagggcggcaaaaaaaagaacaaggaaggaagcggggatgggggtagggccgaattaaacccatggcccgagtatatctacaccagacttgagatgtacaacatcttaaaagcggaacacgattcgatcctggctgagaaagcggagaaagactctaagccaatcaaagtgaccctccccgatgggaagcaggtggatgctgaatcatggaagacgaccccataccagatcgcgtgcggaatctcacaggggctggcggacaacactgtgattgcaaaggtcaacaatgtcgtatgggatctcgaccgccctctggaggaggactgtactctcgaattgctcaaatttgaagatgaggaggcccaggccgtttattggcactcttctgcgcatattatgggtgaggctatggagcgtgtgtacggaggctgcctttgctacggcccacctatagagaacggtttttactacgacatgtacctcgaagaggggggagtgtctagcaacgatttctcaagcctcgaggctctgtgcaagaagataattaaagagaagcaggcctttgaacgcctggaggtgaaaaaagaaacactgctcgctatgtttaaatacaacaagtttaaatgcagaatccttaacgagaaggtgaatacccctaccactaccgtttacaggtgtgggcctctgatagacctgtgtcgaggcccccacgtccggcacactggcaagatcaaagccctgaagatccataagaattcttccacctattgggagggtaaggcggacatggagactctgcagcggatctacgggatatctttccctgaccctaagatgctgaaggagtgggaaaagttccaagaggaagcaaaaaaccgagatcacaggaaaatcgggcgggaccaggagctttactttttccacgaactgagtcccggttcatgtttctttctacctaaaggagcttatatctacaacgctctgatagaatttatccggagcgaatacagaaagcgtgggtttcaggaagttgtgacacccaatattttcaattcccgcctgtggatgaccagcggccactggcaacactattctgaaaatatgttctctttcgaagttgaaaaagaacttttcgcacttaagcccatgaactgccctggacactgcctcatgttcgaccacaggccaagatcttggcgagagcttccgctgcgcctcgctgactttggtgttctccaccgaaatgagctgtcaggggccctcacgggactgaccagggttagaaggtttcaacaagacgatgcgcatatcttttgtgccatggaacaaattgaggacgagatcaagggatgtctggacttcctgaggaccgtgtatagtgtcttcggcttcagtttcaaattgaacctctctacaagacctgaaaagttcttaggcgacatcgaggtgtgggaccaagccgagaagcagcttgaaaattcgctgaacgagttcggggaaaaatgggagctgaacagtggggacggcgctttttacggacctaaaatcgacatacagatcaaggacgctataggccgatatcaccaatgcgctacaatccagctagatttccagctgccgataagattcaacctaacatatgtgtctcatgacggagacgataagaaacgacctgtgatagtgcatagagctatcctgggtagcgtcgagcggatgattgcaatcctcaccgagaactacggaggaaagtggcctttttggctgtcaccgagacaggtgatggtggtccccgtcggaccaacgtgcgacgagtacgcccaaaaggtgcgacagcagttccacgacgccaagtttatggcggatattgacctcgaccccggctgcaccctgaacaaaaaaattcggaacgctcagcttgcacagtataactttatcttagtggtgggcgaaaaagagaagatctcagggacggtgaacattcggaccagagacaacaaggtccacggagagaggaccatcagcgagaccatcgagcgcctccagcaattaaaggaatttcggagtaagcaagccgaagaagaattttag

SEQ ID NO: 93290 - DNA, 1809 bp, Artificial Sequence
  derived and/or modified sequence
atgatccccttctggcagaagcggcagaagaagatcgccagccagctaaagagtctgtgcctgatggttaacagattaatgcgaaatctggggaagctccaccatattaaactgcctgtggaactggccatggaacgcgtgtacggcgggtgcctgtgttacggcccacctattgagaacggattttactacgacatgtatctggaagaggggggggtttcatctaacgatttttcaagtctggaggcactgtgtaagaaaatcattaaagagaaacaggccttcgagagactggaggtgaaaaaggagactctgctggccatgttcaagtataacaaatttaaatgcaggatattgaacgagaaggtcaacacgcctacgacaacggtctaccgatgtggtcctttgatcgatctctgtaggggcccacatgtgcgtcacacgggcaaaatcaaggctctgaaaatccataaaaactcctccacttactgggaggggaaggctgacatggagaccttgcaacggatctatgggatttccttccccgacccgaagatgctgaaagagtgggaaaagttccaagaagaggctaaaaacagggaccataggaagataggaagagatcaagagctgtatttcttccacgaattgtcccctggtagttgctttttcttacccaagggagcctacatctataatgcccttattgaatttattcgaagcgaatatagaaaacggggttttcaggaagtggtgacacctaatatatttaatagccgcctatggatgacgtccggacactggcagcattacagcgaaaatatgttctcctttgaggtcgagaaggagctttttgcactcaagccaatgaactgtcctggacactgccttatgttcgatcaccgtcctcgcagctggagagagctgcccttgcgcctcgcagattttggagtcctgcatcggaacgagctgtctggggcattaaccggactgacgcgcgtgcggcgtttccagcaggatgacgctcatatattttgcgctatggagcagatcgaagatgagatcaaggggtgtctggatttcttgcgaaccgtgtattccgtgtttggattttcctttaaattgaacctgtctaccagacccgaaaaatttcttggcgatattgaggtctgggatcaggctgagaagcaattggagaacagcctgaacgagtttggcgaaaagtgggagctcaatagcggtgatggggccttctatggccctaagatcgatattcagatcaaagacgccattggccgctatcatcagtgcgcgactatacagctggacttccagctgcctatcaggttcaacctgacatatgtgtcacatgatggagacgacaaaaaacggcctgtaattgtgcaccgcgcgatattgggctctgtggagagaatgatcgcaatccttacagagaattacggcgggaagtggcctttttggctcagtcctaggcaggtgatggtggtacctgtcggtcctacgtgtgacgagtatgcacaaaaggtacgtcagcagttccacgatgcaaaattcatggctgacatcgacctcgatcctggttgtaccctcaacaaaaagattagaaacgcacaactcgctcaatataactttatcctagtggtgggggaaaaggaaaagatttccggtactgtcaacatccgtactcgggataacaaagttcatggcgagagaaccatatccgagactatcgaaagactgcagcagcttaaagagttccggtcaaagcaggccgaggaggagttctag

SEQ ID NO: 93291 - DNA, 2172 bp, Artificial Sequence
  derived and/or modified sequence
atgttcgaggagaaggccagcagccccagcggcaagatgggcggcgaggaaaagcccattggagctggtgaagagaagcaaaaggaaggtgggaagaagaagaacaaggaaggcagcggtgacggtggcagggccgaattgaatccctggcctgagtacatttacacccggctagaaatgtataacattctgaaggctgaacatgattcaattctggccgagaaggccgaaaaagactccaaacctatcaaagtgactcttcctgatgggaagcaggtggacgctgaaagttggaagaccaccccctatcagatcgcctgcggcatttcccagggcctggctgacaacacagtgattgctaaagtgaataacgttgtgtgggacctcgaccgacctctagaagaggactgtacactagaattgctcaagtttgaagatgaagaagctcaagcagtctactggcatagctccgcacacatcatgggggaggctatggagcgcgtttacggagggtgcctatgttacggcccccctattgagaacggcttctactacgacatgtacttagaggaaggaggagtatcttcgaatgatttctcttctcttgaagccttgtgtaagaagatcatcaaagaaaagcaggcctttgaaaggctcgaagtgaaaaaagagacactcctggccatgttcaagtataacaagttcaaatgcaggatcctgaacgaaaaggtgaataccccgaccaccaccgtctaccgttgcggccctctgatcgatctgtgcagagggccacacgtgcgccacacggggaagatcaaggcactgaagatccacaagaattcgtctacctattgggagggcaaggctgacatggagactctgcaaaggatttatggaataagcttccctgatcctaaaatgctgaaggaatgggaaaaattccaagaagaggccaaaaatcgcgaccacaggaaaataggtcgtgaccaagagctctacttctttcacgagctctcccctggtagttgcttcttcctacctaagggggcgtacatttacaatgcgttgattgagtttatcaggtcagagtataggaaacggggcttccaggaggtcgtcacgcccaatatatttaattcgcgactctggatgacaagtgggcactggcagcactacagtgagaacatgttcagttttgaggttgaaaaagaactttttgcactgaaacccatgaattgtcctggccactgtcttatgtttgatcacagaccccggagttggagggaactgccactaaggctcgccgactttggggtcctccatagaaatgaactatctggggcactcaccgggctaacgcgggtgcggcggttccagcaagacgacgcgcacattttttgcgccatggagcagatcgaggatgagattaaggggtgcctggacttccttaggacagtttactctgtgttcggcttcagcttcaagctgaacctatccacaagaccagagaaattcctgggcgacatcgaagtgtgggaccaggcagagaagcagcttgagaattcactcaatgagtttggtgaaaagtgggagcttaactctggggatggagcattttacgggcctaagatcgatattcagattaaggatgcgattggtcgctaccaccagtgtgccaccatacagctggatttccaattacctatcagatttaatctgacttacgtgagtcacgatggcgacgataaaaagcgcccggtaatcgtgcaccgtgctatcctcggaagcgtcgagcgcatgattgccatactcaccgagaactacgggggcaagtggcccttctggttgtcccctcgacaagtaatggtagtgccagttggtcctacttgtgatgagtatgcccaaaaggtccggcaacaattccatgatgctaagtttatggccgatatcgacttagaccctgggtgcactttaaataagaagatccgcaacgcccagctggcgcagtacaatttcatattagtagtgggtgaaaaagagaaaatttccggaacagttaatatcagaactcgggacaacaaggtacatggcgaacggacaatctccgaaacgatagagcgcctccaacagcttaaggaatttcgttctaagcaggcagaagaggagttttag

SEQ ID NO: 93292 - DNA, 390 bp, Artificial Sequence
  derived and/or modified sequence
atgttcgaggagaaggccagcagccccagcggcaagatgggcggcgaggagaaacctataggggcaggagaggaaaagcagaaggagggcggaaagaaaaaaaataaagaggggagtggcgatggagggagggccgagttgaatccgtggccagagtatatatacacacggcttgaaatgtacaacatcctcaaggctgagcacgatagcatcctcgcggaaaaggccgagaaggactccaaacccatcaaggttaccctgcccgacgggaagcaagtggacgccgaatcttggaaaaccaccccctatcagatcgcatgcggaatatcgcagggcttagccgataacaccgttattgccaaggtgaataacgtcgtgtgggacctgtag

SEQ ID NO: 93293 - DNA, 1860 bp, Artificial Sequence
  derived and/or modified sequence
atggaggtggagctgagccagggcctggccgacaacaccgtgatcgcaaaagtcaacaatgtcgtgtgggatctggatcggccgctggaagaggactgtaccctcgagctgcttaagttcgaggacgaggaagctcaggcagtttactggcactctagtgcgcacatcatgggagaggccatggagcgagtctacggagggtgcctctgttacggccctcccattgagaatgggttttactacgatatgtatctggaggagggcggtgtgagcagcaacgacttctcctctcttgaggcattgtgcaaaaagataattaaggagaaacaagcattcgaaagactggaggtgaagaaagagactctgctggctatgttcaaatataacaagttcaagtgtagaattctgaacgagaaagtgaacactccaaccaccaccgtgtaccggtgtggtccattgatagatctgtgcaggggcccacatgtgcgccatactgggaagatcaaagcactcaaaatccataaaaatagtagtacgtattgggagggaaaagccgatatggaaacgttgcagagaatctacggaatctcctttcccgaccctaagatgctgaaagagtgggaaaagttccaggaggaggccaagaacagagaccatagaaaaatcggacgggaccaagaactgtatttctttcacgagctgtccccaggatcttgtttttttctgcccaagggcgcatatatatacaacgcacttatcgagttcattagaagcgaatacaggaagaggggcttccaggaggtagtgaccccaaatatttttaattctaggttatggatgacatctggtcattggcaacactattcagagaatatgttctcctttgaggtcgaaaaggaactatttgcactgaaacctatgaattgccccggccattgtctgatgttcgatcacagaccccgcagttggcgcgagcttcccttaagattggccgatttcggggttctgcaccgaaacgaattatccggcgctctaacaggccttaccagggtacgccgattccagcaggacgatgctcacattttttgcgcgatggaacaaatagaagacgaaattaagggctgtcttgactttctgagaaccgtgtactctgtctttggattttcgtttaagcttaatctcagcaccaggcctgagaaatttctgggggatatcgaagtgtgggaccaagctgaaaagcaactggagaattcgctgaacgaattcggggagaaatgggagctgaattccggagacggagcgttctatgggcctaaaatcgacatccaaatcaaggatgcaataggccggtaccatcagtgcgccaccattcagttggatttccagctccctataaggttcaacctgacctatgttagccacgatggcgatgacaagaagaggcctgtaatagttcaccgggccatactggggagtgttgagcggatgatcgctatcttaacagaaaattatggcggaaagtggcccttttggctgtccccccgacaggtgatggtggtgccagtggggccaacctgtgatgagtatgcccagaaggtgcgccagcagttccacgatgccaaattcatggctgatattgacctcgatccaggttgtaccttgaataagaagatacggaacgcccagcttgcgcagtataacttcatactggtagtgggagaaaaagaaaagatctccggaacagtgaatattcggaccagggacaataaagtgcatggcgagagaaccattagcgaaacaattgaacggttacagcagttaaaggagttcagaagcaagcaagctgaggaagagttctag

SEQ ID NO: 93294 - DNA, 2172 bp, Artificial Sequence
  derived and/or modified sequence
atgtttgaagaaaaggcaagttctccaagcggaaaaatggggggagaggagaaacctatcggcgctggtgaggagaaacagaaggaaggagggaagaaaaagaataaagaagggagcggcgatggagggagggctgagctgaacccttggccagagtatatctatactcgtctggagatgtataatatactgaaagccgaacacgactccatcctcgccgaaaaggccgaaaaggacagcaagcctattaaggtgaccctgccagatggaaagcaggttgacgccgagtcgtggaaaacgacaccttatcaaattgcttgcggcatttcccaaggcctggctgacaacactgtgattgctaaagtcaacaatgtggtgtgggatctcgacaggccgctggaagaagattgcacactggagctcttgaaattcgaagacgaggaggcccaagctgtgtattggcattcctctgcccatatcatgggagaggccatggaacgcgtttatggcggatgcctctgctacggccctcccatagagaacgggttctactacgacatgtacctggaagagggcggtgtgtctagcaacgatttcagctcactggaagccctctgcaagaaaatcatcaaagagaaacaggccttcgagaggctggaggttaaaaaagaaacactattagcaatgtttaagtataataagttcaaatgccggatcttgaacgagaaggtcaatacaccgacgacaacagtgtacaggtgtggccctctcattgatctatgtcgaggtccacatgttaggcacaccggaaaaattaaagcactcaagattcacaaaaatagttcgacatactgggagggcaaagccgacatggaaacccttcaacgcatctatggaataagtttcccagaccccaagatgctgaaggaatgggagaagttccaggaggaggctaagaacagagaccacaggaagataggacgtgaccaggagctgtactttttccacgaactgtcccctggcagttgtttcttcctgcccaagggagcctatatttacaacgcccttattgaatttatcaggtcggaatataggaagcgcggttttcaggaagtggtgacccccaacatattcaactcgagactgtggatgaccagcggacactggcaacactactccgagaacatgttctcattcgaagtcgagaaagagttatttgcgctcaagccaatgaattgcccaggccactgtctgatgttcgaccaccggccaaggagctggcgagagctccctctcaggttggcagactttggagtcctacaccgcaatgaactatccggggctctgaccggcctgactagggtccgacgcttccagcaggatgatgctcacatcttttgcgctatggagcagatcgaggacgagattaaggggtgtctcgatttcttacgtacggtctattcagttttcggcttctcgtttaagctgaacctctcaacgaggcccgagaaattcctgggtgacatcgaggtgtgggaccaagctgagaaacaactggagaacagcctcaacgagtttggggagaagtgggagttgaattccggcgatggtgcattctatggtccaaaaatcgacatccagattaaagacgccattggacggtaccatcagtgcgctacgatccagctggatttccagctgcctatccgctttaacttgacatacgtgtcccatgatggggacgacaagaagagaccagtgattgtccatagggctatcctcggtagcgtggaacgcatgatcgccatcctcactgaaaactatggtggcaagtggcctttttggttgtctcctcggcaggtgatggtcgtgcccgtgggccctacttgtgacgagtacgcacaaaaggtgcgccagcaatttcacgacgccaagttcatggccgatattgatttggaccccggttgtacactgaataagaagatcagaaatgctcagctcgctcagtacaactttattttagtcgtaggcgagaaagagaaaatctcaggcaccgttaatatccggaccagagacaataaggtgcacggagaaagaaccataagcgagactatagaacggctccagcagctgaaggaattccgatcgaaacaagctgaggaggagttctag

SEQ ID NO: 93295 - DNA, 1809 bp, Artificial Sequence
  derived and/or modified sequence
atgatccctttctggcaaaaacggcagaaaaagatagcatcccaactgaaatctctgtgccttatggttaataggctaatgaggaatctggggaagcttcatcacattaaattaccggtcgaactggccatggagagggtgtatgggggatgtctctgttatggcccacccatcgaaaatggcttttactacgacatgtacctggaagagggaggtgtcagctcaaatgatttctcctcactcgaagcactatgcaaaaaaatcataaaggaaaaacaggcttttgaaagactcgaggtgaagaaggagaccctgctggcgatgttcaagtacaacaagttcaagtgtcgaatcctcaacgaaaaagtgaacacacctaccacaaccgtttaccgctgtgggccactgattgatttgtgcagaggccctcacgttagacacactggtaagattaaggccctgaagatacataaaaatagcagtacctattgggaaggcaaagccgatatggagaccctgcagcggatctatgggatcagcttccccgacccgaaaatgctgaaggagtgggagaaattccaagaggaggccaaaaatcgggaccacagaaagattggtcgcgaccaagagctgtacttcttccacgaactgagccctggctcatgcttcttcctgccgaagggtgcttacatctacaacgctttaatcgagtttatcaggagtgaataccgaaaaaggggcttccaggaggtggttacccctaacatttttaatagccgtctctggatgacaagcggtcattggcaacattatagcgaaaatatgttttcgtttgaagtggagaaagagctattcgcgcttaagccgatgaactgcccaggacactgcctgatgtttgatcatagaccaagatcatggagggaactgccgctgaggctggccgacttcggggtgctacaccgaaatgagctatcaggcgctcttacggggttgacccgcgtaagaagattccagcaggatgatgcgcacatcttttgcgccatggaacagatcgaggacgagatcaaaggttgcctggattttctccggacggtgtacagcgtgttcggcttctcttttaagctgaatctgagtacccgcccagagaaatttctgggcgacatagaggtttgggatcaagcagaaaaacagctggaaaattcgctcaatgaattcggagagaagtgggagctcaatagcggtgatggcgcattctatggcccaaagattgacatacagattaaggacgccatcggcaggtatcaccagtgtgccaccattcagctggacttccagctccccatcaggttcaaccttacgtacgtctcacacgatggagatgacaaaaagcggccagtcatcgtgcatagagcgattcttggaagcgtcgagcgcatgatcgctatcctcaccgagaattacggagggaagtggcccttttggttatctcctcgccaagtaatggttgtcccggttggcccaacgtgcgatgagtacgcccagaaagtgcgccagcagtttcacgacgccaaatttatggctgatatagacctggatccagggtgcaccctgaacaaaaagatacgcaacgctcagttggcacagtataactttatcctggtggtgggagaaaaggaaaaaatttctggcacagtcaatatcagaacccgagataataaggtgcacggggagaggactatttctgaaacaattgaacggctgcagcaactcaaagaatttaggtccaaacaagcagaggaggaattttag

SEQ ID NO: 93296 - DNA, 2172 bp, Artificial Sequence
  derived and/or modified sequence
atgtttgaagagaaagcctcgtctccctccggaaaaatggggggagaagagaagcccattggagctggggaagagaagcagaaggagggaggtaaaaaaaagaacaaggagggctccggtgacggcggacgcgcagagttaaatccttggccggagtatatttacactcgacttgagatgtataacattctgaaagctgagcacgactccatactggccgaaaaagccgagaaggactctaagccaatcaaagtgaccttgccagacgggaaacaggtggacgctgaaagttggaagacaaccccttatcagattgcctgtggaatcagtcagggacttgcggacaacacagtgatcgccaaggtgaacaacgtggtttgggacctcgataggccccttgaagaggattgcaccctggaactgctgaagtttgaagacgaggaggctcaggctgtgtactggcattcatccgcccatattatgggggaagctatggagagggtttacggcggatgcctctgctatggcccaccaatcgagaacgggttctactatgatatgtacctggaggaggggggtgtcagcagtaacgacttcagttcccttgaggccctgtgtaaaaagatcattaaggaaaaacaggcatttgagcggctggaggtgaagaaagagaccctgctggccatgttcaaatataacaagttcaagtgccgaattttgaatgagaaggtcaatacccccacaaccacagtgtatcggtgcggccctctgattgacctctgcagaggccctcacgtacgtcacacgggtaagattaaggcactgaaaatccacaagaactcgagcacttactgggagggcaaagccgacatggagactctccagcgcatctacgggattagctttccagaccccaagatgttaaaagagtgggagaagttccaagaagaagctaaaaaccgggatcaccggaaaatcggcagagaccaggaactgtactttttccatgagttatcgccagggtcatgtttctttctgccaaagggagcttacatctataatgcgcttatcgaattcatccggtccgagtaccgaaagcgcggttttcaggaggtggtgaccccaaacattttcaacagtagactgtggatgaccagcggacactggcagcactacagtgagaacatgttctctttcgaggtcgagaaagaactgtttgctctgaagccaatgaattgtcccggacattgtttgatgttcgatcaccgcccaaggtcctggcgggaattgcccctccggctggcggacttcggtgtactacatcggaatgaactttcaggcgcattgacaggcttaacgcgcgtccgacgattccagcaggacgatgcgcacattttttgtgcgatggagcagatcgaggatgaaatcaaaggctgtctggattttctccggactgtgtacagcgtcttcggattttcttttaaacttaatctgtcaacaaggccggaaaaatttcttggcgatattgaggtatgggaccaggccgagaaacagcttgaaaattctctgaatgaatttggggagaagtgggagctaaacagcggagacggcgcattttacggtcccaagatcgacatccagatcaaggatgctattggacgttatcatcagtgcgcaactattcaactggatttccagcttcctatcaggttcaacctgacctatgtgagccacgacggcgacgataagaagcgcccagttatcgtgcaccgtgccattctaggcagtgtcgagagaatgatcgcaatactgactgagaattatggcggaaagtggcccttttggttaagtccgagacaggtgatggtggtcccagtcggtcccacgtgtgatgagtacgctcaaaaggtccgtcagcagtttcatgatgctaagtttatggctgatatcgatctcgacccaggatgtacccttaacaagaagatacggaacgcacagctggctcagtacaatttcatccttgtggtcggagaaaaggagaaaatttcagggacagttaacattagaacacgagacaacaaggtccatggcgaacgcacaatttctgaaacaattgagaggcttcagcagctcaaggaatttagaagcaagcaggcagaagaggaattttag

SEQ ID NO: 93297 - DNA, 390 bp, Artificial Sequence
  derived and/or modified sequence
atgtttgaggaaaaggcctccagtccctccggtaagatgggcggagaggaaaaacccattggagccggagaagaaaaacaaaaggaggggggaaagaagaaaaacaaagagggatccggagacggaggacgagccgagctgaacccatggcccgagtacatatatacccgcctggaaatgtacaatattctcaaggcagaacatgactctatcctggccgaaaaagctgagaaggacagtaagcctatcaaggtgacactccctgatgggaagcaggtggatgcagagtcctggaaaactactccctaccagattgcttgcggtatctcccaaggcttagctgacaacacagtaatcgccaaagttaataacgtcgtctgggatctatag

SEQ ID NO: 93298 - DNA, 1860 bp, Artificial Sequence
  derived and/or modified sequence
atggaagtggagctgtctcaggggcttgctgataacaccgtgatcgcgaaggtgaataacgtggtgtgggacttggaccggccactcgaagaggattgcacgctcgagctcctaaagttcgaggatgaagaggcgcaggccgtatattggcactcctcagcgcatattatgggtgaggctatggaacgcgtctacggcggatgcctttgttatggccctccaatcgagaatggcttttactatgatatgtatctggaggaggggggagttagctcaaacgattttagctcgctcgaagccctttgtaaaaaaattataaaggagaaacaagcctttgaaaggctcgaggtgaaaaaagagacacttttggctatgtttaagtacaacaaatttaagtgtcggatactgaatgagaaggttaatacgcctactactacggtgtataggtgtgggcctcttattgacctttgcagaggcccacatgttaggcatacaggtaagatcaaagcgctgaaaattcataaaaactcaagcacctactgggagggtaaagcagacatggagactctgcagaggatctacgggatatctttcccggaccctaagatgcttaaggagtgggaaaaattccaggaggaggctaaaaaccgagatcaccgtaaaatcggccgtgatcaggagctgtatttcttccatgaactgtccccaggaagctgttttttcctccccaaaggtgcctatatttacaatgcactaattgagttcatccgatccgaatatcgcaaacgcggatttcaggaagtggttactccgaacattttcaactcgcggctctggatgaccagtgggcattggcagcactattcagaaaatatgttttcattcgaggtcgagaaggagttgttcgctctcaagccaatgaattgtcccggacattgtctgatgtttgatcatcgtccacgatcatggagagagctgccactccgattggccgatttcggagttctgcatcggaacgagctatccggggctctgacaggcctgaccagggtgcgccgtttccagcaggacgatgcccacatcttctgcgcaatggagcagattgaagacgagattaaagggtgtcttgacttcctgagaactgtgtactccgtctttggtttttctttcaagctgaatctgtcaacccgcccagagaagtttctgggagatatagaggtctgggatcaagctgagaaacaactagagaatagcctgaacgaatttggcgagaaatgggaactgaatagcggcgatggcgcattctacggacccaaaattgacatccaaatcaaggatgccatagggagataccatcagtgcgctactatccaattggattttcagttaccgataagattcaacctcacgtacgtgtctcatgacggagacgacaagaaacgccctgttattgtacatcgtgcgatactgggcagtgttgaaaggatgatcgccattctgacggaaaactacgggggtaaatggcccttttggttatctcctcggcaggtgatggtcgtccccgtggggcctacctgcgatgaatacgcccaaaaagtccgccagcagttccatgacgcaaaattcatggccgacatcgatctggaccccggatgtaccttgaacaagaagattagaaatgctcagctggcgcaatataatttcatccttgtggtgggagagaaggaaaaaataagcggcaccgtgaacatacggaccagagataataaggtccacggagagaggactatctcagaaaccattgagcgtttacaacagctcaaggagttccggtcaaagcaagccgaggaggaattctag

SEQ ID NO: 93299 - DNA, 4314 bp, Artificial Sequence
  derived and/or modified sequence
ggtcagcggagagtaggcatgtagcttctgcagttgctcctcctcaccctccgcgacctgatttcctagaagggctctgtcacccgaaaagattttccactggcttagaggagggagggcccgccttcccccgttatccattggctgctcgttccgccgcaagttgggggcggggttagggcgcctttcgattgcatcagctggtccagccgaggccaagtcccgggcgctagcccacctcccacccgcctcttggctcctctcctctaggccgtcgctttcgggttctctcatcgcttcgtcgttcgccaatgtttgaggagaaggccagcagtccttcagggaagatgggaggcgaggagaagccgattggtgctggtgaagagaagcaaaaggaaggaggcaaaaagaagaacaaagaaggatctggagatggaggtcgagctgagttgaatccttggcctgaatatatttacacacgtcttgagatgtataatatactaaaagcagaacatgattccattctggcagaaaaggcagaaaaagatagcaagccaattaaagtcactttgcctgatggtaaacaggttgatgcggaatcttggaaaactacaccatatcaaattgcctgtggaattagtcaaggcctggccgacaacaccgttattgctaaagtaaataatgttgtgtgggacctggaccgccctctggaagaagattgtaccttggagcttctcaagtttgaggatgaggaagctcaggcagtgtattggcactctagtgctcacataatgggtgaagccatggaaagagtctatggtggatgtttatgctacggtccgccaatagaaaatggattctattatgacatgtacctcgaagaagggggtgtgtctagcaatgatttctcttctctggaggctttgtgtaagaaaatcattaaagaaaaacaagcttttgaaagactggaagttaagaaagaaactttactggcaatgtttaagtacaacaagttcaaatgccggatattgaatgaaaaggtgaatactccaactaccacagtctatagatgtggccctttgatagatctctgccggggtcctcatgttagacacacgggcaaaattaaggctttaaaaatacacaaaaattcctccacgtactgggaaggcaaagcagatatggagactctccagagaatttatggcatttcattcccagatcctaaaatgttgaaagagtgggagaagttccaagaggaagctaaaaaccgagatcataggaaaattggcagggaccaagaactatatttctttcatgaactcagccctggaagttgcttttttctgccaaaaggagcctacatttataatgcacttattgaattcattaggagcgaatataggaaaagaggattccaggaggtagtcaccccaaacatcttcaacagccgactctggatgacctcgggccactggcagcactacagcgagaacatgttctcctttgaggtggagaaggagctgtttgccctgaaacccatgaactgcccaggacactgccttatgtttgatcatcggccaaggtcctggcgagaactgcctctgcggctagctgattttggggtacttcataggaacgagctgtctggagcactcacaggactcacccgggtacgaagattccaacaggatgatgctcacatattctgtgccatggagcagattgaagatgaaataaaaggttgtttggattttctacgtacggtatatagcgtatttggattttcttttaaactaaacctttctactcgcccggaaaaattccttggagatatcgaagtatgggatcaagctgagaaacaacttgaaaacagtctgaatgaatttggtgaaaagtgggagttaaactctggagatggagctttctatggcccaaagattgacatacagattaaagatgcgattgggcggtaccaccagtgtgcaaccatccagctggatttccagttgcccatcagatttaatcttacttatgtaagccatgatggtgatgataagaaaaggccagtgattgttcatcgagccatcttgggatcagtggaaagaatgattgctatcctcacagaaaactatgggggcaaatggcccttttggctgtcccctcgccaggtaatggtagttccagtgggaccaacctgtgatgaatatgcccaaaaggtacgacaacaattccacgatgccaaattcatggcagacattgatctggatccaggctgtacattgaataaaaagattcgaaatgcacagttagcacagtataacttcattttagttgttggtgaaaaagagaaaatcagtggcactgttaatatccgcacaagagacaataaggtccacggggaacgcaccatttctgaaactatcgagcggctacagcagctcaaagagttccgcagcaaacaggcagaagaagaattttaatgaaaaaattacccagattggctccatggaaaaggaggaacagcgtttccgtaaaattgactttgtactctgaaaacgtcaatttatattgaacttggaggagtttggcaaagtctgaataggtcaacctgcaggcgtaactatttttgacctagtcagtttttaaacaatgtgcatttgaaggagttaattaaaagagagccaataaaatgattttactcattcagtatctgagtactggaagtgaaacatgaggaatgctttagtgtaatgtgggagaacttttttgtaaatttaatgcaattgaaaaagttttcaaattcaattaagataactagaattggattatggtgtaaaaataaaaaaaaaatttattcacataagtttcaagactgctctgtccctcacatgtacacatacatgcctgagacagataatgtggttcagtatttatctttacagttttacagcaaatataatgcagggtggatggagacggggtaggtctgcagcatcataatgctattcataaactgggtgtgagctgggtgctggcttctcagaggataaacacttttgggagtgtcatttttacttaatgttggatggacaccttttcaaacaaaaactaccatggatctattacagagtagatttgcacaaatgtttaagataaaacgtgaatcttcagagaaatatctgtttatggcagactgttctggaccatagaatcacttggtttacaaattccctattttctcataagggatcattttcaaaatcttctaccaataaatggtgattgaaaggacagcacaaagtaaataatttcttatgtggataaatactaattcctccttgttagaatgatattttaaaagtaacatcttttttttaattttttttgagacaagatcctttgtcccccaggctggagtgtggtgccatgatctcggctcactgcaacctcagcctcccaagtaggtgggactaaagacatgtgccaccatgcctggctgatgtttgtattttctatagagatggtttcatcatgttgcccaggctggtatcaaactcctggataaaagagacccacctgcctcagtctcccaaagtgctgggattacaggtgtgagccaccacgcccagcctaaaaagcaacatcttgtcagtgctataatctcaaatagcttgtttgcaaggtgtgatggttaatactaagtgtcaacttgattggattaaaggatgcctttattgtttctgggtgtgtctgtgagggtgttgccagagagattgacatttgagtcagtggcctgggagaggcagacacaccctctgtgtgcgtgggcaccatccagtcggctgccagtgcagctagaacaaagcgggtggaagaaagtgggattaagttggcttgctgagtcttctggctttcatctttctcctgtgctggatgattcctgcccttggacatcagactccaggttcttcagcttttggactcttggacttatacccgtggtttgccaggggccttctggcctttggccattgactggagatggcactgtcggcttccctgcttttgaggcttggactcggactgaaccactactggcttccttgctccttagcttgcagacagcctatcgtgggacttcaccgtgtgcttgtgtgagtcaattcttactaaatttcctttcatatatacatatatcctattctgtctctctggagaaccctgactaatacacaagggtcacttcaaagagaagctaatttgcatagattaattttcactttaataaaggagctaagatctttaatcata

SEQ ID NO: 93300 - DNA, 2475 bp, Artificial Sequence
  derived and/or modified sequence
tggtccagccgaggccaagtcccgggcgctagcccacctcccacccgcctcttggctcctctcctctaggccgtcgctttcgggttctctcatcgcttcgtcgttcgccaatgtttgaggagaaggccagcagtccttcagggaagatgggaggcgaggagaagccgattggtgctggtgaagagaagcaaaaggaaggaggcaaaaagaagaacaaagaaggatctggagatggaggtcgagctgagttgaatccttggcctgaatatatttacacacgtcttgagatgtataatatactaaaagcagaacatgattccattctggcagaaaaggcagaaaaagatagcaagccaattaaagtcactttgcctgatggtaaacaggttgatgcggaatcttggaaaactacaccatatcaaattgcctgtggaattagccatggaaagagtctatggtggatgtttatgctacggtccgccaatagaaaatggattctattatgacatgtacctcgaagaagggggtgtgtctagcaatgatttctcttctctggaggctttgtgtaagaaaatcattaaagaaaaacaagcttttgaaagactggaagttaagaaagaaactttactggcaatgtttaagtacaacaagttcaaatgccggatattgaatgaaaaggtgaatactccaactaccacagtctatagatgtggccctttgatagatctctgccggggtcctcatgttagacacacgggcaaaattaaggctttaaaaatacacaaaaattcctccacgtactgggaaggcaaagcagatatggagactctccagagaatttatggcatttcattcccagatcctaaaatgttgaaagagtgggagaagttccaagaggaagctaaaaaccgagatcataggaaaattggcagggaccaagaactatatttctttcatgaactcagccctggaagttgcttttttctgccaaaaggagcctacatttataatgcacttattgaattcattaggagcgaatataggaaaagaggattccaggaggtagtcaccccaaacatcttcaacagccgactctggatgacctcgggccactggcagcactacagcgagaacatgttctcctttgaggtggagaaggagctgtttgccctgaaacccatgaactgcccaggacactgccttatgtttgatcatcggccaaggtcctggcgagaactgcctctgcggctagctgattttggggtacttcataggaacgagctgtctggagcactcacaggactcacccgggtacgaagattccaacaggatgatgctcacatattctgtgccatggagcagattgaagatgaaataaaaggttgtttggattttctacgtacggtatatagcgtatttggattttcttttaaactaaacctttctactcgcccggaaaaattccttggagatatcgaagtatgggatcaagctgagaaacaacttgaaaacagtctgaatgaatttggtgaaaagtgggagttaaactctggagatggagctttctatggcccaaagattgacatacagattaaagatgcgattgggcggtaccaccagtgtgcaaccatccagctggatttccagttgcccatcagatttaatcttacttatgtaagccatgatggtgatgataagaaaaggccagtgattgttcatcgagccatcttgggatcagtggaaagaatgattgctatcctcacagaaaactatgggggcaaatggcccttttggctgtcccctcgccaggtaatggtagttccagtgggaccaacctgtgatgaatatgcccaaaaggtacgacaacaattccacgatgccaaattcatggcagacattgatctggatccaggctgtacattgaataaaaagattcgaaatgcacagttagcacagtataacttcattttagttgttggtgaaaaagagaaaatcagtggcactgttaatatccgcacaagagacaataaggtccacggggaacgcaccatttctgaaactatcgagcggctacagcagctcaaagagttccgcagcaaacaggcagaagaagaattttaatgaaaaaattacccagattggctccatggaaaaggaggaacagcgtttccgtaaaattgactttgtactctgaaaacgtcaatttatattgaacttggaggagtttggcaaagtctgaataggtcaacctgcaggcgtaactatttttgacctagtcagtttttaaacaatgtgcatttgaaggagttaattaaaagagagccaataaaatgattttactcattcagtatctgagtactggaagtgaaacatgaggaatgctttagtgtaatgtgggagaacttttttgtaaatttaatgcaattgaaaaagttttcaaattcaattaagataactagaattggattatggtgt

SEQ ID NO: 93301 - DNA, 2534 bp, Artificial Sequence
  derived and/or modified sequence
atgattgttccacataaagtcagaagggaggaaaggcgcacgcgcattggggacttgactctggaaagcgtccagaccaaggtcagcggagagtaggccgtcgctttcgggttctctcatcgcttcgtcgttcgccaatgtttgaggagaaggccagcagtccttcagggaagatgggaggcgaggagaagccgattggtgctggtgaagagaagcaaaaggaaggaggcaaaaagaagaacaaagaaggatctggagatggaggtcgagctgagttgaatccttggcctgaatatatttacacacgtcttgagatgtataatatactaaaagcagaacatgattccattctggcagaaaaggcagaaaaagatagcaagccaattaaagtcactttgcctgatggtaaacaggttgatgcggaatcttggaaaactacaccatatcaaattgcctgtggaattagtcaaggcctggccgacaacaccgttattgctaaagtaaataatgttgtgtgggacctggaccgccctctggaagaagattgtaccttggagcttctcaagtttgaggatgaggaagctcaggcagtgtattggcactctagtgctcacataatgggtgaagccatggaaagagtctatggtggatgtttatgctacggtccgccaatagaaaatggattctattatgacatgtacctcgaagaagggggtgtgtctagcaatgatttctcttctctggaggctttgtgtaagaaaatcattaaagaaaaacaagcttttgaaagactggaagttaagaaagaaactttactggcaatgtttaagtacaacaagttcaaatgccggatattgaatgaaaaggtgaatactccaactaccacagtctatagatgtggccctttgatagatctctgccggggtcctcatgttagacacacgggcaaaattaaggctttaaaaatacacaaaaattcctccacgtactgggaaggcaaagcagatatggagactctccagagaatttatggcatttcattcccagatcctaaaatgttgaaagagtgggagaagttccaagaggaagctaaaaaccgagatcataggaaaattggcagggaccaagaactatatttctttcatgaactcagccctggaagttgcttttttctgccaaaaggagcctacatttataatgcacttattgaattcattaggagcgaatataggaaaagaggattccaggaggtagtcaccccaaacatcttcaacagccgactctggatgacctcgggccactggcagcactacagcgagaacatgttctcctttgaggtggagaaggagctgtttgccctgaaacccatgaactgcccaggacactgccttatgtttgatcatcggccaaggtcctggcgagaactgcctctgcggctagctgattttggggtacttcataggaacgagctgtctggagcactcacaggactcacccgggtacgaagattccaacaggatgatgctcacatattctgtgccatggagcagattgaagatgaaataaaaggttgtttggattttctacgtacggtatatagcgtatttggattttcttttaaactaaacctttctactcgcccggaaaaattccttggagatatcgaagtatgggatcaagctgagaaacaacttgaaaacagtctgaatgaatttggtgaaaagtgggagttaaactctggagatggagctttctatggcccaaagattgacatacagattaaagatgcgattgggcggtaccaccagtgtgcaaccatccagctggatttccagttgcccatcagatttaatcttacttatgtaagccatgatggtgatgataagaaaaggccagtgattgttcatcgagccatcttgggatcagtggaaagaatgattgctatcctcacagaaaactatgggggcaaatggcccttttggctgtcccctcgccaggtaatggtagttccagtgggaccaacctgtgatgaatatgcccaaaaggtacgacaacaattccacgatgccaaattcatggcagacattgatctggatccaggctgtacattgaataaaaagattcgaaatgcacagttagcacagtataacttcattttagttgttggtgaaaaagagaaaatcagtggcactgttaatatccgcacaagagacaataaggtccacggggaacgcaccatttctgaaactatcgagcggctacagcagctcaaagagttccgcagcaaacaggcagaagaagaattttaatgaaaaaattacccagattggctccatggaaaaggaggaacagcgtttccgtaaaattgactttgtactctgaaaacgtcaatttatattgaacttggaggagtttggcaaagtctgaataggtcaacctgcaggcgtaactatttttgacctagtcagtttttaaacaatgtgcatttgaaggagttaattaaaagagagccaataaaatgattttactcattc

SEQ ID NO: 93302 - DNA, 466 bp, Artificial Sequence
  derived and/or modified sequence
gcattggggacttgactctggaaagcgtccagaccaaggccgtcgctttcgggttctctcatcgcttcgtcgttcgccaatgtttgaggagaaggccagcagtccttcagggaagatgggaggcgaggagaagccgattggtgctggtgaagagaagcaaaaggaaggaggcaaaaagaagaacaaagaaggatctggagatggaggtcgagctgagttgaatccttggcctgaatatatttacacacgtcttgagatgtataatatactaaaagcagaacatgattccattctggcagaaaaggcagaaaaagatagcaagccaattaaagtcactttgcctgatggtaaacaggttgatgcggaatcttggaaaactacaccatatcaaattgcctgtggaattagtcaaggcctggccgacaacaccgttattgctaaagtaaataatgttgtgtgggacctg

SEQ ID NO: 93303 - DNA, 2458 bp, Artificial Sequence
  derived and/or modified sequence
cgattgcatcagctggtccagccgaggccaagtcccgggcgctagcccacctcccacccgcctcttggctcctctcctctaggccgtcgctttcgggttctctcatcgcttcgtcgttcgccaatgtttgaggagaaggccagcagtccttcagggaagatgggaggcgaggagaagccgattggtgctggtgaagagaagcaaaaggaaggaggcaaaaagaagaacaaagaaggatctggagatggaggtcgagctgagtcaaggcctggccgacaacaccgttattgctaaagtaaataatgttgtgtgggacctggaccgccctctggaagaagattgtaccttggagcttctcaagtttgaggatgaggaagctcaggcagtgtattggcactctagtgctcacataatgggtgaagccatggaaagagtctatggtggatgtttatgctacggtccgccaatagaaaatggattctattatgacatgtacctcgaagaagggggtgtgtctagcaatgatttctcttctctggaggctttgtgtaagaaaatcattaaagaaaaacaagcttttgaaagactggaagttaagaaagaaactttactggcaatgtttaagtacaacaagttcaaatgccggatattgaatgaaaaggtgaatactccaactaccacagtctatagatgtggccctttgatagatctctgccggggtcctcatgttagacacacgggcaaaattaaggctttaaaaatacacaaaaattcctccacgtactgggaaggcaaagcagatatggagactctccagagaatttatggcatttcattcccagatcctaaaatgttgaaagagtgggagaagttccaagaggaagctaaaaaccgagatcataggaaaattggcagggaccaagaactatatttctttcatgaactcagccctggaagttgcttttttctgccaaaaggagcctacatttataatgcacttattgaattcattaggagcgaatataggaaaagaggattccaggaggtagtcaccccaaacatcttcaacagccgactctggatgacctcgggccactggcagcactacagcgagaacatgttctcctttgaggtggagaaggagctgtttgccctgaaacccatgaactgcccaggacactgccttatgtttgatcatcggccaaggtcctggcgagaactgcctctgcggctagctgattttggggtacttcataggaacgagctgtctggagcactcacaggactcacccgggtacgaagattccaacaggatgatgctcacatattctgtgccatggagcagattgaagatgaaataaaaggttgtttggattttctacgtacggtatatagcgtatttggattttcttttaaactaaacctttctactcgcccggaaaaattccttggagatatcgaagtatgggatcaagctgagaaacaacttgaaaacagtctgaatgaatttggtgaaaagtgggagttaaactctggagatggagctttctatggcccaaagattgacatacagattaaagatgcgattgggcggtaccaccagtgtgcaaccatccagctggatttccagttgcccatcagatttaatcttacttatgtaagccatgatggtgatgataagaaaaggccagtgattgttcatcgagccatcttgggatcagtggaaagaatgattgctatcctcacagaaaactatgggggcaaatggcccttttggctgtcccctcgccaggtaatggtagttccagtgggaccaacctgtgatgaatatgcccaaaaggtacgacaacaattccacgatgccaaattcatggcagacattgatctggatccaggctgtacattgaataaaaagattcgaaatgcacagttagcacagtataacttcattttagttgttggtgaaaaagagaaaatcagtggcactgttaatatccgcacaagagacaataaggtccacggggaacgcaccatttctgaaactatcgagcggctacagcagctcaaagagttccgcagcaaacaggcagaagaagaattttaatgaaaaaattacccagattggctccatggaaaaggaggaacagcgtttccgtaaaattgactttgtactctgaaaacgtcaatttatattgaacttggaggagtttggcaaagtctgaataggtcaacctgcaggcgtaactatttttgacctagtcagtttttaaacaatgtgcatttgaaggagttaattaaaagagagccaataaaatgattttactcattcagtatctgagtactggaagtgaaacatgaggaatgctttagtgtaatgtgggagaacttttttgtaaatttaatgcaattgaaaaagttttcaaattcaattaagataactagaattggattatggtgt

SEQ ID NO: 93304 - protein, 602 aa, Artificial Sequence
  derived and/or modified sequence
MIPFWQKRQKKIASQLKSLCLMVNRLMRNLGKLHHIKLPVELAMERVYGGCLCYGPPIENGFYYDMYLEEGGVSSNDFSSLEALCKKIIKEKQAFERLEVKKETLLAMFKYNKFKCRILNEKVNTPTTTVYRCGPLIDLCRGPHVRHTGKIKALKIHKNSSTYWEGKADMETLQRIYGISFPDPKMLKEWEKFQEEAKNRDHRKIGRDQELYFFHELSPGSCFFLPKGAYIYNALIEFIRSEYRKRGFQEVVTPNIFNSRLWMTSGHWQHYSENMFSFEVEKELFALKPMNCPGHCLMFDHRPRSWRELPLRLADFGVLHRNELSGALTGLTRVRRFQQDDAHIFCAMEQIEDEIKGCLDFLRTVYSVFGFSFKLNLSTRPEKFLGDIEVWDQAEKQLENSLNEFGEKWELNSGDGAFYGPKIDIQIKDAIGRYHQCATIQLDFQLPIRFNLTYVSHDGDDKKRPVIVHRAILGSVERMIAILTENYGGKWPFWLSPRQVMVVPVGPTCDEYAQKVRQQFHDAKFMADIDLDPGCTLNKKIRNAQLAQYNFILVVGEKEKISGTVNIRTRDNKVHGERTISETIERLQQLKEFRSKQAEEEF

SEQ ID NO: 93305 - protein, 756 aa, Artificial Sequence
  derived and/or modified sequence
MFEEKASSPSGKMGGEEKPIGAGEEKQKEGGKKKNKEGSGDGGRAELNPWPEYIYTRLEMYNILKAEHDSILAEKAEKDSKPIKVTLPDGKQVDAESWKTTPYQIACGISHTASCKNLSSLASLLASVAIPSSGMPWPPLFFLQGLADNTVIAKVNNVVWDLDRPLEEDCTLELLKFEDEEAQAVYWHSSAHIMGEAMERVYGGCLCYGPPIENGFYYDMYLEEGGVSSNDFSSLEALCKKIIKEKQAFERLEVKKETLLAMFKYNKFKCRILNEKVNTPTTTVYRCGPLIDLCRGPHVRHTGKIKALKIHKNSSTYWEGKADMETLQRIYGISFPDPKMLKEWEKFQEEAKNRDHRKIGRDQELYFFHELSPGSCFFLPKGAYIYNALIEFIRSEYRKRGFQEVVTPNIFNSRLWMTSGHWQHYSENMFSFEVEKELFALKPMNCPGHCLMFDHRPRSWRELPLRLADFGVLHRNELSGALTGLTRVRRFQQDDAHIFCAMEQIEDEIKGCLDFLRTVYSVFGFSFKLNLSTRPEKFLGDIEVWDQAEKQLENSLNEFGEKWELNSGDGAFYGPKIDIQIKDAIGRYHQCATIQLDFQLPIRFNLTYVSHDGDDKKRPVIVHRAILGSVERMIAILTENYGGKWPFWLSPRQVMVVPVGPTCDEYAQKVRQQFHDAKFMADIDLDPGCTLNKKIRNAQLAQYNFILVVGEKEKISGTVNIRTRDNKVHGERTISETIERLQQLKEFRSKQAEEEF

SEQ ID NO: 93306 - DNA, 2271 bp, Artificial Sequence
  derived and/or modified sequence
atgttcgaggagaaggccagcagccccagcggcaagatgggcggcgaggagaagcccatcggcgccggcgaggagaagcagaaggagggcggcaagaagaagaacaaggagggcagcggcgacggcggcagagccgagctgaacccctggcccgagtacatctacaccagactggagatgtacaacatcctgaaggccgagcacgacagcatcctggccgagaaggccgagaaggacagcaagcccatcaaggtgaccctgcccgacggcaagcaggtggacgccgagagctggaagaccaccccctaccagatcgcctgcggcatcagccacaccgccagctgcaagaacctgagcagcctggccagcctgctggccagcgtggccatccccagcagcggcatgccctggccccccctgttcttcctgcagggcctggccgacaacaccgtgatcgccaaggtgaacaacgtggtgtgggacctggacagacccctggaggaggactgcaccctggagctgctgaagttcgaggacgaggaggcccaggccgtgtactggcacagcagcgcccacatcatgggcgaggccatggagagagtgtacggcggctgcctgtgctacggcccccccatcgagaacggcttctactacgacatgtacctggaggagggcggcgtgagcagcaacgacttcagcagcctggaggccctgtgcaagaagatcatcaaggagaagcaggccttcgagagactggaggtgaagaaggagaccctgctggccatgttcaagtacaacaagttcaagtgcagaatcctgaacgagaaggtgaacacccccaccaccaccgtgtacagatgcggccccctgatcgacctgtgcagaggcccccacgtgagacacaccggcaagatcaaggccctgaagatccacaagaacagcagcacctactgggagggcaaggccgacatggagaccctgcagagaatctacggcatcagcttccccgaccccaagatgctgaaggagtgggagaagttccaggaggaggccaagaacagagaccacagaaagatcggcagagaccaggagctgtacttcttccacgagctgagccccggcagctgcttcttcctgcccaagggcgcctacatctacaacgccctgatcgagttcatcagaagcgagtacagaaagagaggcttccaggaggtggtgacccccaacatcttcaacagcagactgtggatgaccagcggccactggcagcactacagcgagaacatgttcagcttcgaggtggagaaggagctgttcgccctgaagcccatgaactgccccggccactgcctgatgttcgaccacagacccagaagctggagagagctgcccctgagactggccgacttcggcgtgctgcacagaaacgagctgagcggcgccctgaccggcctgaccagagtgagaagattccagcaggacgacgcccacatcttctgcgccatggagcagatcgaggacgagatcaagggctgcctggacttcctgagaaccgtgtacagcgtgttcggcttcagcttcaagctgaacctgagcaccagacccgagaagttcctgggcgacatcgaggtgtgggaccaggccgagaagcagctggagaacagcctgaacgagttcggcgagaagtgggagctgaacagcggcgacggcgccttctacggccccaagatcgacatccagatcaaggacgccatcggcagataccaccagtgcgccaccatccagctggacttccagctgcccatcagattcaacctgacctacgtgagccacgacggcgacgacaagaagagacccgtgatcgtgcacagagccatcctgggcagcgtggagagaatgatcgccatcctgaccgagaactacggcggcaagtggcccttctggctgagccccagacaggtgatggtggtgcccgtgggccccacctgcgacgagtacgcccagaaggtgagacagcagttccacgacgccaagttcatggccgacatcgacctggaccccggctgcaccctgaacaagaagatcagaaacgcccagctggcccagtacaacttcatcctggtggtgggcgagaaggagaagatcagcggcaccgtgaacatcagaaccagagacaacaaggtgcacggcgagagaaccatcagcgagaccatcgagagactgcagcagctgaaggagttcagaagcaagcaggccgaggaggagttctag

SEQ ID NO: 93307 - DNA, 2271 bp, Artificial Sequence
  derived and/or modified sequence
atgtttgaggaaaaggctagctctccaagcgggaagatggggggggaagagaagcctatcggggcgggagaggagaagcagaaggaagggggtaaaaagaagaataaagagggatccggggatgggggccgggctgaactgaatccatggcctgaatatatatataccagattagaaatgtataatatccttaaggccgaacacgactctatcctggcggagaaggcagaaaaggacagcaagcctatcaaagtcactttgccggatggaaagcaggttgacgcagaaagttggaaaaccactccctaccagatcgcgtgcggaatctctcataccgcatcttgcaaaaatctctcatcactcgcttctctgctagcgtcagtggccatcccatcaagcggaatgccctggccccccctgttcttcctgcaggggcttgccgataacaccgtcatcgctaaggtgaacaacgtagtctgggacctcgataggccactggaggaggactgcactctggaacttctgaagtttgaggatgaagaagcccaggccgtttactggcattcaagtgctcatattatgggggaagcaatggagagggtctatggcgggtgcctgtgctacggtccaccaatagagaatgggttctactatgatatgtatctggaagaaggaggcgtctcaagcaatgatttctcgagcctggaggcactctgcaagaagattattaaagagaagcaggcatttgagcgtctggaagttaagaaggagacactgctggcgatgttcaagtataacaaatttaaatgccgcattctgaacgagaaggtcaatactcctactacaactgtctatcgctgtgggccacttatagacctgtgccgtggtccacatgtgaggcacaccggcaaaattaaagctctgaaaatccacaaaaactcctctacatattgggaaggaaaagccgacatggagaccctgcagcggatctacggaataagctttccggacccgaagatgctgaaggagtgggagaagtttcaggaggaggctaaaaatcgtgatcaccgtaagataggaagggatcaggagttatacttcttccatgagctttcccccggtagctgcttctttctccccaaaggtgcttacatctacaatgcccttatcgagtttatccggtccgagtacagaaagcgcgggttccaggaggttgtcacccccaatatattcaactctcggttgtggatgaccagcggtcattggcagcattactccgaaaatatgtttagttttgaggtggagaaagagctgttcgcattgaagcccatgaactgtccggggcactgtttaatgtttgaccacaggccaaggagctggcgcgagttgcccctccgccttgcagatttcggggtgctgcaccggaatgagctcagtggtgcactgaccggactgacaagagtgcgcagattccagcaagacgacgcacacatattctgcgcaatggagcagattgaggatgagattaagggttgcctggactttcttagaaccgtttatagcgtctttggattttcttttaaactcaatttgtcaacccgcccggaaaaatttttaggcgatattgaagtatgggaccaagcagagaagcagcttgaaaattcactgaatgagtttggggaaaagtgggaactcaacagtggcgatggtgctttttacggccctaaaattgatatacagatcaaagacgccatcggacgataccaccagtgtgccactatacagctggacttccagttgcccatcaggttcaacctgacctacgtgtcccatgatggcgacgacaagaaaaggccagtgatagtgcaccgagccatcctcggttcagtcgaacggatgattgcgatcttaacagaaaactatggtggtaagtggcctttttggctctctccgcgacaggtgatggtggttccagtcggcccgacatgtgacgagtatgcgcagaaggtgaggcagcagtttcacgacgccaaatttatggctgacattgatctcgaccctggctgcacattaaataagaaaatccgcaatgcgcaactggctcagtacaacttcatcctggtcgtaggcgaaaaggagaagattagcggtactgtgaatatacgaaccagagataacaaagttcatggcgagagaacaatctctgaaactattgaacgcctgcagcagctgaaggagttccggtccaagcaggctgaggaggaattctag

SEQ ID NO: 93308 - DNA, 2271 bp, Artificial Sequence
  derived and/or modified sequence
atgtttgaggagaaggccagcagccccagcggcaagatgggcggggaggagaagcccatcggggccggggaggagaagcagaaggagggcggcaagaagaagaacaaggagggcagcggagatggcggccgggcagagctgaacccctggccagagtacatctacacccggctggagatgtacaacatcctgaaggccgagcatgacagcatcctggccgagaaggccgagaaggacagcaagcccatcaaggtgaccctgcctgatggcaagcaggtggatgctgagagctggaagaccaccccctaccagatcgcctgtggcatcagccacacagccagctgcaagaacctgagcagcctggccagcctgctggcctctgtggccatccccagcagcggcatgccctggccacccctcttcttcctgcagggcctggccgacaacacagtcatcgccaaggtgaacaacgtggtgtgggacctggaccggcccctggaggaggactgcaccctggagctgctgaagtttgaagatgaggaggcccaggccgtgtactggcacagcagcgcccacatcatgggagaggccatggagcgggtgtatggaggctgcctgtgctacggcccccccattgaaaatggcttctactatgacatgtacctggaggagggcggcgtgagcagcaatgacttcagcagcctggaggccctgtgcaagaagatcatcaaggagaagcaggcctttgagcggctggaggtgaagaaggagaccctgctggccatgttcaagtacaacaagttcaagtgccgcatcctgaatgagaaggtgaacacccccaccaccaccgtgtaccgctgtggccccctgattgacctgtgccggggcccccacgtgcgccacacaggcaagatcaaggccctgaagatccacaagaacagcagcacctactgggagggcaaggctgacatggagaccctgcagaggatctacggcatctccttcccagaccccaagatgctgaaggagtgggagaagttccaggaggaggccaagaacagagaccacaggaagattggccgggaccaggagctgtacttcttccacgagctgagccctggcagctgcttcttcctgcccaagggggcctacatctacaatgccctgattgagttcatccgctctgagtacaggaagaggggcttccaggaggtggtgacccccaacatcttcaacagccggctgtggatgaccagcggccactggcagcactacagcgagaacatgttctcctttgaggtggagaaggagctgtttgccctgaagcccatgaactgccccggccactgcctgatgtttgaccaccggcccaggtcctggagggagctgcccctgcggctggccgactttggagtgctgcacagaaatgagctgagcggggccctgaccggcctgaccagggtgcggcgcttccagcaggatgatgcccacatcttctgtgccatggagcagattgaagatgagatcaagggctgcctggacttcctgaggacagtgtacagcgtgtttggcttctccttcaagctgaacctgagcaccaggcctgagaagttcctgggggacatcgaggtgtgggaccaggccgagaagcagctggagaacagcctgaatgaatttggagagaagtgggagctgaacagcggagatggagccttctacggccccaagattgacatccagatcaaggatgccatcggccgctaccaccagtgtgccaccatccagctggacttccagctgcccatccgcttcaacctgacctacgtgtcccatgatggagatgacaagaagaggcctgtgattgtgcaccgggccatcctgggctctgtggagaggatgattgccatcctgacagaaaattatggaggcaagtggcccttctggctgagcccccggcaggtgatggtggtgcctgtgggccccacctgtgatgaatatgcccagaaggtgcggcagcagttccatgatgccaagttcatggctgacatcgacctggaccccggctgcaccctgaacaagaagatcagaaatgcccagctggcccagtacaacttcatcctggtggtgggggagaaggagaagatcagcggcaccgtgaacatccgcacccgggacaacaaggtgcatggagagaggaccatcagcgagaccatcgagcggctgcagcagctgaaggagttccgcagcaagcaggccgaggaggagttctag

SEQ ID NO: 93309 - DNA, 2271 bp, Artificial Sequence
  derived and/or modified sequence
atgttcgaggagaaggccagcagccccagcggcaagatgggcggcgaagaaaagccaattggcgccggcgaagagaaacagaaagagggaggaaagaaaaagaacaaagagggttccggcgatgggggacgtgccgaacttaatccctggcctgagtatatatatacaagactagagatgtacaacattctgaaagcggagcacgacagcattctggcagagaaagctgagaaggacagtaaacccattaaggtgaccctccccgatggcaaacaagtcgacgccgagtcctggaagaccactccatatcagatcgcttgtggaatctcgcacaccgcctcttgcaagaacctgtctagtctcgcatctctgctggcttccgtcgcgattccatccagtggaatgccgtggccccccctgttttttctgcaagggctcgctgataacacggttattgctaaggtcaacaacgtggtctgggacctcgatcgccctttggaagaggactgtaccctggagttactgaagtttgaagatgaagaggcccaggccgtgtattggcacagttctgcccatattatgggcgaagccatggaacgggtgtacgggggctgcctatgttacggcccaccaattgagaatggtttttactacgatatgtacctggaggaaggaggtgtgagcagcaatgacttcagtagtctggaggctctttgcaaaaaaataattaaagaaaagcaagctttcgagcggctagaggttaagaaggagaccctcctcgctatgtttaaatacaacaagttcaagtgtcggatactgaatgaaaaagtgaatactcctaccactaccgtgtacagatgcggcccactcatcgatctttgccggggccctcatgtgcgacatacaggaaagattaaggctctaaaaattcacaaaaacagctctacgtactgggaaggtaaggccgatatggagactctacagaggatatatggcattagcttccccgaccccaagatgctgaaagaatgggaaaaattccaagaggaggcaaagaatcgggaccataggaagatcgggcgggaccaggagctgtactttttccatgaactttcccccgggtcgtgcttttttctgccaaaaggagcttatatttataacgcgctgatcgagttcattaggtccgaatatcgtaagagagggtttcaggaggttgtgaccccaaacattttcaattcccggctatggatgacaagtgggcattggcagcactattccgaaaacatgttctcatttgaagtcgaaaaagaacttttcgctctgaaacctatgaactgtccaggacattgtttaatgttcgatcatcgccctcgaagttggagggagcttccactgaggctcgccgacttcggtgtgctgcatcgcaatgaattgagcggtgcattaacaggcctcacaagggtgagacggttccagcaggacgacgctcatatattctgcgccatggaacagattgaggatgagattaagggatgcctagatttcctacgaaccgtgtatagcgtttttggtttctcgttcaagctgaatttgtccacgaggcccgagaaatttctaggcgatatagaagtttgggaccaggccgaaaagcagctcgagaacagcctgaatgagtttggggagaagtgggagttgaactcaggtgacggagcattttatgggccaaaaattgacatacagataaaggatgccattgggcggtaccatcaatgtgcgaccattcagctcgacttccagttgccaatacgctttaatttgacctacgtctctcacgacggggacgataaaaagagaccagtaatcgtgcatcgggccatcctgggaagcgttgagaggatgatcgccatactgactgagaactacggaggcaagtggccattctggctgtcaccacgccaggtgatggttgttcccgtgggtcctacatgcgatgagtatgcccaaaaagtgcggcagcaatttcacgatgctaagtttatggcagatatcgacttggatcctggttgtacgctcaataagaagatccgtaatgcacaactagctcaatacaactttatcctcgtggtgggcgaaaaggagaagatctctgggaccgtaaatatcagaaccagagacaacaaggtccacggggagcggacaatttccgaaacaatcgaaagattacagcagcttaaggaattccgaagcaagcaagccgaggaagagttttag

SEQ ID NO: 93310 - DNA, 2271 bp, Artificial Sequence
  derived and/or modified sequence
atgtttgaggaaaaagcgagtagtcctagcggcaagatgggcggagaggagaagcctattggtgcgggagaggagaagcagaaagaaggcggaaaaaagaagaacaaagaagggtcaggggacggcggtcgcgctgagctgaatccatggcccgagtatatttatactcgactggaaatgtataatatcctgaaagccgaacacgattccatccttgccgaaaaggcggagaaggacagtaagcctatcaaggtcaccttgccggatgggaaacaggtggatgccgaatcttggaagactacaccgtatcaaatagcttgcggaattagccacaccgcatcgtgtaaaaatctcagttctctcgcatctctgctggcatcggtggccattccctcgagtggtatgccatggcccccactcttcttcctgcaggggttggcagataacacggtgattgccaaggtgaataatgttgtctgggacttagacagaccacttgaggaagactgcaccctggaactgttaaagttcgaggatgaggaggctcaggcagtgtactggcactcatctgcacatatcatgggagaggccatggagagagtttacgggggatgcctgtgttacgggccacccatcgaaaatggattctactatgatatgtatttggaggaggggggagttagctccaatgacttctcatccctggaagcactctgcaagaaaataattaaggaaaagcaagccttcgagcgcctcgaagtgaagaaggagacattactcgctatgttcaagtacaataagttcaaatgccggatcctgaatgagaaggtgaacactccaactaccaccgtttaccggtgcggcccattgatagatctatgtagggggcctcatgtgagacacaccggtaagatcaaagctttgaagatacacaagaatagtagtacttactgggaaggtaaagcggacatggagaccctgcagaggatatatggcatctcttttcctgacccaaagatgcttaaggagtgggagaagttccaggaagaagctaaaaatcgcgatcaccggaagatcgggagagaccaggagctgtattttttccacgagctttcaccgggatcttgttttttcttgcctaagggcgcttacatctataatgccctcattgagtttatcaggagcgaataccggaagagggggttccaggaggtagtcacacctaatatcttcaatagcagactttggatgacttccggccactggcagcactatagcgagaatatgtttagcttcgaggtggagaaggagctgtttgccctcaagccaatgaattgtcccggacactgcttaatgtttgatcaccgaccgaggagttggcgcgagctgcccctgagactggcagattttggggtgttacacagaaacgaactttcgggggcattgaccggcctcactcgagtgaggcgctttcagcaggacgatgcgcatatcttttgtgctatggagcagatagaggatgaaatcaagggctgtctagatttcttgaggacagtctattccgtctttggattcagtttcaagctcaacctgtctacacgccctgagaagttcctgggggatattgaagtgtgggaccaggcagagaaacaacttgagaactccctgaatgagtttggggagaagtgggagctcaattccggggatggcgcattctatggccctaaaatcgacatacagataaaggatgccattggaagatatcaccagtgtgcaacgatacagttggactttcagctgcccattcgcttcaacctgacgtacgtgagccacgatggagatgacaaaaaacggccagtcatcgtacacagagcgatcctcggctctgtggagaggatgattgcgattctgacagagaattatgggggtaagtggcccttctggcttagccccagacaagttatggttgtgcctgttgggccaacttgcgacgagtacgcccagaaagtgaggcagcagtttcatgatgctaaatttatggctgatatcgacttggacccgggttgtacacttaacaagaagatccggaacgcccaacttgcgcaatacaatttcatactggtcgtaggagaaaaggaaaagattagcggtacggttaatattaggacacgagataacaaggttcacggagagagaaccatttctgaaacaatcgagcggctgcagcagcttaaggaattcaggtcgaagcaggccgaggaggaattctag

SEQ ID NO: 93311 - DNA, 2523 bp, Artificial Sequence
  derived and/or modified sequence
gattgcatcagctggtccagccgaggccaagtcccgggcgctagcccacctcccacccgcctcttggctcctctcctctaggccgtcgctttcgggttctctcatcgcttcgtcgttcgccaatgtttgaggagaaggccagcagtccttcagggaagatgggaggcgaggagaagccgattggtgctggtgaagagaagcaaaaggaaggaggcaaaaagaagaacaaagaaggatctggagatggaggtcgagctgagttgaatccttggcctgaatatatttacacacgtcttgagatgtataatatactaaaagcagaacatgattccattctggcagaaaaggcagaaaaagatagcaagccaattaaagtcactttgcctgatggtaaacaggttgatgcggaatcttggaaaactacaccatatcaaattgcctgtggaattagtcacacagcttcctgcaaaaacctctcttcacttgcatctctgcttgcatctgtggccattccctcatctggaatgccatggcctcctcttttcttccttcaaggcctggccgacaacaccgttattgctaaagtaaataatgttgtgtgggacctggaccgccctctggaagaagattgtaccttggagcttctcaagtttgaggatgaggaagctcaggcagtgtattggcactctagtgctcacataatgggtgaagccatggaaagagtctatggtggatgtttatgctacggtccgccaatagaaaatggattctattatgacatgtacctcgaagaagggggtgtgtctagcaatgatttctcttctctggaggctttgtgtaagaaaatcattaaagaaaaacaagcttttgaaagactggaagttaagaaagaaactttactggcaatgtttaagtacaacaagttcaaatgccggatattgaatgaaaaggtgaatactccaactaccacagtctatagatgtggccctttgatagatctctgccggggtcctcatgttagacacacgggcaaaattaaggctttaaaaatacacaaaaattcctccacgtactgggaaggcaaagcagatatggagactctccagagaatttatggcatttcattcccagatcctaaaatgttgaaagagtgggagaagttccaagaggaagctaaaaaccgagatcataggaaaattggcagggaccaagaactatatttctttcatgaactcagccctggaagttgcttttttctgccaaaaggagcctacatttataatgcacttattgaattcattaggagcgaatataggaaaagaggattccaggaggtagtcaccccaaacatcttcaacagccgactctggatgacctcgggccactggcagcactacagcgagaacatgttctcctttgaggtggagaaggagctgtttgccctgaaacccatgaactgcccaggacactgccttatgtttgatcatcggccaaggtcctggcgagaactgcctctgcggctagctgattttggggtacttcataggaacgagctgtctggagcactcacaggactcacccgggtacgaagattccaacaggatgatgctcacatattctgtgccatggagcagattgaagatgaaataaaaggttgtttggattttctacgtacggtatatagcgtatttggattttcttttaaactaaacctttctactcgcccggaaaaattccttggagatatcgaagtatgggatcaagctgagaaacaacttgaaaacagtctgaatgaatttggtgaaaagtgggagttaaactctggagatggagctttctatggcccaaagattgacatacagattaaagatgcgattgggcggtaccaccagtgtgcaaccatccagctggatttccagttgcccatcagatttaatcttacttatgtaagccatgatggtgatgataagaaaaggccagtgattgttcatcgagccatcttgggatcagtggaaagaatgattgctatcctcacagaaaactatgggggcaaatggcccttttggctgtcccctcgccaggtaatggtagttccagtgggaccaacctgtgatgaatatgcccaaaaggtacgacaacaattccacgatgccaaattcatggcagacattgatctggatccaggctgtacattgaataaaaagattcgaaatgcacagttagcacagtataacttcattttagttgttggtgaaaaagagaaaatcagtggcactgttaatatccgcacaagagacaataaggtccacggggaacgcaccatttctgaaactatcgagcggctacagcagctcaaagagttccgcagcaaacaggcagaagaagaattttaatgaaaaaattacccagattggctccatggaaaaggaggaacagcgtttccgtaaaattgactttgtactctgaaaacgtcaatttatattgaacttggaggagtttggcaaagtctgaataggtcaacct

SEQ ID NO: 93312 - protein, 174 aa, Artificial Sequence
  derived and/or modified sequence
MDKLNKITVPASQKLRQLQKMVHDIKNNEGGIMNKIKKLKVKAPPSVPRRDYASESPADEEEQWSDDFDSDYENPDEHSDSEMYVMPAEENADDSYEPPPVEQETRPVHPALPFARGEYIIFLCDLLKQQNNMPWAERKMVKSTLEVLLKSSGIINIVLWFLLTVRITQKIPPD

SEQ ID NO: 93313 - protein, 185 aa, Artificial Sequence
  derived and/or modified sequence
MDKLNKITVPASQKLRQLQKMVHDIKNNEGGIMNKIKKLKVKAPPSVPRRDYASESPADEEEQWSDDFDSDYENPDEHSDSEMYVMPAEENADDSYEPPPVEQETRPVHPALPFARGEYIDNRSSQRHSPPFSKTLPSKPSWPSEKYFGSVAEIIRNHQHSPLVLIDSQNNTKDSTRLKYAVKVS

SEQ ID NO: 93314 - protein, 404 aa, Artificial Sequence
  derived and/or modified sequence
MDKLNKITVPASQKLRQLQKMVHDIKNNEGGIMNKIKKLKVKAPPSVPRRDYASESPADEEEQWSDDFDSDYENPDEHSDSEMYVMPAEENADDSYEPPPVEQETRPVHPALPFARGEYIDNRSSQRHSPPFSKTLPSKPSWPSEKARLTSTLPALTALQKPQVPPKPKGLLEDEADYVVPVEDNDENYIHPTESSSPPPEKAPMVNRSTKPNSSTPASPPGTASGRNSGAWETKSPPPAAPSPLPRAGKKPTTPLKTTPVASQQNASSVCEEKPIPAERHRGSSHRQEAVQSPVFPPAQKQIHQKPIPLPRFTEGGNPTVDGPLPSFSSNSTISEQEAGVLCKPWYAGACDRKSAEEALHRSNKYFGSVAEIIRNHQHSPLVLIDSQNNTKDSTRLKYAVKVS

SEQ ID NO: 93315 - protein, 421 aa, Artificial Sequence
  derived and/or modified sequence
MDKLNKITVPASQKLRQLQKMVHDIKNNEGGIMNKIKKLKVKAPPSVPRRDYASESPADEEEQWSDDFDSDYENPDEHSDSEMYVMPAEENADDSYEPPPVEQETRPVHPALPFARGEYIDNRSSQRHSPPFSKTLPSKPSWPSEKARLTSTLPALTALQKPQVPPKPKGLLEDEADYVVPVEDNDENYIHPTESSSPPPEKAPMVNRSTKPNSSTPASPPGTASGRNSGAWETKSPPPAAPSPLPRAGKKPTTPLKTTPVASQQNASSVCEEKPIPAERHRGSSHRQEAVQSPVFPPAQKQIHQKPIPLPRFTEGGNPTVDGPLPSFSSNSTISEQEAGVLCKPWYAGACDRKSAEEALHRSNKDPQPPLPSKQWETRKLQYFGSVAEIIRNHQHSPLVLIDSQNNTKDSTRLKYAVKVS

SEQ ID NO: 93316 - DNA, 1215 bp, Artificial Sequence
  derived and/or modified sequence
atggataagctgaacaaaattacagtccctgctagccagaaattgcggcaactgcagaaaatggtccacgacatcaaaaataacgagggtggcatcatgaataagattaaaaaattgaaagttaaagcccctcctagcgtgcctcgcagagactacgctagcgaatctccggccgacgaggaggagcaatggtccgatgattttgacagtgactatgaaaaccccgatgaacactcagactcggagatgtacgttatgcctgctgaggaaaatgccgacgatagctatgagcccccccctgtggagcaggaaacgcgacccgtccaccccgccctgccttttgctaggggtgagtatattgacaacagatcttctcagagacatagtccaccattctccaaaactctcccttctaagcctagctggcccagtgagaaagcgagactgacttctaccttgccagcgctgacagctctccagaaaccccaggtgcctccaaaaccaaagggcctcctggaagacgaggctgattatgtggtgcctgtagaagacaacgatgagaattatatccatccgactgaaagtagtagcccaccacctgaaaaagccccaatggtaaacagaagtacaaaacctaactccagcacacctgcttcaccacccggaaccgcatcggggagaaattccggggcttgggagacaaaaagcccaccccctgccgcgccttcaccgcttccaagggcaggtaagaaacccacaacccctctgaagacaacacccgtagcatctcagcagaacgcctcgtccgtatgtgaggaaaaacccattcccgcggagcgtcacaggggcagtagtcaccgccaggaggcggtgcaaagccccgttttcccacccgcacagaaacagatccaccagaaaccaatccctttgcctcgctttacagaagggggtaacccaaccgttgatgggcccctgcctagcttcagttctaacagcacaattagcgagcaagaggccggagttctgtgcaagccatggtacgccggagcctgcgatcgtaagtctgccgaagaagctttgcatcgcagcaacaaatacttcggctcagtggccgagattattagaaatcaccagcacagtccattagttctcattgattcccaaaataatactaaggactccacacgcctgaagtacgcggtgaaggtttcttag

SEQ ID NO: 93317 - DNA, 1266 bp, Artificial Sequence
  derived and/or modified sequence
atggacaagcttaataaaataacggtgcctgcatcccagaagttgaggcagctgcagaaaatggtccatgacattaaaaacaatgaggggggcatcatgaataagatcaagaaactgaaagtcaaagcccctcctagtgtgccgcggcgggactacgcatcagagagccctgccgatgaagaagagcaatggtctgacgattttgactccgactatgaaaacccggatgaacactccgattccgagatgtatgtcatgccggcagaggagaatgccgacgattcttatgagcctccgccagtagagcaagagacaagaccagtgcatccggcgctgccttttgctcgcggcgaatatattgacaatagatcctcacagcggcactcaccccccttctccaaaacccttccctcaaagccatcatggcccagcgagaaggcaaggttaacatctacgctgcccgcactgactgccctacagaagccacaagtgcctcctaaacccaagggcctgcttgaagacgaagcggattacgtggtgccagtcgaagataatgacgagaactatattcatccaactgaatcaagtagcccgccacctgagaaggctcccatggtgaatcgcagtactaagccaaattcaagcacaccagcgtcaccacccggcaccgcatccggcaggaactccggcgcttgggaaactaagtctccacctcctgccgccccttctccattgcccagagccggaaagaaacccaccacaccactgaaaacgaccccggtggcgagtcagcagaatgcctcttctgtgtgtgaggagaagccgatcccagccgagagacaccggggatctagtcaccggcaggaggccgtgcagagtcccgtgtttccgccagcacagaagcaaatacatcaaaagcccattcccctgccccgctttacggagggggggaacccgacagtagacggccccctccctagttttagcagtaattcaacaattagtgaacaagaagctggagttctgtgtaaaccttggtatgcaggcgcttgcgaccggaaatccgcagaagaagcactccaccggagcaataaggatccccagcctcctctccccagcaagcaatgggaaacaaggaagctgcagtatttcgggtctgtggccgagataatccgcaaccaccagcactcccccttagtacttattgactctcagaataacaccaaagacagtacacgcctgaagtacgcggtgaaagtgtcctag

SEQ ID NO: 93318 - DNA, 1215 bp, Artificial Sequence
  derived and/or modified sequence
atggacaagctgaacaagatcaccgtgcctgccagccagaagctgcggcagctgcagaagatggtgcatgacatcaagaacaatgaaggaggcatcatgaacaagatcaagaagctgaaggtgaaggccccacccagcgtgccccggcgggactatgccagcgagagccctgcagatgaggaggagcagtggagcgatgactttgacagcgactatgaaaatccagatgagcacagcgacagcgagatgtatgtgatgcctgctgaggagaatgctgatgacagctatgagcccccacctgtggagcaggagaccaggcctgtgcacccagccctgccctttgcccggggggagtacatcgacaacagaagcagccagaggcacagcccccccttcagcaagaccctgcccagcaagcccagctggcccagcgagaaggcccggctgaccagcaccctgcctgccctgacagccctgcagaagccccaggtgccccccaagcccaagggcctgctggaggatgaggccgactatgtggtgcctgtggaggacaatgatgagaactacatccaccccacagagagcagcagccccccacctgagaaggcccccatggtgaacagaagcaccaagcccaacagcagcaccccagccagccccccaggcacagccagcggcagaaattctggggcctgggagaccaagagccccccacctgctgcccccagccccctgccccgggccggcaagaagcccaccacccccctgaagaccacccctgtggccagccagcagaatgccagctctgtgtgtgaggagaagcccatcccagctgagcggcaccggggcagcagccaccggcaggaggccgtgcagagccctgtgtttcctccagcccagaagcagatccaccagaagcccatccccctgccccgcttcacagagggcggcaaccccaccgtggatggccccctgcccagcttcagcagcaacagcaccatcagcgagcaggaggccggcgtgctgtgcaagccctggtacgccggggcctgtgacaggaagtctgctgaggaggccctgcacaggagcaacaagtactttggatctgtggccgagatcatccggaaccaccagcacagccccctggtgctgattgacagccagaacaacaccaaggacagcacccggctgaagtatgctgtgaaggtgtcctag

SEQ ID NO: 93319 - DNA, 1266 bp, Artificial Sequence
  derived and/or modified sequence
atggacaagctgaacaagatcaccgtgcctgccagccagaagctgcggcagctgcagaagatggtgcatgacatcaagaacaatgaaggaggcatcatgaacaagatcaagaagctgaaggtgaaggccccacccagcgtgccccggcgggactatgccagcgagagccctgcagatgaggaggagcagtggagcgatgactttgacagcgactatgaaaatccagatgagcacagcgacagcgagatgtatgtgatgcctgctgaggagaatgctgatgacagctatgagcccccacctgtggagcaggagaccaggcctgtgcacccagccctgccctttgcccggggggagtacatcgacaacagaagcagccagaggcacagcccccccttcagcaagaccctgcccagcaagcccagctggcccagcgagaaggcccggctgaccagcaccctgcctgccctgacagccctgcagaagccccaggtgccccccaagcccaagggcctgctggaggatgaggccgactatgtggtgcctgtggaggacaatgatgagaactacatccaccccacagagagcagcagccccccacctgagaaggcccccatggtgaacagaagcaccaagcccaacagcagcaccccagccagccccccaggcacagccagcggcagaaattctggggcctgggagaccaagagccccccacctgctgcccccagccccctgccccgggccggcaagaagcccaccacccccctgaagaccacccctgtggccagccagcagaatgccagctctgtgtgtgaggagaagcccatcccagctgagcggcaccggggcagcagccaccggcaggaggccgtgcagagccctgtgtttcctccagcccagaagcagatccaccagaagcccatccccctgccccgcttcacagagggcggcaaccccaccgtggatggccccctgcccagcttcagcagcaacagcaccatcagcgagcaggaggccggcgtgctgtgcaagccctggtacgccggggcctgtgacaggaagtctgctgaggaggccctgcacaggagcaacaaggacccccagccccccctgcccagcaagcagtgggagaccaggaagctgcagtacttcggctctgtggccgagatcatccggaaccaccagcacagccccctggtgctgattgacagccagaacaacaccaaggacagcacccggctgaagtatgctgtgaaggtgtcctag

SEQ ID NO: 93320 - DNA, 1215 bp, Artificial Sequence
  derived and/or modified sequence
atggacaagctgaacaagatcaccgtgcccgccagccagaagctgagacagttgcagaagatggttcatgacattaagaacaacgaaggaggaattatgaacaagattaaaaagctcaaggtgaaagctccaccttcagtgcctagacgtgactacgcatcagaatctccagccgatgaggaggagcagtggtcagacgacttcgactctgattacgaaaatcccgatgagcacagcgactccgaaatgtatgtgatgcccgcagaagagaatgctgatgatagctatgagcctccaccagtagaacaggagacgagacctgttcatcccgccctcccgttcgctaggggggagtacatcgataatcgatccagccagcgccattccccccccttctctaagactttgccaagcaaaccttcctggccgagcgaaaaggcacgacttacatccacgctgcctgccctcacggccttgcagaagcctcaggtcccacccaaacctaaaggcctgctggaggacgaggctgattatgttgtaccagtggaggataatgatgaaaattatatacatccgaccgagtcatcatcacctccccctgaaaaagcaccgatggttaacagatccactaagcccaactctagtacacctgcaagcccaccagggacagcatccggaaggaacagtggggcctgggagactaaatcccccccccctgctgcaccatcacctcttcccagagccggtaagaaacccactacccccttaaaaactactcccgtcgcctcacagcagaatgcttcatcagtgtgtgaggagaagcctatcccagccgagcgtcatagggggtcatcacacagacaggaagccgtgcaatcgccagtttttccacctgcccagaaacagatccaccagaaacctattcccctgcctcggttcaccgaaggcggaaaccccactgttgacggtccactcccatcattctcctccaactcaactatctccgaacaggaggccggcgttctctgcaaaccttggtatgctggtgcatgcgatcggaaaagcgctgaggaggctctacacaggagcaacaaatatttcggctccgtagctgagatcataaggaatcatcagcacagcccactggtgttgattgacagtcagaataacaccaaggatagcaccaggctgaaatacgctgttaaagtgagttag

SEQ ID NO: 93321 - DNA, 1266 bp, Artificial Sequence
  derived and/or modified sequence
atggacaagctgaacaagatcaccgtgcccgccagccagaagctgagacagctgcagaaaatggtccacgacattaagaataacgaaggaggaattatgaacaagatcaagaagctcaaggtcaaagctccaccgtcagtgccccgcagggattacgcaagcgagagtcctgctgatgaggaggagcagtggagtgacgactttgacagtgattacgagaatcccgatgagcacagcgattccgaaatgtacgtgatgcccgcagaagagaatgcggacgattcttacgaacctcctcctgtcgaacaagagacacggccggtgcatcctgctctcccatttgcacggggcgagtacatcgataatcgctccagccaaaggcacagccctcccttctccaagacactcccatcaaaacctagttggccatccgagaaagctcgcttgacgagcactctgcctgctttgaccgctctgcagaagccacaggttccaccaaaacctaaaggactgctggaagatgaggcagattacgtggttccggtggaagataatgatgagaattacatccatccgacagagtcttcttctccgcccccagaaaaggcccctatggtaaaccggtccacaaagccgaattcaagtacacctgcatctcctcctggcaccgccagcgggaggaactccggcgcttgggagaccaagtccccacctccagctgcacctagccccctgccgcgggcgggcaaaaagcccacaacgccgcttaagaccaccccagttgcttcccaacagaacgcaagctcagtttgtgaagagaagcctattcccgccgaacgtcatcgtggatctagtcatcgccaggaagccgtacagagtccagtatttcccccagcacagaaacagatccatcagaaacctatccctttgccccggtttaccgagggcggcaacccgactgtggacgggcccctgccaagcttctctagcaattctactatctctgagcaagaggcaggcgtactctgtaaaccctggtatgctggcgcttgtgatagaaaaagcgccgaggaggctctgcacagatcgaacaaggacccccaaccccccctgccaagcaagcagtgggagacacggaagctgcagtacttcgggtccgtcgctgaaataatacggaatcaccagcacagccctctggtgctcatcgatagccagaataacacaaaagattccactcgcctgaagtatgctgttaaggtttcctag

SEQ ID NO: 93322 - DNA, 1215 bp, Artificial Sequence
  derived and/or modified sequence
atggataaactgaacaagatcactgtgccagcctcgcagaagttgcggcagcttcagaaaatggtgcatgacattaaaaacaatgagggcggaataatgaataagattaagaaactcaaagtgaaagcccctccgtctgtgccgcgtcgcgactatgctagtgagtcccctgctgatgaggaggaacaatggtctgatgatttcgatagtgattacgagaaccccgacgaacatagcgattccgagatgtacgtaatgccggctgaggagaacgcagacgactcatatgaacctcctcccgtagagcaggagaccagacccgtgcatccagcactcccctttgctcgcggagagtacattgataaccgctcatctcagaggcacagtccaccgttctctaagaccctgccatcgaagccgagttggccttccgaaaaagccagactcacctccactctgccggctctcacggccctacagaagcctcaagtccccccaaaacctaaagggcttctcgaggatgaggccgactatgtcgtgcctgtagaggacaatgatgagaactacattcacccaaccgaatcgtccagcccccctcctgaaaaggcaccaatggtcaacagatccactaaacctaatagctccaccccagccagccccccaggtactgcctccggacggaattccggggcatgggaaaccaagagccctccccctgctgccccatctccgttgccaagagccggaaaaaaacccactactcctttgaagacaacccccgtcgcttctcagcaaaatgcttcttccgtgtgtgaggaaaaacctattcctgcagaacgccacaggggatcctcacaccgccaggaggcagtgcagtcccctgtcttccctccagcccagaagcaaatacaccagaaaccaatccccttgccccgtttcacagagggcggaaatcctactgtggatggtccgctcccttccttttcctcaaatagtacaatttccgaacaggaagcaggcgtcctctgcaagccctggtacgccggagcctgcgaccgcaagagcgcggaagaggctctgcacaggtctaacaagtatttcggttctgtggctgagattattcggaatcaccaacactctcccctggttctgatagatagccagaataacaccaaggattctacccgtcttaagtacgccgttaaggtgtcttag

SEQ ID NO: 93323 - DNA, 1266 bp, Artificial Sequence
  derived and/or modified sequence
atggataagctgaataaaatcacagtgccggctagccaaaaacttcgtcagctgcagaagatggtccacgatataaaaaataatgagggcggtatcatgaataaaatcaaaaaactgaaagtgaaggcccctccaagcgtgcctagaagagattatgcgtccgagtctcccgcagatgaagaagaacagtggtccgacgattttgacagtgattacgaaaaccctgatgagcattctgacagcgagatgtacgttatgcctgcggaagaaaacgccgacgatagctatgagcccccacccgtcgagcaggagactaggcctgtgcatcctgctttaccctttgccagaggggagtatattgataacaggtcgagtcaacgacactctccccctttttcaaaaaccttgcctagcaagccttcatggccttcggagaaagcccgactgaccagcacgctccccgctctcacagcactgcaaaaaccacaagttccaccaaaacctaaaggattactggaagatgaggctgattacgttgtgccggtcgaggataacgacgagaactacattcaccccacagagtccagttctcccccacccgaaaaagcccctatggtgaaccggagcacaaaacccaactcgtctacccccgcttcgccacccggaaccgcctctgggagaaattccggagcctgggaaaccaaatctcctcctccagcagccccatctccactcccgagagccggtaagaagccaacaacgcccctgaaaaccacccccgtggctagtcaacagaatgcatctagcgtctgtgaggagaagcctattcctgcagagcgtcaccgaggctcctcgcacagacaggaggccgtccagtctcctgttttcccccctgctcaaaaacaaatccaccaaaagccaatccctctcccacggttcacagagggcggaaacccgaccgtggacggtccattaccatcgttcagctcaaattcaacaatcagtgagcaggaagccggagttctatgtaagccctggtacgccggagcctgcgatagaaagagtgctgaggaagccctccatcggagcaacaaagacccccaacccccacttccttccaagcagtgggagactcgaaaactgcagtatttcgggagtgtagctgagatcatacggaaccaccagcactcacctcttgtcttgatagactcgcaaaataacacgaaggacagtacccgtttaaaatacgctgtaaaggtttcctag

SEQ ID NO: 93324 - DNA, 1659 bp, Artificial Sequence
  derived and/or modified sequence
aagttttacttctccctagagcaggggtgtttgccagcagcctgcactctcagaaatcagacttgagtggccggaacccttgagaccagaggcttaccatgctgctccctaggagggccaggaactgctgacgtgaccactggacagttattcgtgtctcttacaattaccaaacagaatggacaagcttaataaaataaccgtccccgccagtcagaagttgaggcagcttcaaaagatggtccatgatattaaaaacaatgaaggtggaataatgaataaaatcaaaaagctaaaagtcaaagcacctccaagtgttcctcgaagggactacgcttcagagagccctgctgacgaagaggagcagtggtccgatgactttgacagcgactatgaaaatccagatgagcactcggactcagagatgtacgtgatgcccgccgaggagaacgctgatgacagctacgagccgcctccagtagagcaggaaaccaggccggttcacccagccctgcccttcgccagaggcgagtatatagacaatcgatcaagccagaggcattccccacccttcagcaagacacttcccagtaagcccagctggccttcagagaaagcaaggctcacctccaccctgccggccctgactgctttgcagaaacctcaagtcccacccaaacccaaaggcctccttgaggatgaggctgattatgtggtccccgtggaagataatgatgaaaactatattcatcccacagaaagcagttcacctccacctgaaaaagctcccatggtgaatagatcaaccaagccaaattcctcaacgcccgcctctcctccaggaacagcttcaggtcgaaacagtggggcctgggaaaccaagtcacctccaccagctgcaccatccccgttgccacgggccgggaaaaaaccaacgacaccactgaagacaactccagttgcctctcaacagaatgcttcaagtgtttgtgaagaaaaacctatacctgctgaacgccaccgagggtcaagtcacagacaagaagctgtgcagtcaccagtgtttcctcctgcccagaaacaaatccaccaaaaacccatacctctgccaagatttacagaagggggaaacccaactgtggatgggcccctacccagcttttcatctaattccactatttcagaacaggaagctggcgttctctgcaagccatggtatgctggagcctgtgatcgaaagtctgctgaagaggcattgcacagatcaaacaagtactttggaagtgttgctgaaatcatcaggaatcatcaacatagtcctttggttcttattgacagtcagaataacacaaaagattccaccagactgaagtatgcagttaaagtttcataaagggggaaaaaaaagatcaataccattgcttcagacactttcccaaagtttctccttttgagaaaaagtcccaaaacttcatattttggattatgaatcatccagtaataaaatggaagatggagtcagctattgaagtggtcatccatttctttttaagaagctcatgtggacttgttctattgcctgacctgatgaactgttaatatctggtgaggttgagttatcatgctactaatattttccaaataaatatttttattttt

SEQ ID NO: 93325 - DNA, 1710 bp, Artificial Sequence
  derived and/or modified sequence
aagttttacttctccctagagcaggggtgtttgccagcagcctgcactctcagaaatcagacttgagtggccggaacccttgagaccagaggcttaccatgctgctccctaggagggccaggaactgctgacgtgaccactggacagttattcgtgtctcttacaattaccaaacagaatggacaagcttaataaaataaccgtccccgccagtcagaagttgaggcagcttcaaaagatggtccatgatattaaaaacaatgaaggtggaataatgaataaaatcaaaaagctaaaagtcaaagcacctccaagtgttcctcgaagggactacgcttcagagagccctgctgacgaagaggagcagtggtccgatgactttgacagcgactatgaaaatccagatgagcactcggactcagagatgtacgtgatgcccgccgaggagaacgctgatgacagctacgagccgcctccagtagagcaggaaaccaggccggttcacccagccctgcccttcgccagaggcgagtatatagacaatcgatcaagccagaggcattccccacccttcagcaagacacttcccagtaagcccagctggccttcagagaaagcaaggctcacctccaccctgccggccctgactgctttgcagaaacctcaagtcccacccaaacccaaaggcctccttgaggatgaggctgattatgtggtccccgtggaagataatgatgaaaactatattcatcccacagaaagcagttcacctccacctgaaaaagctcccatggtgaatagatcaaccaagccaaattcctcaacgcccgcctctcctccaggaacagcttcaggtcgaaacagtggggcctgggaaaccaagtcacctccaccagctgcaccatccccgttgccacgggccgggaaaaaaccaacgacaccactgaagacaactccagttgcctctcaacagaatgcttcaagtgtttgtgaagaaaaacctatacctgctgaacgccaccgagggtcaagtcacagacaagaagctgtgcagtcaccagtgtttcctcctgcccagaaacaaatccaccaaaaacccatacctctgccaagatttacagaagggggaaacccaactgtggatgggcccctacccagcttttcatctaattccactatttcagaacaggaagctggcgttctctgcaagccatggtatgctggagcctgtgatcgaaagtctgctgaagaggcattgcacagatcaaacaaggacccacagcctccactgccctccaaacagtgggagacgagaaagctccagtactttggaagtgttgctgaaatcatcaggaatcatcaacatagtcctttggttcttattgacagtcagaataacacaaaagattccaccagactgaagtatgcagttaaagtttcataaagggggaaaaaaaagatcaataccattgcttcagacactttcccaaagtttctccttttgagaaaaagtcccaaaacttcatattttggattatgaatcatccagtaataaaatggaagatggagtcagctattgaagtggtcatccatttctttttaagaagctcatgtggacttgttctattgcctgacctgatgaactgttaatatctggtgaggttgagttatcatgctactaatattttccaaataaatatttttattttt

SEQ ID NO: 93326 - DNA, 1215 bp, Artificial Sequence
  derived and/or modified sequence
atggacaagctgaacaagatcaccgtgcccgccagccagaagctgagacagctgcagaagatggtgcacgacatcaagaacaacgagggcggcatcatgaacaagatcaagaagctgaaggtgaaggccccccccagcgtgcccagaagagactacgccagcgagagccccgccgacgaggaggagcagtggagcgacgacttcgacagcgactacgagaaccccgacgagcacagcgacagcgagatgtacgtgatgcccgccgaggagaacgccgacgacagctacgagcccccccccgtggagcaggagaccagacccgtgcaccccgccctgcccttcgccagaggcgagtacatcgacaacagaagcagccagagacacagcccccccttcagcaagaccctgcccagcaagcccagctggcccagcgagaaggccagactgaccagcaccctgcccgccctgaccgccctgcagaagccccaggtgccccccaagcccaagggcctgctggaggacgaggccgactacgtggtgcccgtggaggacaacgacgagaactacatccaccccaccgagagcagcagccccccccccgagaaggcccccatggtgaacagaagcaccaagcccaacagcagcacccccgccagcccccccggcaccgccagcggcagaaacagcggcgcctgggagaccaagagccccccccccgccgcccccagccccctgcccagagccggcaagaagcccaccacccccctgaagaccacccccgtggccagccagcagaacgccagcagcgtgtgcgaggagaagcccatccccgccgagagacacagaggcagcagccacagacaggaggccgtgcagagccccgtgttcccccccgcccagaagcagatccaccagaagcccatccccctgcccagattcaccgagggcggcaaccccaccgtggacggccccctgcccagcttcagcagcaacagcaccatcagcgagcaggaggccggcgtgctgtgcaagccctggtacgccggcgcctgcgacagaaagagcgccgaggaggccctgcacagaagcaacaagtacttcggcagcgtggccgagatcatcagaaaccaccagcacagccccctggtgctgatcgacagccagaacaacaccaaggacagcaccagactgaagtacgccgtgaaggtgagctag

SEQ ID NO: 93327 - DNA, 1266 bp, Artificial Sequence
  derived and/or modified sequence
atggacaagctgaacaagatcaccgtgcccgccagccagaagctgagacagctgcagaagatggtgcacgacatcaagaacaacgagggcggcatcatgaacaagatcaagaagctgaaggtgaaggccccccccagcgtgcccagaagagactacgccagcgagagccccgccgacgaggaggagcagtggagcgacgacttcgacagcgactacgagaaccccgacgagcacagcgacagcgagatgtacgtgatgcccgccgaggagaacgccgacgacagctacgagcccccccccgtggagcaggagaccagacccgtgcaccccgccctgcccttcgccagaggcgagtacatcgacaacagaagcagccagagacacagcccccccttcagcaagaccctgcccagcaagcccagctggcccagcgagaaggccagactgaccagcaccctgcccgccctgaccgccctgcagaagccccaggtgccccccaagcccaagggcctgctggaggacgaggccgactacgtggtgcccgtggaggacaacgacgagaactacatccaccccaccgagagcagcagccccccccccgagaaggcccccatggtgaacagaagcaccaagcccaacagcagcacccccgccagcccccccggcaccgccagcggcagaaacagcggcgcctgggagaccaagagccccccccccgccgcccccagccccctgcccagagccggcaagaagcccaccacccccctgaagaccacccccgtggccagccagcagaacgccagcagcgtgtgcgaggagaagcccatccccgccgagagacacagaggcagcagccacagacaggaggccgtgcagagccccgtgttcccccccgcccagaagcagatccaccagaagcccatccccctgcccagattcaccgagggcggcaaccccaccgtggacggccccctgcccagcttcagcagcaacagcaccatcagcgagcaggaggccggcgtgctgtgcaagccctggtacgccggcgcctgcgacagaaagagcgccgaggaggccctgcacagaagcaacaaggacccccagccccccctgcccagcaagcagtgggagaccagaaagctgcagtacttcggcagcgtggccgagatcatcagaaaccaccagcacagccccctggtgctgatcgacagccagaacaacaccaaggacagcaccagactgaagtacgccgtgaaggtgagctag

SEQ ID NO: 93328 - DNA, 525 bp, Artificial Sequence
  derived and/or modified sequence
atggataagctcaataagataaccgtgcctgcatctcagaaattgcgacagctccagaaaatggttcacgacattaaaaacaacgaaggcggcatcatgaacaagattaaaaagctgaaagtcaaggcccccccctcagtcccacggcgtgattatgcttctgagtcccctgccgacgaggaagagcagtggagcgacgatttcgactcggactacgagaacccagatgagcattctgatagtgagatgtacgtgatgcctgctgaagaaaacgccgacgactcatatgaacccccccctgttgaacaagagacacgcccggtacatccggctttacccttcgccaggggcgaatacatcattttcctctgtgacctgttgaagcagcagaataacatgccttgggctgagcgaaagatggttaaaagcactctggaggtgctgctgaagtctagcggaattatcaacattgtcctgtggttccttcttacagtcagaataacacagaaaatcccacccgactag

SEQ ID NO: 93329 - DNA, 558 bp, Artificial Sequence
  derived and/or modified sequence
atggataagctcaacaagattaccgtgccggcaagtcagaagctgcgccagctgcaaaagatggtgcatgatatcaagaacaacgaaggagggatcatgaacaaaattaagaaactgaaagtgaaggccccaccctccgtgccgcggagggattacgcaagcgagagccccgcggatgaagaagaacaatggtccgacgatttcgacagtgactacgagaatccggatgagcactctgattctgaaatgtatgtgatgcccgcagaggaaaacgcagacgacagttacgaacctcctcctgtggagcaagagacccggcctgttcacccagctctaccattcgcacgtggagagtacatcgacaacaggagctcacagcgccacagcccacccttttcgaagacgttgccaagcaagcctagctggccctctgaaaagtacttcgggagtgttgccgagattataaggaaccaccagcattccccattagtgctgattgactcccagaacaacactaaggactcaacacgcttgaagtatgccgtcaaggtaagctag

SEQ ID NO: 93330 - DNA, 630 bp, Artificial Sequence
  derived and/or modified sequence
atggataagctcaataaaatcactgttcctgctagccagaaactgaggcagctccagaagatggttcatgacataaagaataacgagggggggatcatgaataaaatcaagaaactgaaggtcaaggcgccacctagcgtgcctcggagggactacgctagtgagagcccagcagatgaggaagaacaatggtccgatgactttgatagtgattatgagaaccccgacgagcactctgatagcgagatgtacgtaatgcccgccgaggagaatgctgatgactcctatgaaccacccccggtagagcaggagacacgaccagtacacccggctcttccatttgcccggggcgagtacattgacaacagaagcagccagcggcattcaccacccttctccaagactctcccctctaagccctcctggccgagcgagaaagcacgcctgaccagcacactgccagctttgacggctctccagaagccacaggtgccacccaagcccaaagggctacttgaggacgaggcagattacgtggtgccagttgaagataacgacgagaactacatacatccaacggagagttcctctcccccgcccgagaaaggtaaaaatcagcggcaccattag

SEQ ID NO: 93331 - DNA, 525 bp, Artificial Sequence
  derived and/or modified sequence
atggacaagctgaacaagatcaccgtgcctgccagccagaagctgcggcagctgcagaagatggtgcatgacatcaagaacaatgaaggaggcatcatgaacaagatcaagaagctgaaggtgaaggccccacccagcgtgccccggcgggactatgccagcgagagccctgcagatgaggaggagcagtggagcgatgactttgacagcgactatgaaaatccagatgagcacagcgacagcgagatgtatgtgatgcctgctgaggagaatgctgatgacagctatgagcccccacctgtggagcaggagaccaggcctgtgcacccagccctgccctttgcccggggggagtacatcatcttcctgtgtgacctgctgaagcagcagaacaacatgccctgggccgagaggaagatggtgaagagcaccctggaggtgctgctgaagagcagcggcatcatcaacatcgtgctgtggttcctgctgactgtgcgcatcacccagaagatccccccagactag

SEQ ID NO: 93332 - DNA, 558 bp, Artificial Sequence
  derived and/or modified sequence
atggacaagctgaacaagatcaccgtgcctgccagccagaagctgcggcagctgcagaagatggtgcatgacatcaagaacaatgaaggaggcatcatgaacaagatcaagaagctgaaggtgaaggccccacccagcgtgccccggcgggactatgccagcgagagccctgcagatgaggaggagcagtggagcgatgactttgacagcgactatgaaaatccagatgagcacagcgacagcgagatgtatgtgatgcctgctgaggagaatgctgatgacagctatgagcccccacctgtggagcaggagaccaggcctgtgcacccagccctgccctttgcccggggggagtacatcgacaacagaagcagccagaggcacagcccccccttcagcaagaccctgcccagcaagcccagctggcccagcgagaagtacttcggctctgtggccgagatcatccggaaccaccagcacagccccctggtgctgattgacagccagaacaacaccaaggacagcacccggctgaagtatgctgtgaaggtgtcctag

SEQ ID NO: 93333 - DNA, 630 bp, Artificial Sequence
  derived and/or modified sequence
atggacaagctgaacaagatcaccgtgcctgccagccagaagctgcggcagctgcagaagatggtgcatgacatcaagaacaatgaaggaggcatcatgaacaagatcaagaagctgaaggtgaaggccccacccagcgtgccccggcgggactatgccagcgagagccctgcagatgaggaggagcagtggagcgatgactttgacagcgactatgaaaatccagatgagcacagcgacagcgagatgtatgtgatgcctgctgaggagaatgctgatgacagctatgagcccccacctgtggagcaggagaccaggcctgtgcacccagccctgccctttgcccggggggagtacatcgacaacagaagcagccagaggcacagcccccccttcagcaagaccctgcccagcaagcccagctggcccagcgagaaggcccggctgaccagcaccctgcctgccctgacagccctgcagaagccccaggtgccccccaagcccaagggcctgctggaggatgaggccgactatgtggtgcctgtggaggacaatgatgagaactacatccaccccacagagagcagcagccccccacctgagaagggcaagaaccagaggcaccactag

SEQ ID NO: 93334 - DNA, 525 bp, Artificial Sequence
  derived and/or modified sequence
atggacaagctgaacaagatcaccgtgcccgccagccagaagctgcgacaattacagaagatggttcacgatattaaaaataacgaaggcggtataatgaacaaaattaagaaactgaaggtaaaggcaccaccaagcgtaccaaggagagactacgcatccgagagcccagcagacgaggaagagcagtggtcagacgactttgattcagattacgagaatcctgacgagcacagtgactctgaaatgtatgttatgcctgcagaggaaaatgctgatgactcatatgagccccctcctgtggagcaagagacccgtccagtccatcccgcactcccgttcgcccgtggtgaatatatcatcttcctgtgcgatttactgaagcagcagaataacatgccctgggctgagcgaaaaatggtgaagtccactctcgaggtgctcctgaaatctagcggtattataaacattgtgctctggtttctgcttacagttcgtatcacccagaagattccccccgactag

SEQ ID NO: 93335 - DNA, 558 bp, Artificial Sequence
  derived and/or modified sequence
atggacaagctgaacaagatcaccgtgcccgccagccagaagctgaggcaactacagaaaatggtgcatgatatcaaaaacaacgaggggggcatcatgaacaagatcaaaaagctgaaggtgaaggcacctccatctgtgcctcgaagagactacgcctctgaatcccctgcggacgaggaagagcagtggagcgacgatttcgacagcgattatgagaatccagacgaacactccgacagtgagatgtacgttatgcccgctgaagagaacgctgatgattcttatgagccccccccggtcgagcaggaaacgagaccagtgcaccccgctctgccttttgccaggggggaatacattgacaaccgcagcagccagcggcatagccctcctttttcaaagacactgccctctaagcccagttggccttcagaaaagtattttggatcagtcgccgaaattatacggaaccatcagcatagcccccttgtactcattgactcgcaaaataacacaaaggattcaacccggctgaagtacgccgttaaggtgtcctag

SEQ ID NO: 93336 - DNA, 630 bp, Artificial Sequence
  derived and/or modified sequence
atggacaagctgaacaagatcaccgtgcccgccagccagaagctgcggcagctacagaagatggtgcacgatattaaaaacaacgagggcgggattatgaataagattaagaaattgaaggtaaaagccccgccttcagttccacggcgggattacgcgagtgagtctcctgccgatgaggaagagcagtggtcagatgacttcgattccgattacgaaaatcccgatgagcattccgattcagagatgtacgttatgcccgcggaggagaatgcagacgacagttatgagcccccaccagtggaacaggagaccaggcctgtacaccccgctcttccctttgctcggggggagtacattgataatagaagctctcagaggcactctccacccttctccaagaccctgcccagcaagcccagctggccgtccgaaaaagcgagactgacgtcaaccctgcccgctttgaccgctttgcaaaagccccaggtaccacctaaacctaaaggactgctggaggacgaagccgactacgtggtgcctgtagaggacaacgacgagaactacatccaccccaccgagtctagtagccccccacctgaaaagggtaagaatcaacgccatcattag

SEQ ID NO: 93337 - DNA, 575 bp, Artificial Sequence
  derived and/or modified sequence
gcgcccgcggcccgggatcccgagtgtccggagctccgtggtttctgttggacctcgcgggaggcggttttctcccgcctgctgtgctctgtgacctctctgctgcctcctccacggtctctgggcggagcaatccacactgctgagcctggggtggtttggaattcttcggcgaagtggagcgggctgagagtgggtttcccgtccccgagccctccctcatctcggagatgccgcacttgtgagcgacagggcttcatttgaattttcgcacctcgcgagttgcggagcctgcatctctgaagctgcctcggtgaagagccacagcattattttttttctctttgggagagtagctgtctgggatttgagatcctatcttccctgcaaattaccagttacattggttatgaattagccgcagacatggacatcgtttagaaagaagttatgtaatctttaaaaagaagattacctatatcccacaatagtgtgatttttgttgcaagaaaatactgggtctgttaaagaagaaatttaggttcttcaccaaaggacatggatgaaaatgaaag

SEQ ID NO: 93338 - DNA, 525 bp, Artificial Sequence
  derived and/or modified sequence
atggacaagttgaataagatcaccgtcccagcatcccagaaactccgacagctgcagaagatggtgcacgatattaaaaacaatgagggtggcattatgaacaagatcaagaagctcaaggttaaggcccctcctagcgtgccacgcagagactatgctagcgagtctcctgccgacgaagaggagcaatggtcggatgacttcgattcggactacgagaacccagatgagcactctgattcagagatgtatgtgatgcctgccgaggagaatgccgatgattcctacgaacccccacccgtggaacaggaaacaaggccagtccaccctgctctgccttttgctcgcggtgagtacattatcttcttatgcgacctgctcaaacaacagaataacatgccctgggcggaaaggaagatggtgaaaagcaccctggaggtgctacttaagtcttccggcattatcaacatcgttctgtggttcctgcttacagtacgaattactcagaagatccccccagattag

SEQ ID NO: 93339 - DNA, 558 bp, Artificial Sequence
  derived and/or modified sequence
atggacaaattaaataaaattaccgtaccagcttctcaaaagctgaggcagctgcagaaaatggtgcacgatatcaagaataatgagggcggtattatgaacaaaattaagaagttgaaggttaaagcacctccatccgttcccagacgagactacgccagcgaatcacccgcagatgaggaagaacagtggagtgacgattttgactccgattacgaaaaccccgacgagcatagtgattccgagatgtatgtcatgcccgctgaagaaaacgccgacgatagctacgaaccgcctcctgtggagcaagagacccgtccagtccatccagctctcccctttgcaagaggcgagtatatagacaatagatctagtcagaggcactcccctcctttcagcaaaactttgccatctaaaccatcttggccatccgagaagtacttcggttcagttgccgaaattatccggaaccaccagcattcacctctcgtcctgatcgatagtcagaataataccaaagattcaaccagactaaagtacgcagtgaaggtctcttag

SEQ ID NO: 93340 - DNA, 630 bp, Artificial Sequence
  derived and/or modified sequence
atggataaattgaataagatcactgtgccagcctctcagaaactgcgccaactccagaagatggttcacgacatcaagaataatgaggggggaatcatgaacaaaatcaaaaaactgaaggtgaaggctcccccttccgtgccacgtagagactatgcgagcgaaagccctgccgacgaggaggagcaatggagcgatgatttcgattccgattacgagaaccctgacgaacactctgacagtgagatgtacgtcatgccggcagaagaaaacgccgatgactcctatgaacccccacccgtcgagcaggagacgcgccctgtccacccagccctgccctttgcacgcggtgagtatattgataataggagttctcagcggcactctccccctttctcaaagacattgccaagtaagccgtcgtggccctccgagaaggcacgtctgacctccaccctgcccgcactgactgctctgcagaaacctcaggtgccaccgaagcccaaaggactgctcgaggacgaagccgattacgtcgtgccagtcgaagacaatgatgaaaactatattcaccccaccgaaagctctagccctccacccgaaaagggtaaaaatcagagacaccattag

SEQ ID NO: 93341 - DNA, 992 bp, Artificial Sequence
  derived and/or modified sequence
aagttttacttctccctagagcaggggtgtttgccagcagcctgcactctcagaaatcagacttgagtggccggaacccttgagaccagaggcttaccatgctgctccctaggagggccaggaactgctgacgtgaccactggacagttattcgtgtctcttacaattaccaaacagaatggacaagcttaataaaataaccgtccccgccagtcagaagttgaggcagcttcaaaagatggtccatgatattaaaaacaatgaaggtggaataatgaataaaatcaaaaagctaaaagtcaaagcacctccaagtgttcctcgaagggactacgcttcagagagccctgctgacgaagaggagcagtggtccgatgactttgacagcgactatgaaaatccagatgagcactcggactcagagatgtacgtgatgcccgccgaggagaacgctgatgacagctacgagccgcctccagtagagcaggaaaccaggccggttcacccagccctgcccttcgccagaggcgagtatataatattcctgtgcgatttattgaagcaacaaaacaatatgccttgggcagaaagaaaaatggtgaagagtactttggaagtgttgctgaaatcatcaggaatcatcaacatagtcctttggttcttattgacagtcagaataacacaaaagattccaccagactgaagtatgcagttaaagtttcataaagggggaaaaaaaagatcaataccattgcttcagacactttcccaaagtttctccttttgagaaaaagtcccaaaacttcatattttggattatgaatcatccagtaataaaatggaagatggagtcagctattgaagtggtcatccatttctttttaagaagctcatgtggacttgttctattgcctgacctgatgaactgttaatatctggtgaggttgagttatcatgctactaatattttccaaataaatatttttattttt

SEQ ID NO: 93342 - DNA, 1002 bp, Artificial Sequence
  derived and/or modified sequence
aagttttacttctccctagagcaggggtgtttgccagcagcctgcactctcagaaatcagacttgagtggccggaacccttgagaccagaggcttaccatgctgctccctaggagggccaggaactgctgacgtgaccactggacagttattcgtgtctcttacaattaccaaacagaatggacaagcttaataaaataaccgtccccgccagtcagaagttgaggcagcttcaaaagatggtccatgatattaaaaacaatgaaggtggaataatgaataaaatcaaaaagctaaaagtcaaagcacctccaagtgttcctcgaagggactacgcttcagagagccctgctgacgaagaggagcagtggtccgatgactttgacagcgactatgaaaatccagatgagcactcggactcagagatgtacgtgatgcccgccgaggagaacgctgatgacagctacgagccgcctccagtagagcaggaaaccaggccggttcacccagccctgcccttcgccagaggcgagtatatagacaatcgatcaagccagaggcattccccacccttcagcaagacacttcccagtaagcccagctggccttcagagaaatactttggaagtgttgctgaaatcatcaggaatcatcaacatagtcctttggttcttattgacagtcagaataacacaaaagattccaccagactgaagtatgcagttaaagtttcataaagggggaaaaaaaagatcaataccattgcttcagacactttcccaaagtttctccttttgagaaaaagtcccaaaacttcatattttggattatgaatcatccagtaataaaatggaagatggagtcagctattgaagtggtcatccatttctttttaagaagctcatgtggacttgttctattgcctgacctgatgaactgttaatatctggtgaggttgagttatcatgctactaatattttccaaataaatatttttattttt

SEQ ID NO: 93343 - DNA, 525 bp, Artificial Sequence
  derived and/or modified sequence
atggacaagctgaacaagatcaccgtgcccgccagccagaagctgagacagctgcagaagatggtgcacgacatcaagaacaacgagggcggcatcatgaacaagatcaagaagctgaaggtgaaggccccccccagcgtgcccagaagagactacgccagcgagagccccgccgacgaggaggagcagtggagcgacgacttcgacagcgactacgagaaccccgacgagcacagcgacagcgagatgtacgtgatgcccgccgaggagaacgccgacgacagctacgagcccccccccgtggagcaggagaccagacccgtgcaccccgccctgcccttcgccagaggcgagtacatcatcttcctgtgcgacctgctgaagcagcagaacaacatgccctgggccgagagaaagatggtgaagagcaccctggaggtgctgctgaagagcagcggcatcatcaacatcgtgctgtggttcctgctgaccgtgagaatcacccagaagatcccccccgactag

SEQ ID NO: 93344 - DNA, 558 bp, Artificial Sequence
  derived and/or modified sequence
atggacaagctgaacaagatcaccgtgcccgccagccagaagctgagacagctgcagaagatggtgcacgacatcaagaacaacgagggcggcatcatgaacaagatcaagaagctgaaggtgaaggccccccccagcgtgcccagaagagactacgccagcgagagccccgccgacgaggaggagcagtggagcgacgacttcgacagcgactacgagaaccccgacgagcacagcgacagcgagatgtacgtgatgcccgccgaggagaacgccgacgacagctacgagcccccccccgtggagcaggagaccagacccgtgcaccccgccctgcccttcgccagaggcgagtacatcgacaacagaagcagccagagacacagcccccccttcagcaagaccctgcccagcaagcccagctggcccagcgagaagtacttcggcagcgtggccgagatcatcagaaaccaccagcacagccccctggtgctgatcgacagccagaacaacaccaaggacagcaccagactgaagtacgccgtgaaggtgagctag

SEQ ID NO: 93345 - DNA, 630 bp, Artificial Sequence
  derived and/or modified sequence
atggacaagctgaacaagatcaccgtgcccgccagccagaagctgagacagctgcagaagatggtgcacgacatcaagaacaacgagggcggcatcatgaacaagatcaagaagctgaaggtgaaggccccccccagcgtgcccagaagagactacgccagcgagagccccgccgacgaggaggagcagtggagcgacgacttcgacagcgactacgagaaccccgacgagcacagcgacagcgagatgtacgtgatgcccgccgaggagaacgccgacgacagctacgagcccccccccgtggagcaggagaccagacccgtgcaccccgccctgcccttcgccagaggcgagtacatcgacaacagaagcagccagagacacagcccccccttcagcaagaccctgcccagcaagcccagctggcccagcgagaaggccagactgaccagcaccctgcccgccctgaccgccctgcagaagccccaggtgccccccaagcccaagggcctgctggaggacgaggccgactacgtggtgcccgtggaggacaacgacgagaactacatccaccccaccgagagcagcagccccccccccgagaagggcaagaaccagagacaccactag

SEQ ID NO: 93346 - protein, 299 aa, Artificial Sequence
  derived and/or modified sequence
MDKLNKITVPASQKLRQLQKMVHDIKNNEGGIMNKIKKLKVKAPPSVPRRDYASESPADEEEQWSDDFDSDYENPDEHSDSEMYVMPAEENADDSYEPPPVEQETRPVHPALPFARGEYIGRNSGAWETKSPPPAAPSPLPRAGKKPTTPLKTTPVASQQNASSVCEEKPIPAERHRGSSHRQEAVQSPVFPPAQKQIHQKPIPLPRFTEGGNPTVDGPLPSFSSNSTISEQEAGVLCKPWYAGACDRKSAEEALHRSNKYFGSVAEIIRNHQHSPLVLIDSQNNTKDSTRLKYAVKVS

SEQ ID NO: 93347 - DNA, 204 bp, Artificial Sequence
  derived and/or modified sequence
ctcgactcgtattcatgtctgctgcagctgccgaatcgtatggataagctcaataaaataacagtcccagctagccagaagcttcggcagctgcagaagatggttcacgacataaagaataatgaaggcggcatcatgaacaagatcaagaaaacagccaccatgaagattcagatgagcactcgaactcaacgctgtacctag

SEQ ID NO: 93348 - DNA, 900 bp, Artificial Sequence
  derived and/or modified sequence
atggataagttgaacaaaataactgtgccagcttctcaaaagttacggcagctccaaaaaatggtccatgatataaaaaacaatgagggcggcattatgaataagataaagaagctgaaagtgaaggccccgccatctgtgccgaggcgcgattacgccagtgagtcaccggccgacgaggaggagcagtggagtgatgacttcgactccgattatgagaaccccgacgagcatagcgatagcgaaatgtatgtcatgccagccgaggagaatgcagacgattcatatgaacccccccccgtcgagcaggagacacgccctgtacatccggctctgccgtttgcaagaggagagtacatcggcagaaacagcggggcctgggagactaaatcccctccaccagcagcgccttcgccactcccgcgggccggtaaaaagccaactacacccctcaagactaccccggttgcctcccagcaaaatgcttcatcggtgtgcgaagaaaaaccaattccagccgagagacatcggggctcctcccatcggcaagaggccgtgcaaagcccagtgtttccccccgcacagaaacagatccatcagaaaccaatacctttacctagattcaccgaaggcggcaacccgactgtggatgggccactcccctccttctcctccaattctacgatctctgagcaggaggccggagttctgtgcaaaccatggtacgccggggcatgtgatcggaaatcagccgaggaggccctgcataggtcaaacaagtacttcggctctgtagccgagatcattagaaatcaccagcactcccccttagtcctgattgattctcagaataacaccaaggacagcactagactaaagtatgccgtgaaggtgtcctag

SEQ ID NO: 93349 - DNA, 204 bp, Artificial Sequence
  derived and/or modified sequence
ctggacagctacagctgcctgctgcagctgcccaacaggatggacaagctgaacaagatcaccgtgcctgccagccagaagctgcggcagctgcagaagatggtgcatgacatcaagaacaatgaaggaggcatcatgaacaagatcaagaagacagccaccatgaagatccagatgagcaccaggacccagcgctgcacctag

SEQ ID NO: 93350 - DNA, 900 bp, Artificial Sequence
  derived and/or modified sequence
atggacaagctgaacaagatcaccgtgcctgccagccagaagctgcggcagctgcagaagatggtgcatgacatcaagaacaatgaaggaggcatcatgaacaagatcaagaagctgaaggtgaaggccccacccagcgtgccccggcgggactatgccagcgagagccctgcagatgaggaggagcagtggagcgatgactttgacagcgactatgaaaatccagatgagcacagcgacagcgagatgtatgtgatgcctgctgaggagaatgctgatgacagctatgagcccccacctgtggagcaggagaccaggcctgtgcacccagccctgccctttgcccggggggagtacatcggcaggaacagcggggcctgggagaccaagagccccccacctgctgcccccagccccctgcccagggctgggaagaagcccaccacccccctgaagaccacccctgtggccagccagcagaatgccagctctgtgtgtgaggagaagcccatcccagctgagcggcaccggggcagcagccaccggcaggaggccgtgcagagccctgtgttccccccagcccagaagcagatccaccagaagcccatccccctgccccgcttcacagaaggaggcaaccccaccgtggatggccccctgcccagcttcagcagcaacagcaccatcagcgagcaggaggccggcgtgctgtgcaagccctggtacgccggggcctgtgacaggaagtctgctgaggaggccctgcacaggagcaacaagtacttcggctctgtggccgagatcatccggaaccaccagcacagccccctggtgctgattgacagccagaacaacaccaaggacagcacccggctgaagtatgctgtgaaggtgtcctag

SEQ ID NO: 93351 - DNA, 204 bp, Artificial Sequence
  derived and/or modified sequence
ctggacagctacagctgcctgctgcagctgcccaaccggatggacaaattgaacaaaattacagtgcctgctagccagaagctaaggcaactccagaagatggttcatgacattaagaataatgagggagggatcatgaataagataaagaaaactgctaccatgaaaatacaaatgtcgactcgcacccagcgctgtacatag

SEQ ID NO: 93352 - DNA, 900 bp, Artificial Sequence
  derived and/or modified sequence
atggacaagctgaacaagatcaccgtgcccgccagccagaagctgagacaactgcagaagatggtccacgatataaaaaataatgaaggcggaatcatgaacaagatcaagaagttgaaagtgaaagcgcctccaagcgttcccaggcgcgattacgccagcgagtcacccgctgacgaagaggagcaatggtccgacgactttgactcagattacgaaaaccccgacgaacattctgactctgaaatgtacgtgatgcccgccgaagagaatgccgacgacagctatgaaccaccacctgtggagcaggagaccagacctgtacatcctgcacttccattcgcacgaggcgagtatattggcaggaactctggcgcatgggagacaaagtcccctccacctgctgcgccgagtcctctaccccgggctggaaagaagcccacgaccccacttaaaactaccccggtggccagccaacagaacgcttccagcgtgtgcgaggaaaagccgatccccgccgaaaggcatagggggagttcccaccggcaagaggccgtccagtctccagtcttcccccccgcccagaaacagattcatcagaaacccataccacttcctagattcaccgaaggtggcaacccaacagttgatggaccactaccttctttcagctccaactccaccatttcagagcaagaggcaggagtgctgtgcaaaccttggtacgcgggggcctgcgaccggaagagcgcagaagaggcgttgcataggtccaacaaatatttcggttcggttgctgagattattaggaaccaccaacactctcccctggtcttaatcgattcacagaacaatacaaaagacagcactcgcctgaagtatgcagtgaaagtgagttag

SEQ ID NO: 93353 - DNA, 204 bp, Artificial Sequence
  derived and/or modified sequence
cttgatagttattcctgtctgctgcaactgccaaataggatggacaagctgaacaagatcaccgtccctgcatctcaaaagctgcgccaattgcagaaaatggtacatgatattaagaacaacgaaggcggaatcatgaacaagatcaaaaagacggccaccatgaaaatacagatgagcaccaggacacagcgttgtacttag

SEQ ID NO: 93354 - DNA, 900 bp, Artificial Sequence
  derived and/or modified sequence
atggataaacttaataagataacagtgccggcaagtcaaaaactgcgccagctgcagaaaatggtacacgacattaagaacaatgaagggggtataatgaacaaaattaagaagttgaaagtgaaggcgccaccttctgtaccgcgtcgagattacgcgtccgaatccccagccgatgaggaggaacaatggtcggacgacttcgatagtgattatgagaaccctgatgagcattcggactcagagatgtacgtgatgcccgcagaggaaaatgctgacgactcctacgaaccgccacccgtggagcaagaaacccggccagtacaccctgctctgcccttcgccaggggcgaatacataggaaggaactcaggggcttgggaaaccaagtcacctcctccagccgcaccttccccactcccgagagcgggaaagaagcctacaaccccccttaaaactacaccggttgccagccagcaaaatgcctctagtgtatgtgaggagaaacctatcccagcggagaggcaccgcggttcttcccacagacaggaagcggtgcagagcccggtgttccccccagctcaaaagcagatacatcagaaaccaataccactgcctcgatttacagaagggggtaaccctacagttgacggaccattgcctagtttctccagcaattccactatttcagagcaagaggccggagtgctgtgtaaaccttggtacgcaggcgcttgcgacagaaaatcagccgaggaggccctccaccggagcaataagtattttggctccgtggcagaaattattcgaaatcaccaacacagtccccttgtcttgatagacagccaaaataatactaaggactcaacgcgcttaaagtacgctgtgaaagttagttag

SEQ ID NO: 93355 - DNA, 1344 bp, Artificial Sequence
  derived and/or modified sequence
aagttttacttctccctagagcaggggtgtttgccagcagcctgcactctcagaaatcagacttgagtggccggaacccttgagaccagaggcttaccatgctgctccctaggagggccaggaactgctgacgtgaccactggacagttattcgtgtctcttacaattaccaaacagaatggacaagcttaataaaataaccgtccccgccagtcagaagttgaggcagcttcaaaagatggtccatgatattaaaaacaatgaaggtggaataatgaataaaatcaaaaagctaaaagtcaaagcacctccaagtgttcctcgaagggactacgcttcagagagccctgctgacgaagaggagcagtggtccgatgactttgacagcgactatgaaaatccagatgagcactcggactcagagatgtacgtgatgcccgccgaggagaacgctgatgacagctacgagccgcctccagtagagcaggaaaccaggccggttcacccagccctgcccttcgccagaggcgagtatataggtcgaaacagtggggcctgggaaaccaagtcacctccaccagctgcaccatccccgttgccacgggccgggaaaaaaccaacgacaccactgaagacaactccagttgcctctcaacagaatgcttcaagtgtttgtgaagaaaaacctatacctgctgaacgccaccgagggtcaagtcacagacaagaagctgtgcagtcaccagtgtttcctcctgcccagaaacaaatccaccaaaaacccatacctctgccaagatttacagaagggggaaacccaactgtggatgggcccctacccagcttttcatctaattccactatttcagaacaggaagctggcgttctctgcaagccatggtatgctggagcctgtgatcgaaagtctgctgaagaggcattgcacagatcaaacaagtactttggaagtgttgctgaaatcatcaggaatcatcaacatagtcctttggttcttattgacagtcagaataacacaaaagattccaccagactgaagtatgcagttaaagtttcataaagggggaaaaaaaagatcaataccattgcttcagacactttcccaaagtttctccttttgagaaaaagtcccaaaacttcatattttggattatgaatcatccagtaataaaatggaagatggagtcagctattgaagtggtcatccatttctttttaagaagctcatgtggacttgttctattgcctgacctgatgaactgttaatatctggtgaggttgagttatcatgctactaatattttccaaataaatatttttattttt

SEQ ID NO: 93356 - DNA, 204 bp, Artificial Sequence
  derived and/or modified sequence
ctggacagctacagctgcctgctgcagctgcccaacagaatggacaagctgaacaagatcaccgtgcccgccagccagaagctgagacagctgcagaagatggtgcacgacatcaagaacaacgagggcggcatcatgaacaagatcaagaagaccgccaccatgaagatccagatgagcaccagaacccagagatgcacctag

SEQ ID NO: 93357 - DNA, 900 bp, Artificial Sequence
  derived and/or modified sequence
atggacaagctgaacaagatcaccgtgcccgccagccagaagctgagacagctgcagaagatggtgcacgacatcaagaacaacgagggcggcatcatgaacaagatcaagaagctgaaggtgaaggccccccccagcgtgcccagaagagactacgccagcgagagccccgccgacgaggaggagcagtggagcgacgacttcgacagcgactacgagaaccccgacgagcacagcgacagcgagatgtacgtgatgcccgccgaggagaacgccgacgacagctacgagcccccccccgtggagcaggagaccagacccgtgcaccccgccctgcccttcgccagaggcgagtacatcggcagaaacagcggcgcctgggagaccaagagccccccccccgccgcccccagccccctgcccagagccggcaagaagcccaccacccccctgaagaccacccccgtggccagccagcagaacgccagcagcgtgtgcgaggagaagcccatccccgccgagagacacagaggcagcagccacagacaggaggccgtgcagagccccgtgttcccccccgcccagaagcagatccaccagaagcccatccccctgcccagattcaccgagggcggcaaccccaccgtggacggccccctgcccagcttcagcagcaacagcaccatcagcgagcaggaggccggcgtgctgtgcaagccctggtacgccggcgcctgcgacagaaagagcgccgaggaggccctgcacagaagcaacaagtacttcggcagcgtggccgagatcatcagaaaccaccagcacagccccctggtgctgatcgacagccagaacaacaccaaggacagcaccagactgaagtacgccgtgaaggtgagctag

SEQ ID NO: 93358 - protein, 430 aa, Artificial Sequence
  derived and/or modified sequence
MLERWHQLQPRRVSFRGEASETLQSPGYDPSRPESFFQQSFQRLSRLGHGSYGEVFKVRSKEDGRLYAVKRSMSPFRGPKDRARKLAEVGSHEKVGQHPCCVRLEQAWEEGGILYLQTELCGPSLQQHCEAWGASLPEAQVWGYLRDTLLALAHLHSQGLVHLDVKPANIFLGPRGRCKLGDFGLLVELGTAGAGEVQEGDPRYMAPELLQGSYGTAADVFSLGLTILEVACNMELPHGGEGWQQLRQGYLPPEFTAGLSSELRSVLVMMLEPDPKLRATAEALLALPVLRQPRAWGVLWCMAAEALSRGWALWQALLALLCWLWHGLAHPASWLQPLGPPATPPGSPPCSLLLDSSLSSNWDDDSLGPSLSPEAVLARTVGSTSTPRSRCTPRDALDLSDINSEPPRGSFPSFEPRNLLSLFEDTLDPT

SEQ ID NO: 93359 - DNA, 1293 bp, Artificial Sequence
  derived and/or modified sequence
atgctggagagatggcaccagctgcagcccagaagagtgagcttcagaggcgaggccagcgagaccctgcagagccccggctacgaccccagcagacccgagagcttcttccagcagagcttccagagactgagcagactgggccacggcagctacggcgaggtgttcaaggtgagaagcaaggaggacggcagactgtacgccgtgaagagaagcatgagccccttcagaggccccaaggacagagccagaaagctggccgaggtgggcagccacgagaaggtgggccagcacccctgctgcgtgagactggagcaggcctgggaggagggcggcatcctgtacctgcagaccgagctgtgcggccccagcctgcagcagcactgcgaggcctggggcgccagcctgcccgaggcccaggtgtggggctacctgagagacaccctgctggccctggcccacctgcacagccagggcctggtgcacctggacgtgaagcccgccaacatcttcctgggccccagaggcagatgcaagctgggcgacttcggcctgctggtggagctgggcaccgccggcgccggcgaggtgcaggagggcgaccccagatacatggcccccgagctgctgcagggcagctacggcaccgccgccgacgtgttcagcctgggcctgaccatcctggaggtggcctgcaacatggagctgccccacggcggcgagggctggcagcagctgagacagggctacctgccccccgagttcaccgccggcctgagcagcgagctgagaagcgtgctggtgatgatgctggagcccgaccccaagctgagagccaccgccgaggccctgctggccctgcccgtgctgagacagcccagagcctggggcgtgctgtggtgcatggccgccgaggccctgagcagaggctgggccctgtggcaggccctgctggccctgctgtgctggctgtggcacggcctggcccaccccgccagctggctgcagcccctgggcccccccgccaccccccccggcagccccccctgcagcctgctgctggacagcagcctgagcagcaactgggacgacgacagcctgggccccagcctgagccccgaggccgtgctggccagaaccgtgggcagcaccagcacccccagaagcagatgcacccccagagacgccctggacctgagcgacatcaacagcgagccccccagaggcagcttccccagcttcgagcccagaaacctgctgagcctgttcgaggacaccctggaccccacctag

SEQ ID NO: 93360 - DNA, 1293 bp, Artificial Sequence
  derived and/or modified sequence
atgctggagcgatggcatcagctgcagcctcggcgggtgagttttcgaggagaagcgtctgagaccctccagagccctggatatgatccgtcccggccagagtccttctttcagcaatccttccaacggctgagtagactcgggcatggatcatacggggaggttttcaaggtcaggtctaaggaggacgggcgcttgtacgcagttaagcgctctatgagccctttcagaggaccaaaagatcgtgctaggaagcttgctgaggttggctcccacgagaaagtgggccagcatccgtgctgtgtgaggcttgagcaagcttgggaggagggtgggatcctgtatcttcagaccgagctgtgcgggccaagcctgcagcagcactgtgaggcgtggggtgccagcctgccagaagcccaggtatggggatacttgcgcgacacgctgctcgcgctagcccacctgcacagccagggtctggtgcatctggacgtaaagccagcgaacatatttctggggccacggggtcgatgcaagctgggcgacttcggattgcttgtggagctagggactgctggcgctggagaagttcaggaaggagaccctcgctacatggcgcctgagctgcttcagggttcctacggcacagcggccgatgtcttctccctgggacttactattttggaagtggcttgcaacatggagctgccgcatggaggcgaagggtggcagcaactccgacagggctacctccctcccgagttcacggccggattgtcttcagaactgcgatcagtgctcgtgatgatgcttgagccggaccctaagctcagagcgacagccgaggcgctgctagcgctcccagttcttaggcagccacgagcctggggtgtgctttggtgcatggctgcagaagcacttagtcgaggctgggcactctggcaagccctgcttgcgcttctgtgttggttatggcatggcttagcacaccctgcttcctggctgcaaccactgggaccaccagccactcctcccggatcacctccctgtagcctgttattagattccagcctttcctcaaattgggatgatgatagtctcgggcccagcctgtcccccgaggctgtgttagcgaggaccgtcgggtctacatcaacaccgcggtcacgctgcacacccagggacgccttggatttgtccgacatcaactcagaacctcctcgagggtcgttcccatctttcgaacctcgaaaccttttgagtctcttcgaggatactctggaccccacctag

SEQ ID NO: 93361 - DNA, 1293 bp, Artificial Sequence
  derived and/or modified sequence
atgctggagcgctggcaccagctgcagcccaggagagtgtccttccggggggaggccagcgagaccctgcagagccctggctatgaccccagcaggcctgagagcttcttccagcagagcttccagaggctgagccggctgggccacggcagctatggagaggtgttcaaggtgcgcagcaaggaggatggccgcctgtatgctgtgaagaggtccatgagccccttccggggccccaaggaccgggccaggaagctggccgaggtgggcagccatgagaaggtgggccagcacccctgctgcgtgcggctggagcaggcctgggaggagggcggcatcctgtacctgcagacagagctgtgtggccccagcctgcagcagcactgtgaggcctggggcgccagcctgcctgaggcccaggtgtggggctacctgcgggacaccctgctggccctggcccacctgcacagccagggcctggtgcacctggatgtgaagccagccaacatcttcctgggcccccggggccgctgcaagctgggggactttggcctgctggtggagctgggcacagctggggccggggaggtgcaggagggggacccccgctacatggcccctgagctgctgcagggcagctatggaacagctgctgatgtgttcagcctgggcctgaccatcctggaggtggcctgcaacatggagctgccccacggcggggagggctggcagcagctgcggcagggctacctgcccccagagttcaccgctggcctgagcagcgagctgcggtctgtgctggtgatgatgctggagccagaccccaagctgcgggccacagctgaggccctgctggccctgcctgtgctgcggcagccccgggcctggggcgtgctgtggtgcatggctgctgaggccctgagccggggctgggccctgtggcaggccctgctggccctgctgtgctggctgtggcacggcctggcccacccagcctcctggctgcagcccctgggccccccagccaccccacctggcagccccccctgcagcctgctgctggacagcagcctgagcagcaactgggatgatgacagcctgggccccagcctgagccctgaggccgtgctggccaggacagtgggcagcaccagcacccccaggagccgctgcaccccaagagatgccctggacctgagtgacatcaacagcgagcccccccggggcagcttccccagctttgagcccaggaacctgctgagcctgtttgaggacaccctggaccccacctag

SEQ ID NO: 93362 - DNA, 1293 bp, Artificial Sequence
  derived and/or modified sequence
atgctggagcggtggcaccagctgcagccccggcgggtgagcttcagaggagaggccagcgagaccctgcagtcacccgggtacgacccctcccggcctgagtccttctttcaacagtcctttcaaagactctcgagacttggccatggcagctacggcgaggtgttcaaggtgcggtccaaggaggacggcagactttatgccgtcaaaagatccatgtccccctttagaggacctaaggacagggccagaaagcttgccgaggtgggctcacatgagaaggttggacagcatccctgctgcgtcaggctggagcaggcttgggaggaaggcggcatcctgtacctccagactgagctctgtgggcccagccttcagcagcactgcgaagcatggggagcttctctgccggaggcccaggtatggggatatcttcgcgacaccctgttggccctcgcacacctgcattcacaggggttggttcacctagatgttaaacctgcaaatattttccttggtcccagagggcgttgcaagctaggggacttcggcttgctcgtggaactgggcactgccggtgctggcgaagtgcaggaaggtgaccccagatacatggcccctgagctcctgcaggggtcgtacggcaccgctgcagatgtgttctctctggggctaaccattcttgaggtggcgtgcaatatggaacttccacatgggggcgagggatggcagcaattgcgtcagggatatcttccccccgagttcacagccggcctgagcagtgaattacggtccgtcctagtgatgatgctggagcctgatcctaagctgagggccactgctgaagcattgttggccctgcccgtgctaagacagccgcgggcctggggagtgctctggtgcatggccgccgaagctctgagccgcggctgggcactctggcaagcccttttagccctgctgtgctggctttggcacggtctggcccatcccgcatcctggctgcagcctcttggtccccccgccactccacccggcagcccgccgtgtagcctattgctcgacagtagtctgtctagcaattgggatgatgatagtctgggaccatctttatcgccagaggctgtgctggcaaggacagtcggctccacgtccactccccgatcccgatgcacgcccagagacgcactcgatctttcggacatcaacagcgagccacccaggggcagctttcccagctttgagccccgcaatctcttatctctgtttgaagacaccctcgaccccacatag

SEQ ID NO: 93363 - DNA, 1293 bp, Artificial Sequence
  derived and/or modified sequence
atgcttgaaaggtggcaccagctccaaccaaggcgggtgtcttttcgaggcgaggcctcagagaccctgcagagcccaggctacgacccatctagacctgaatcctttttccaacagtcttttcagaggttatctcgtctcggccacggttcttacggtgaggtcttcaaagttaggtctaaggaagacgggcgattatatgccgtgaaacgtagcatgagtccattccgagggcctaaggacagggcgagaaaactggcagaagtgggcagccatgagaaagtgggacagcacccctgttgcgttagacttgaacaagcatgggaggaaggaggcattctctacctgcagacagaactgtgcggcccatccttgcaacagcactgtgaggcatggggagcttccttgcccgaggcccaggtatgggggtaccttcgagacaccctacttgccctcgcgcaccttcactcccaggggctggtgcacctggacgtcaagcccgctaacatattcttaggcccaagggggaggtgtaagttaggggattttggacttctggttgaacttggcactgccggagccggtgaagtccaggaaggcgatccgcgttacatggcccctgagcttctccagggtagttacgggaccgctgcagatgtgttcagcctagggctcaccattctcgaggtggcctgcaacatggaactgcctcacggaggcgagggatggcagcagctacggcagggatacctgcctccagagtttactgccggactgagctcggagctccggtcagtcctggtaatgatgctggaacccgatcccaagctgcgcgcaactgccgaggcccttttagccttacctgtgctgaggcagccacgggcttggggagtgctctggtgtatggccgctgaggcactgtcgagaggttgggcactttggcaagccctcttggcactcctctgctggctctggcacggattggcccatccagcttcctggctccagccactcgggcctcctgccactccacccggatcaccaccctgctctttgctgctcgattcgtcgctcagctccaattgggacgacgactcacttggtccttcactgagccccgaagccgtgctggctaggactgtggggagcacttctactcctcggtcccggtgcacccctcgcgacgcccttgacctttcagatattaacagtgagccccctcggggttcattcccatcttttgagccacgcaacctgctgtcgctgtttgaggacactctggacccaacttag

SEQ ID NO: 93364 - DNA, 1806 bp, Artificial Sequence
  derived and/or modified sequence
cacgggccgttccccctcacgggagtcctccgcccgggcgtccggaacagtcgacggcagactccggcccgctgagccacccgaggggtcccgtggcctccgcggacccggaatctgggccctcgcggacccgcgccccgcccagtcgccccagggcttccccacacccacggagtgaagtcagccgcggccctgcctgggaggaacttaccgtctaccgggaaaggtggccagcagatgtgtcgggcctggtgagagggtgaggcgagacggcccgatcgcccagggccccggaagctgcggaggtcacccccgcctggccttagctcagggacaccctggattcacgtgggagcccctgctcctgcctcccccgtcccaccactgaggctgttgggccaggccagtcatgctagaacgctggcaccagctgcagccccggcgggtgtcattccggggcgaggcctcagagactctgcagagccctgggtatgacccaagccggccagagtccttcttccagcagagcttccagaggctcagccgcctgggccatggctcctacggagaggtcttcaaggtgcgctccaaggaggacggccggctctatgcggtaaagcgttccatgtcaccattccggggccccaaggaccgggcccgcaagttggccgaggtgggcagccacgagaaggtggggcagcacccatgctgcgtgcggctggagcaggcctgggaggagggcggcatcctgtacctgcagacggagctgtgcgggcccagcctgcagcaacactgtgaggcctggggtgccagcctgcctgaggcccaggtctggggctacctgcgggacacgctgcttgccctggcccatctgcacagccagggcctggtgcaccttgatgtcaagcctgccaacatcttcctggggccccggggccgctgcaagctgggtgacttcggactgctggtggagctgggtacagcaggagctggtgaggtccaggagggagacccccgctacatggcccccgagctgctgcagggctcctatgggacagcagcggatgtgttcagtctgggcctcaccatcctggaagtggcatgcaacatggagctgccccacggtggggagggctggcagcagctgcgccagggctacctgccccctgagttcactgccggtctgtcttccgagctgcgttctgtccttgtcatgatgctggagccagaccccaagctgcgggccacggccgaggccctgctggcactgcctgtgttgaggcagccgcgggcctggggtgtgctgtggtgcatggcagcggaggccctgagccgagggtgggccctgtggcaggccctgcttgccctgctctgctggctctggcatgggctggctcaccctgccagctggctacagcccctgggcccgccagccaccccgcctggctcaccaccctgcagtttgctcctggacagcagcctctccagcaactgggatgacgacagcctagggccttcactctcccctgaggctgtcctggcccggactgtggggagcacctccaccccccggagcaggtgcacacccagggatgccctggacctaagtgacatcaactcagagcctcctcggggctccttcccctcctttgagcctcggaacctcctcagcctgtttgaggacaccctagacccaacctgagccccagactctgcctctgcacttttaaccttttatcctgtgtctctcccgtcgcccttgaaagctggggcccctcgggaactcccatggtcttctctgcctgg

SEQ ID NO: 93365 - protein, 547 aa, Artificial Sequence
  derived and/or modified sequence
MAYGHIGRKYQSKKKLNLFKLTPFMVNSVLAEGKGGFIRAKLVCKTLENFFASADEELTIDHVPIWCKNSQGQRVMVEQSEKLNGVLEASRLWDNMRKLGECTEEAHQMTHDGYLKLWQLSKPSLASFDAIFVDEAQDCTPAIMNIVLSQPCGKIFVGDPHQQIYTFRGAVNALFTVPHTHVFYLTQSFRFGVEIAYVGATILDVCKRVRKKTLVGGNHQSGIRGDAKGQVALLSRTNANVFDEAVRVTEGEFPSRIHLIGGIKSFGLDRIIDIWILLQPEEERRKQNLVIKDKFIRRWVHKEGFSGFKRYVTAAEDKELEAKIAVVEKYNIRIPELVQRIEKCHIEDLDFAEMESHHVGQAGLELPTSEYILGTVHKAKGLEFDTVHVLDDFVKVPCARHNLPQLPHFRVESFSEDEWNLLYVAVTRAKKRLIMTKSLENILTLAGEYFLQAELTSNVLKTGVVRCCVGQCNNAIPVDTVLTMKKLPITYSNRKENKGGYLCHSCAEQRIGPLAFLTASPEQVRAMERTVENIVLPRHEALLFLVF

SEQ ID NO: 93366 - DNA, 1644 bp, Artificial Sequence
  derived and/or modified sequence
atggcgtatggccatatcgggagaaaatatcaaagcaaaaaaaagctaaatctgtttaaacttacacctttcatggtgaattcagtgctcgctgaaggtaaaggaggattcatccgggctaagttagtatgcaagactctggagaacttctttgcatccgctgatgaagaactgactatcgatcacgtcccgatctggtgcaaaaacagccagggtcagagagtaatggtcgaacagtccgaaaagctgaatggtgtgctggaggctagtaggctgtgggataatatgcgaaaactgggcgaatgtaccgaagaggcccatcagatgacccacgacgggtacctcaaactctggcagttgagcaagcccagcttggcaagcttcgacgcaatcttcgtggacgaggcgcaagactgtactcctgccatcatgaacattgtcctttcacagccttgcggcaagatattcgtgggcgatcctcaccagcagatttatacattcagaggcgcggtcaacgccctctttacagtaccgcacacgcatgtgttctacctgacacagagttttcgcttcggcgtggagatcgcctatgttggggccactatccttgatgtgtgcaagagggtgagaaaaaaaacacttgttggagggaaccaccagtccggaattaggggagatgcaaagggtcaggtagccctgctctctcgaacaaatgcaaacgtgttcgacgaggccgtgcgtgtgaccgaaggagagtttccctctcggatccacctgattgggggaatcaagtctttcggacttgatcgcatcatcgatatttggatactcctgcagcccgaggaggaacggagaaaacagaatttggtgatcaaagataagtttatcaggcgatgggtgcataaagaaggattttccgggtttaagaggtacgtcaccgccgcagaagacaaggaactggaagcgaagatcgccgttgtggagaaatataatataagaattcccgaacttgtgcagcggatagaaaaatgtcacatagaggacttagactttgcagaaatggaaagccaccacgtcggtcaagctggactggaacttccaaccagcgagtatattcttggcaccgttcacaaagctaagggtctggagtttgataccgttcacgttcttgatgacttcgtgaaggtgccttgtgctagacacaacttgccccagctacctcacttccgcgtcgagtcgttcagtgaggatgagtggaatctgctctacgtggccgttaccagggccaagaaaagattgatcatgaccaagtcattggaaaacatcctgactttagcaggggaatatttccttcaggctgaactgacgagcaacgtcctaaagactggcgtggtgaggtgctgcgtgggtcagtgtaacaacgccataccagttgacacggtgctgactatgaaaaagcttcccatcacttacagcaacagaaaagagaacaaaggggggtacctgtgccactcttgcgctgaacagcgtattggccccctggcttttctgacagcctctcctgaacaggtgagggccatggaaagaactgttgagaacatcgtgcttccacgtcacgaagcgctcctcttcctggtgttctag

SEQ ID NO: 93367 - DNA, 1644 bp, Artificial Sequence
  derived and/or modified sequence
atggcctacggccacatcggcaggaagtaccagagcaagaagaagctgaacctcttcaagctgacccccttcatggtgaacagcgtgctggccgagggcaagggcggcttcatccgggccaagctggtgtgcaagaccctggagaacttctttgccagcgcagatgaggagctgaccatcgaccacgtgcccatctggtgcaagaacagccagggccagagggtgatggtggagcagagcgagaagctgaatggagtgctggaggccagccggctgtgggacaacatgaggaagctgggagaatgtacagaggaggcccaccagatgacccatgatggctacctgaagctgtggcagctgagcaagcccagcctggccagctttgatgccatctttgtggatgaggcccaggactgcaccccagccatcatgaacatcgtgctgagccagccctgtgggaagatctttgtgggggacccccaccagcagatctacaccttcagaggagctgtgaatgccctcttcaccgtgccccacacccacgtgttctacctgacccagagcttccgctttggagtggagatcgcctacgtgggcgccaccatcctggatgtgtgcaagagggtgaggaagaagaccctggtgggcggcaaccaccagagcggcatcagaggagatgccaagggccaggtggccctgctgagcaggaccaatgccaacgtgtttgatgaagctgtgcgggtgacagaaggagagttccccagccgcatccacctgattggaggcatcaagagctttggcctggaccgcatcatcgacatctggatcctgctgcagcctgaggaggagaggaggaagcagaacctggtgatcaaggacaagttcatccgccgctgggtgcacaaggagggcttcagcggcttcaagagatatgtgacagctgctgaggacaaggagctggaggccaagattgctgtggtggagaagtacaacatccgcatccctgagctggtgcagagaattgagaagtgccacatcgaggacctggactttgctgagatggagagccaccacgtgggccaggccggcctggagctgcccaccagcgagtacatcctgggcaccgtgcacaaggccaagggcctggagtttgacacagtgcacgtgctggatgactttgtgaaggtgccctgtgcccggcacaacctgccccagctgccccacttccgggtggagagcttctctgaagatgagtggaacctgctgtatgtggccgtgacccgggccaagaagaggctcatcatgaccaagagcctggagaacatcctgaccctggccggggagtacttcctgcaggccgagctgaccagcaatgtgctgaagacaggagtggtgcgctgctgcgtgggccagtgcaacaatgccatccctgtggacacagtgctgaccatgaagaagctgcccatcacctacagcaacaggaaggagaacaagggcggctacctgtgccacagctgtgccgagcagagaattggccccctggccttcctgacagccagccctgagcaggtgcgggccatggagaggacagtggagaacatcgtgctgcccaggcatgaggccctgctcttcctggtgttctag

SEQ ID NO: 93368 - DNA, 1644 bp, Artificial Sequence
  derived and/or modified sequence
atggcctacggccacatcggccggaagtaccagagcaagaagaagttgaacttgtttaagctgacccctttcatggtgaattcagttctcgctgaagggaagggcggatttatccgcgccaagctggtgtgcaaaaccctggagaactttttcgccagcgctgacgaggaactgactatcgaccacgtcccaatctggtgcaagaattctcagggccagagagttatggtcgaacagagcgagaagttgaacggtgtcttggaagcctcacggttatgggacaatatgaggaaattgggtgagtgcacagaggaagcccaccaaatgacacatgatgggtatcttaaactctggcagctgtccaaaccctcactggcatcctttgacgccatttttgtggacgaggcacaggattgtacaccagccattatgaacatcgtcctctcgcagccctgtggcaaaatttttgtgggagacccacatcagcagatctacacattccgcggcgccgtgaacgctttatttaccgtgccacacacccacgtcttttatctaacccaatcatttcgattcggcgttgagatagcttacgtaggggccaccatcctggatgtatgtaaaagggtccgcaaaaagacgcttgttggggggaaccatcagtctgggattcgcggcgacgcaaaagggcaagtcgctttgctgtccagaaccaatgcaaacgtgtttgacgaagctgtgcgagttacggagggagaatttccctctcgcattcacctcataggcgggatcaagagttttggactagacaggatcatcgacatatggatacttctccagccagaggaggaaaggagaaagcaaaacctggtcatcaaggataaattcattcggcgttgggtccacaaggaaggtttcagtggattcaagcggtatgttacggctgccgaagataaagagttggaagctaagatagctgttgtagaaaagtacaacatccgcatccctgaactcgtgcaacgcatagagaaatgtcacatcgaagacctggacttcgccgaaatggagagccatcatgtaggccaggctggactggaacttcccaccagcgaatacatcctggggaccgtccacaaagcaaaggggctggagtttgataccgtgcacgttttggacgacttcgtgaaagtcccttgtgcacgacacaacttgccacagctcccacacttcagagtagagtcattttcagaagatgagtggaatctactctatgtggccgtgaccagagcgaaaaagcgtctgatcatgactaaaagcctggagaacatcctcactctggcaggggagtactttctgcaggcagaattgactagtaatgttcttaagaccggtgtggtgcggtgttgcgttggccaatgcaacaatgctatccctgtggacaccgtgttgaccatgaagaaactcccaatcacttactccaaccgcaaagagaacaagggaggctacctctgccattcttgtgccgaacaacgaattggcccgctggctttcctgacggcatcaccggaacaggtgagagcaatggaacgtacagtcgaaaacatcgtactcccgagacacgaggctctgcttttcctggtgttttag

SEQ ID NO: 93369 - DNA, 1644 bp, Artificial Sequence
  derived and/or modified sequence
atggcttacgggcacataggcagaaagtatcagtcaaagaaaaaactgaatctgtttaagctgactccatttatggttaattctgtgctggcagagggtaagggcggatttatccgtgccaaattagtgtgcaagacactggagaattttttcgcatcagcagatgaagaactcaccatagaccatgttccaatttggtgcaagaactcccaggggcaacgcgtgatggtggaacagtccgagaaattgaacggcgtgcttgaggcctcaaggttatgggataacatgagaaaactaggagagtgtaccgaggaggcacatcagatgacccatgatggatatctaaagttgtggcagctgtcaaaacccagcctggccagttttgatgctattttcgtggacgaggctcaagattgtacacccgctatcatgaacattgtgctgtctcagccttgcggtaagatatttgttggggaccctcaccagcagatttacacattcagaggggcagtgaacgccctgttcactgtcccccatacccatgtgttttatctgactcaaagcttcagattcggcgtagaaatcgcttatgtgggggctaccatcctggatgtctgcaagcgggtcaggaagaaaacactggttggtggcaatcaccagtcgggaatcagaggtgacgcgaaaggccaagtggctctactgtccagaaccaacgcaaacgtgttcgatgaagcagtccgggtgaccgagggcgagtttccatcccgaatccacctaattggcggaattaaaagcttcggactggatcgtattattgatatatggattctcctccagcctgaggaggaacggaggaaacagaacctggtgatcaaagacaagttcatacgcaggtgggtgcataaggaagggtttagtggcttcaaaaggtacgtaactgccgctgaggacaaggagttagaagcaaagattgctgtagtcgaaaaatataacattagaattccggagctcgttcagcgcatcgagaaatgtcacatcgaggatttagactttgccgagatggagtctcaccatgtgggacaggcaggcctcgagcttcccaccagtgagtatatcctgggaacagttcacaaggctaagggcttggagtttgacaccgtacacgtgttggatgattttgtcaaggtgccctgcgcacgccacaaccttccacagctacctcacttcagagtggagagcttttcggaagacgagtggaatttactctatgtcgcggtgacaagagccaaaaagaggctcattatgaccaaatctctggagaacattctgaccctggctggtgaatattttttacaggccgaactgacttccaacgtgctcaaaactggagttgtcaggtgttgcgtgggccagtgtaataatgccattccggtggacaccgtgctgaccatgaagaaattgcccatcacatatagtaatcggaaggagaataaaggagggtatttgtgtcatagctgcgccgaacagcgcataggccctttagccttcttaacagcatcaccggagcaggttcgcgctatggagcgaacagtggagaatatagtgctgcccagacacgaggcgctgcttttcctggtgttttag

SEQ ID NO: 93370 - DNA, 1644 bp, Artificial Sequence
  derived and/or modified sequence
atggcctacggccacatcggcagaaagtaccagagcaagaagaagctgaacctgttcaagctgacccccttcatggtgaacagcgtgctggccgagggcaagggcggcttcatcagagccaagctggtgtgcaagaccctggagaacttcttcgccagcgccgacgaggagctgaccatcgaccacgtgcccatctggtgcaagaacagccagggccagagagtgatggtggagcagagcgagaagctgaacggcgtgctggaggccagcagactgtgggacaacatgagaaagctgggcgagtgcaccgaggaggcccaccagatgacccacgacggctacctgaagctgtggcagctgagcaagcccagcctggccagcttcgacgccatcttcgtggacgaggcccaggactgcacccccgccatcatgaacatcgtgctgagccagccctgcggcaagatcttcgtgggcgacccccaccagcagatctacaccttcagaggcgccgtgaacgccctgttcaccgtgccccacacccacgtgttctacctgacccagagcttcagattcggcgtggagatcgcctacgtgggcgccaccatcctggacgtgtgcaagagagtgagaaagaagaccctggtgggcggcaaccaccagagcggcatcagaggcgacgccaagggccaggtggccctgctgagcagaaccaacgccaacgtgttcgacgaggccgtgagagtgaccgagggcgagttccccagcagaatccacctgatcggcggcatcaagagcttcggcctggacagaatcatcgacatctggatcctgctgcagcccgaggaggagagaagaaagcagaacctggtgatcaaggacaagttcatcagaagatgggtgcacaaggagggcttcagcggcttcaagagatacgtgaccgccgccgaggacaaggagctggaggccaagatcgccgtggtggagaagtacaacatcagaatccccgagctggtgcagagaatcgagaagtgccacatcgaggacctggacttcgccgagatggagagccaccacgtgggccaggccggcctggagctgcccaccagcgagtacatcctgggcaccgtgcacaaggccaagggcctggagttcgacaccgtgcacgtgctggacgacttcgtgaaggtgccctgcgccagacacaacctgccccagctgccccacttcagagtggagagcttcagcgaggacgagtggaacctgctgtacgtggccgtgaccagagccaagaagagactgatcatgaccaagagcctggagaacatcctgaccctggccggcgagtacttcctgcaggccgagctgaccagcaacgtgctgaagaccggcgtggtgagatgctgcgtgggccagtgcaacaacgccatccccgtggacaccgtgctgaccatgaagaagctgcccatcacctacagcaacagaaaggagaacaagggcggctacctgtgccacagctgcgccgagcagagaatcggccccctggccttcctgaccgccagccccgagcaggtgagagccatggagagaaccgtggagaacatcgtgctgcccagacacgaggccctgctgttcctggtgttctag

SEQ ID NO: 93371 - DNA, 1635 bp, Artificial Sequence
  derived and/or modified sequence
gagcttggtgtgccacttgtggagggagatcatcagtgacccgctgttcattccttggaagaagctgtaccatcgatacctgatgaatgaagagcaagctgtcagcaaagtggacggcatcctgtctaactgtggcatagaaaaggagtcagacctgtgtgtgctgaacctcatacgatacacagccaccactaagtgctctccgagtgtggatcccgagagggtgctgtggagtctgagggaccaccccctcctccccgaggctgaggcgtgtgtgcggcaacacctccccgacctctacgctgctgccgggggtgtcaacatctgggccctggtggcggctgtggtgctcctctccagcagtgtgaatgacatccagcgactgctcttctgcctccggagacccagctccacggtgaccatgccagatgtcaccgagaccctgtactgcatagccgtgcttctctacgccatgagggagaaggggattaacatcagcaataggattcactacaacattttctattgcctatatcttcaggagaattcctgcactcaggccacaaaagttaaagaggagccatctgtctggccaggcaagaaaaccatccaacttacacatgaacaacagctgattctgaatcacaagatggaacctctccaggtggtgaaaattatggcctttgccggcactgggaagacctcaacgctggtcaagtatgcagagaagtggtctcagagcaggtttctgtatgtgacattcaacaagagcatcgcaaagcaggccgaacgcgtcttccccagcaacgtcatctgcaaaaccttccactccatggcctacgggcacatagggcggaagtaccagtcaaagaagaagttgaatctcttcaagttaacacccttcatggtcaactccgtccttgctgaagggaagggtggattcataagagccaagcttgtgtgtaagactctagaaaacttctttgcctcggctgacgaagagctgaccattgatcacgtgcctatttggtgtaagaacagccaaggacagagagtcatggttgagcagagtgaaaaactgaatggtgtccttgaagcgagccgcctctgggataacatgcggaagctgggggagtgcacagaagaggcgcaccagatgactcatgacggctacttgaaactctggcagctgagcaagccttcgctggcctcttttgacgccatctttgtggatgaggcccaggcaggtgcgcgccatggagcgcactgtggagaacatcgtactgccccggcatgaggccctgctcttcctcgtcttctgaggacaaggcgcacgttctccgcagtgcagagcagcttgccgaggaccccgcgtgaagaaagccagcgaggggggcttctgctccctgagactctgggttcacccacagcactttctgaggaagaggacaccagcccaagctggacctgccatttctccactccctacagacagccagtctccacttgcctcccctctggatgtatctggtcagggaagtgggggatgttcttttgataaaaaaaaaaaaaaaaatttatgtatttaaacttttattacaagatttcaattaaacaggcaccatagcactggca

SEQ ID NO: 93372 - protein, 492 aa, Artificial Sequence
  derived and/or modified sequence
MEATRLRQKAEELVKDNELLPPPSPSLGSFDPLAELTGKDSNVTASPTAPACPSDKPAPVQKPPSSGTSSEFEVVTPEEQNSPESSSHANAMALGPLPREDGNLMLHLQRLETTLSVCAEEPDHGQLFTHLGRMALEFNRLASKVHKNEQRTSILQTLCEQLRKENEALKAKLDKGLEQRDQAAERLREENLELKKLLMSNGNKEGASGRPGSPKMEGTGKKAVAGQQQASVTAGKVPEVVALGAAEKKVKMLEQQRSELLEVNKQWDQHFRSMKQQYEQKITELRQKLADLQKQVTDLEAEREQKQRDFDRKLLLAKSKIEMEETDKEQLTAEAKELRQKVKYLQDQLSPLTRQREYQEKEIQRLNKALEEALSIQTPPSSPPTAFGSPEGAGALLRKQELVTQNELLKQQVKIFEEDFQRERSDRERMNEEKEELKKQVEKLQAQVTLSNAQLKAFKDEEKAREALRQQKRKAKGTHRGCPRHLPERKVK

SEQ ID NO: 93373 - protein, 144 aa, Artificial Sequence [sequence omitted]

SEQ ID NO: 93374 - protein, 133 aa, Artificial Sequence
  derived and/or modified sequence
MEGRGPYRIYDPGGSVPSGEASAAFERLVKENSRLKEKMQGIKMLGELLEESQMEATRLRQKAEELVKDNELLPPPSPSLGSFDPLAELTGKDSNVTASPTAPACPSDKPAPVQKPPSSGTSSEFEVVTPEEQ

SEQ ID NO: 93375 - protein, 257 aa, Artificial Sequence
  derived and/or modified sequence
MEATRLRQKAEELVKDNELLPPPSPSLGSFDPLAELTGKDSNVTASPTAPACPSDKPAPVQKPPSSGTSSEFEVVTPEEQNSPESSSHANAMALGPLPREDGNLMLHLQRLETTLSVCAEEPDHGQLFTHLGRMALEFNRLASKVHKNEQRTSILQTLCEQLRKENEALKAKLDKGLEQRDQAAERLREENLELKKLLMSNGNKEGASGRPGSPKMEGTGKKAVAGQQQASVTAGKVPEVVALGAAEKKVKMLEQQR

SEQ ID NO: 93376 - protein, 556 aa, Artificial Sequence
  derived and/or modified sequence
MEGRGPYRIYDPGGSVPSGEASAAFERLVKENSRLKEKMQGIKMLGELLEESQMEATRLRQKAEELVKDNELLPPPSPSLGSFDPLAELTGKDSNVTASPTAPACPSDKPAPVQKPPSSGTSSEFEVVTPEEQNSPESSSHANAMALGPLPREDGNLMLHLQRLETTLSVCAEEPDHGQLFTHLGRMALEFNRLASKVHKNEQRTSILQTLCEQLRKENEALKAKLDKGLEQRDQAAERLREENLELKKLLMSNGNKEGASGRPGSPKMEGTGKKAVAGQQQASVTAGKVPEVVALGAAEKKVKMLEQQRSELLEVNKQWDQHFRSMKQQYEQKITELRQKLADLQKQVTDLEAEREQKQRDFDRKLLLAKSKIEMEETDKEQLTAEAKELRQKVKYLQDQLSPLTRQREYQEKEIQRLNKALEEALSIQTPPSSPPTAFGSPEGAGALLRKQELVTQNELLKQQVKIFEEDFQRERSDRERMNEEKEELKKQVEKLQAQVTLSNAQLKAFKDEEKAREALRQQKRKAKSLQKMTVRGLSETRLCHLAPPSSCRAS

SEQ ID NO: 93377 - protein, 513 aa, Artificial Sequence
  derived and/or modified sequence
MLGELLEESQMEATRLRQKAEELVKDNELLPPPSPSLGSFDPLAELTGKDSNVTASPTAPACPSDKPAPVQKPPSSGTSSEFEVVTPEEQNSPESSSHANAMALGPLPREDGNLMLHLQRLETTLSVCAEEPDHGQLFTHLGRMALEFNRLASKVHKNEQRTSILQTLCEQLRKENEALKAKLDKGLEQRDQAAERLREENLELKKLLMSNGNKEGASGRPGSPKMEGTGKKAVAGQQQASVTAGKVPEVVALGAAEKKVKMLEQQRSELLEVNKQWDQHFRSMKQQYEQKITELRQKLADLQKQVTDLEAEREQKQRDFDRKLLLAKSKIEMEETDKEQLTAEAKELRQKVKYLQDQLSPLTRQREYQEKEIQRLNKALEEALSIQTPPSSPPTAFGSPEGAGALLRKQELVTQNELLKQQVKIFEEDFQRERSDRERMNEEKEELKKQVEKLQAQVTLSNAQLKAFKDEEKAREALRQQKRKAKSLQKMTVRGLSETRLCHLAPPSSCRAS

SEQ ID NO: 93378 - protein, 502 aa, Artificial Sequence
  derived and/or modified sequence
MLGELLEESQMEATRLRQKAEELVKDNELLPPPSPSLGSFDPLAELTGKDSNVTASPTAPACPSDKPAPVQKPPSSGTSSEFEVVTPEEQNSPESSSHANAMALGPLPREDGNLMLHLQRLETTLSVCAEEPDHGQLFTHLGRMALEFNRLASKVHKNEQRTSILQTLCEQLRKENEALKAKLDKGLEQRDQAAERLREENLELKKLLMSNGNKEGASGRPGSPKMEGTGKKAVAGQQQASVTAGKVPEVVALGAAEKKVKMLEQQRSELLEVNKQWDQHFRSMKQQYEQKITELRQKLADLQKQVTDLEAEREQKQRDFDRKLLLAKSKIEMEETDKEQLTAEAKELRQKVKYLQDQLSPLTRQREYQEKEIQRLNKALEEALSIQTPPSSPPTAFGSPEGAGALLRKQELVTQNELLKQQVKIFEEDFQRERSDRERMNEEKEELKKQVEKLQAQVTLSNAQLKAFKDEEKAREALRQQKRKAKGTHRGCPRHLPERKVK

SEQ ID NO: 93379 - DNA, 1479 bp, Artificial Sequence
  derived and/or modified sequence
atggaggccaccagactgagacagaaggccgaggagctggtgaaggacaacgagctgctgcccccccccagccccagcctgggcagcttcgaccccctggccgagctgaccggcaaggacagcaacgtgaccgccagccccaccgcccccgcctgccccagcgacaagcccgcccccgtgcagaagccccccagcagcggcaccagcagcgagttcgaggtggtgacccccgaggagcagaacagccccgagagcagcagccacgccaacgccatggccctgggccccctgcccagagaggacggcaacctgatgctgcacctgcagagactggagaccaccctgagcgtgtgcgccgaggagcccgaccacggccagctgttcacccacctgggcagaatggccctggagttcaacagactggccagcaaggtgcacaagaacgagcagagaaccagcatcctgcagaccctgtgcgagcagctgagaaaggagaacgaggccctgaaggccaagctggacaagggcctggagcagagagaccaggccgccgagagactgagagaggagaacctggagctgaagaagctgctgatgagcaacggcaacaaggagggcgccagcggcagacccggcagccccaagatggagggcaccggcaagaaggccgtggccggccagcagcaggccagcgtgaccgccggcaaggtgcccgaggtggtggccctgggcgccgccgagaagaaggtgaagatgctggagcagcagagaagcgagctgctggaggtgaacaagcagtgggaccagcacttcagaagcatgaagcagcagtacgagcagaagatcaccgagctgagacagaagctggccgacctgcagaagcaggtgaccgacctggaggccgagagagagcagaagcagagagacttcgacagaaagctgctgctggccaagagcaagatcgagatggaggagaccgacaaggagcagctgaccgccgaggccaaggagctgagacagaaggtgaagtacctgcaggaccagctgagccccctgaccagacagagagagtaccaggagaaggagatccagagactgaacaaggccctggaggaggccctgagcatccagaccccccccagcagcccccccaccgccttcggcagccccgagggcgccggcgccctgctgagaaagcaggagctggtgacccagaacgagctgctgaagcagcaggtgaagatcttcgaggaggacttccagagagagagaagcgacagagagagaatgaacgaggagaaggaggagctgaagaagcaggtggagaagctgcaggcccaggtgaccctgagcaacgcccagctgaaggccttcaaggacgaggagaaggccagagaggccctgagacagcagaagagaaaggccaagggcacccacagaggctgccccagacacctgcccgagagaaaggtgaagtag

SEQ ID NO: 93380 - DNA, 435 bp, Artificial Sequence
  derived and/or modified sequence
atggagggcagaggcccctacagaatctacgaccccggcggcagcgtgcccagcggcgaggccagcgccgccttcgagagactggtgaaggagaacagcagactgaaggagaagatgcagggcatcaagatgctgggcgagctgctggaggagagccagatggaggccaccagactgagacagaaggccgaggagctggtgaaggacaacgagctgctgcccccccccagccccagcctgggcagcttcgaccccctggccgagctgaccggcaaggacagcaacgtgaccgccagccccaccgcccccgcctgccccagcgacaagcccgcccccgtgcagaagccccccagcagcggcaccagcagcgagttcgaggtggtgacccccgaggagcagaacagccccgagagcagcagccacgccaacgcctag

SEQ ID NO: 93381 - DNA, 402 bp, Artificial Sequence
  derived and/or modified sequence
atggagggcagaggcccctacagaatctacgaccccggcggcagcgtgcccagcggcgaggccagcgccgccttcgagagactggtgaaggagaacagcagactgaaggagaagatgcagggcatcaagatgctgggcgagctgctggaggagagccagatggaggccaccagactgagacagaaggccgaggagctggtgaaggacaacgagctgctgcccccccccagccccagcctgggcagcttcgaccccctggccgagctgaccggcaaggacagcaacgtgaccgccagccccaccgcccccgcctgccccagcgacaagcccgcccccgtgcagaagccccccagcagcggcaccagcagcgagttcgaggtggtgacccccgaggagcagtag

SEQ ID NO: 93382 - DNA, 774 bp, Artificial Sequence
  derived and/or modified sequence
atggaggccaccagactgagacagaaggccgaggagctggtgaaggacaacgagctgctgcccccccccagccccagcctgggcagcttcgaccccctggccgagctgaccggcaaggacagcaacgtgaccgccagccccaccgcccccgcctgccccagcgacaagcccgcccccgtgcagaagccccccagcagcggcaccagcagcgagttcgaggtggtgacccccgaggagcagaacagccccgagagcagcagccacgccaacgccatggccctgggccccctgcccagagaggacggcaacctgatgctgcacctgcagagactggagaccaccctgagcgtgtgcgccgaggagcccgaccacggccagctgttcacccacctgggcagaatggccctggagttcaacagactggccagcaaggtgcacaagaacgagcagagaaccagcatcctgcagaccctgtgcgagcagctgagaaaggagaacgaggccctgaaggccaagctggacaagggcctggagcagagagaccaggccgccgagagactgagagaggagaacctggagctgaagaagctgctgatgagcaacggcaacaaggagggcgccagcggcagacccggcagccccaagatggagggcaccggcaagaaggccgtggccggccagcagcaggccagcgtgaccgccggcaaggtgcccgaggtggtggccctgggcgccgccgagaagaaggtgaagatgctggagcagcagagatag

SEQ ID NO: 93383 - DNA, 1671 bp, Artificial Sequence
  derived and/or modified sequence
atggagggcagaggcccctacagaatctacgaccccggcggcagcgtgcccagcggcgaggccagcgccgccttcgagagactggtgaaggagaacagcagactgaaggagaagatgcagggcatcaagatgctgggcgagctgctggaggagagccagatggaggccaccagactgagacagaaggccgaggagctggtgaaggacaacgagctgctgcccccccccagccccagcctgggcagcttcgaccccctggccgagctgaccggcaaggacagcaacgtgaccgccagccccaccgcccccgcctgccccagcgacaagcccgcccccgtgcagaagccccccagcagcggcaccagcagcgagttcgaggtggtgacccccgaggagcagaacagccccgagagcagcagccacgccaacgccatggccctgggccccctgcccagagaggacggcaacctgatgctgcacctgcagagactggagaccaccctgagcgtgtgcgccgaggagcccgaccacggccagctgttcacccacctgggcagaatggccctggagttcaacagactggccagcaaggtgcacaagaacgagcagagaaccagcatcctgcagaccctgtgcgagcagctgagaaaggagaacgaggccctgaaggccaagctggacaagggcctggagcagagagaccaggccgccgagagactgagagaggagaacctggagctgaagaagctgctgatgagcaacggcaacaaggagggcgccagcggcagacccggcagccccaagatggagggcaccggcaagaaggccgtggccggccagcagcaggccagcgtgaccgccggcaaggtgcccgaggtggtggccctgggcgccgccgagaagaaggtgaagatgctggagcagcagagaagcgagctgctggaggtgaacaagcagtgggaccagcacttcagaagcatgaagcagcagtacgagcagaagatcaccgagctgagacagaagctggccgacctgcagaagcaggtgaccgacctggaggccgagagagagcagaagcagagagacttcgacagaaagctgctgctggccaagagcaagatcgagatggaggagaccgacaaggagcagctgaccgccgaggccaaggagctgagacagaaggtgaagtacctgcaggaccagctgagccccctgaccagacagagagagtaccaggagaaggagatccagagactgaacaaggccctggaggaggccctgagcatccagaccccccccagcagcccccccaccgccttcggcagccccgagggcgccggcgccctgctgagaaagcaggagctggtgacccagaacgagctgctgaagcagcaggtgaagatcttcgaggaggacttccagagagagagaagcgacagagagagaatgaacgaggagaaggaggagctgaagaagcaggtggagaagctgcaggcccaggtgaccctgagcaacgcccagctgaaggccttcaaggacgaggagaaggccagagaggccctgagacagcagaagagaaaggccaagagcctgcagaagatgaccgtgagaggcctgagcgagaccagactgtgccacctggccccccccagcagctgcagagccagctag

SEQ ID NO: 93384 - DNA, 1542 bp, Artificial Sequence
  derived and/or modified sequence
atgctgggcgagctgctggaggagagccagatggaggccaccagactgagacagaaggccgaggagctggtgaaggacaacgagctgctgcccccccccagccccagcctgggcagcttcgaccccctggccgagctgaccggcaaggacagcaacgtgaccgccagccccaccgcccccgcctgccccagcgacaagcccgcccccgtgcagaagccccccagcagcggcaccagcagcgagttcgaggtggtgacccccgaggagcagaacagccccgagagcagcagccacgccaacgccatggccctgggccccctgcccagagaggacggcaacctgatgctgcacctgcagagactggagaccaccctgagcgtgtgcgccgaggagcccgaccacggccagctgttcacccacctgggcagaatggccctggagttcaacagactggccagcaaggtgcacaagaacgagcagagaaccagcatcctgcagaccctgtgcgagcagctgagaaaggagaacgaggccctgaaggccaagctggacaagggcctggagcagagagaccaggccgccgagagactgagagaggagaacctggagctgaagaagctgctgatgagcaacggcaacaaggagggcgccagcggcagacccggcagccccaagatggagggcaccggcaagaaggccgtggccggccagcagcaggccagcgtgaccgccggcaaggtgcccgaggtggtggccctgggcgccgccgagaagaaggtgaagatgctggagcagcagagaagcgagctgctggaggtgaacaagcagtgggaccagcacttcagaagcatgaagcagcagtacgagcagaagatcaccgagctgagacagaagctggccgacctgcagaagcaggtgaccgacctggaggccgagagagagcagaagcagagagacttcgacagaaagctgctgctggccaagagcaagatcgagatggaggagaccgacaaggagcagctgaccgccgaggccaaggagctgagacagaaggtgaagtacctgcaggaccagctgagccccctgaccagacagagagagtaccaggagaaggagatccagagactgaacaaggccctggaggaggccctgagcatccagaccccccccagcagcccccccaccgccttcggcagccccgagggcgccggcgccctgctgagaaagcaggagctggtgacccagaacgagctgctgaagcagcaggtgaagatcttcgaggaggacttccagagagagagaagcgacagagagagaatgaacgaggagaaggaggagctgaagaagcaggtggagaagctgcaggcccaggtgaccctgagcaacgcccagctgaaggccttcaaggacgaggagaaggccagagaggccctgagacagcagaagagaaaggccaagagcctgcagaagatgaccgtgagaggcctgagcgagaccagactgtgccacctggccccccccagcagctgcagagccagctag

SEQ ID NO: 93385 - DNA, 1509 bp, Artificial Sequence
  derived and/or modified sequence
atgctgggcgagctgctggaggagagccagatggaggccaccagactgagacagaaggccgaggagctggtgaaggacaacgagctgctgcccccccccagccccagcctgggcagcttcgaccccctggccgagctgaccggcaaggacagcaacgtgaccgccagccccaccgcccccgcctgccccagcgacaagcccgcccccgtgcagaagccccccagcagcggcaccagcagcgagttcgaggtggtgacccccgaggagcagaacagccccgagagcagcagccacgccaacgccatggccctgggccccctgcccagagaggacggcaacctgatgctgcacctgcagagactggagaccaccctgagcgtgtgcgccgaggagcccgaccacggccagctgttcacccacctgggcagaatggccctggagttcaacagactggccagcaaggtgcacaagaacgagcagagaaccagcatcctgcagaccctgtgcgagcagctgagaaaggagaacgaggccctgaaggccaagctggacaagggcctggagcagagagaccaggccgccgagagactgagagaggagaacctggagctgaagaagctgctgatgagcaacggcaacaaggagggcgccagcggcagacccggcagccccaagatggagggcaccggcaagaaggccgtggccggccagcagcaggccagcgtgaccgccggcaaggtgcccgaggtggtggccctgggcgccgccgagaagaaggtgaagatgctggagcagcagagaagcgagctgctggaggtgaacaagcagtgggaccagcacttcagaagcatgaagcagcagtacgagcagaagatcaccgagctgagacagaagctggccgacctgcagaagcaggtgaccgacctggaggccgagagagagcagaagcagagagacttcgacagaaagctgctgctggccaagagcaagatcgagatggaggagaccgacaaggagcagctgaccgccgaggccaaggagctgagacagaaggtgaagtacctgcaggaccagctgagccccctgaccagacagagagagtaccaggagaaggagatccagagactgaacaaggccctggaggaggccctgagcatccagaccccccccagcagcccccccaccgccttcggcagccccgagggcgccggcgccctgctgagaaagcaggagctggtgacccagaacgagctgctgaagcagcaggtgaagatcttcgaggaggacttccagagagagagaagcgacagagagagaatgaacgaggagaaggaggagctgaagaagcaggtggagaagctgcaggcccaggtgaccctgagcaacgcccagctgaaggccttcaaggacgaggagaaggccagagaggccctgagacagcagaagagaaaggccaagggcacccacagaggctgccccagacacctgcccgagagaaaggtgaagtag

SEQ ID NO: 93386 - DNA, 1479 bp, Artificial Sequence
  derived and/or modified sequence
atggaagccacacgtttgcgccaaaaagccgaagagctagtgaaggacaacgaattgctcccccccccttccccgagcctgggatcctttgatcccctggctgaacttacaggcaaagactccaacgtgaccgcctcccctactgcaccagcttgccccagcgataagcctgctccagtgcagaaacccccaagcagtggtacgagcagcgaatttgaagtcgtcacgcctgaagaacagaactcccctgaatctagcagtcacgctaacgcaatggccttggggcctctgcctcgagaagacggtaacctgatgctgcatctgcaacgattagaaaccactctgtccgtgtgcgcggaggaacctgaccacggccagctgttcacccaccttggccggatggccttagagtttaataggttggctagcaaggtgcacaagaacgaacaacggacctcaattcttcagacattgtgtgaacagctcagaaaagagaacgaggcactcaaggctaagctggacaagggccttgagcaaagagatcaggcagcagagaggctacgcgaggaaaatctggagctgaagaaactcctcatgtcaaacggcaataaggagggggcttccggacgccctggaagtcccaaaatggagggtacagggaagaaagcggtggcaggacaacaacaggcctcagtcactgcagggaaggttccagaagtagtggctctgggagccgcagagaaaaaagtgaagatgcttgagcagcaaaggtctgagctcctggaggtcaacaagcagtgggatcagcactttcgctcaatgaaacagcagtacgaacagaagatcaccgagctgcggcagaagttagccgacctgcaaaagcaggtcaccgatcttgaggcagagcgggagcaaaaacaacgagacttcgatcgcaaattgctgcttgccaagagcaagattgaaatggaggaaaccgataaggagcagctcactgccgaggccaaagagcttagacagaaagtcaaatacctgcaggatcagctgtctccactgacccggcagcgggagtatcaggagaaagagattcagcgcttaaataaggcactggaagaagccctcagtatccagactccaccatcctcacctccaaccgcgtttgggagccccgagggcgctggggctctcttgcgcaagcaggaactcgttacccaaaacgagctgctgaagcagcaggttaagatctttgaagaagacttccaaagggaaagaagcgaccgtgagcgcatgaatgaggagaaagaggagctgaaaaagcaggtggaaaaactccaagcccaggtgaccttatccaatgctcagttaaaagctttcaaggatgaggagaaagctcgggaggccctgagacagcagaagcggaaggctaaaggcacccaccgtggctgtccccgacacctgcctgagcgaaaggtcaagtag

SEQ ID NO: 93387 - DNA, 435 bp, Artificial Sequence
  derived and/or modified sequence
atggaaggccggggtccctatcggatttatgatcccggaggaagcgtccctagcggtgaggctagcgctgccttcgagaggctcgtaaaggagaacagtaggctcaaggagaagatgcaaggaattaaaatgctgggggagttgctggaggagtcccaaatggaagccaccaggctgagacaaaaagcagaggaattggtcaaagacaacgagttgctccccccaccatccccttccctcggctcttttgatcctctcgccgagctgacggggaaggattccaatgtcacagcatcccctactgctccagcctgtccctcggacaaacccgcccccgtccaaaagccaccttcgtcaggcacaagctctgagttcgaggtagttactcctgaggaacagaactctcctgagtctagcagtcacgccaacgcatag

SEQ ID NO: 93388 - DNA, 402 bp, Artificial Sequence
  derived and/or modified sequence
atggagggccggggcccttataggatttatgaccctgggggctcagtgccaagtggggaggcaagtgccgcctttgaacgactggtgaaagaaaattccagactgaaggagaagatgcaaggcatcaaaatgctgggagaattattggaggagtctcagatggaggctacaaggttgcggcagaaagcagaagaacttgtgaaagacaacgaactgctgccacccccctctccatccctgggctcatttgatcctctggccgagttaaccggaaaggattcaaatgtgacagcaagcccaaccgcccccgcgtgcccttctgataaaccagctccagtgcagaagccccctagctccggtacctcaagcgagttcgaagttgtcacccccgaggaacaatag

SEQ ID NO: 93389 - DNA, 774 bp, Artificial Sequence
  derived and/or modified sequence
atggaagccacaaggctgcgccaaaaggcggaggagcttgtcaaggataatgaactgttaccccccccctccccctcgctgggcagcttcgacccacttgcggagctaacaggtaaagactcaaatgtgaccgcatcacctacagcgcctgcatgtccgagcgacaaaccagcacctgtgcaaaaacctccgtcatcaggcacatcatctgagtttgaggtggtgacccctgaggaacaaaactcacccgaatcaagttcgcatgcaaatgctatggcgctcggcccactaccgcgagaggatggcaacctgatgttacatctccagcggcttgagactacactgtccgtctgcgctgaagaaccggatcacggtcagttgtttacacacctaggaagaatggcgctggagttcaataggctggcctccaaggtccataagaacgaacagcgaacatccattctgcagacactctgtgaacaactccggaaggagaatgaggcattgaaggctaagctggataaaggattagagcagcgggaccaagcagctgagcggcttcgcgaggaaaacctggaattaaagaagttgctgatgagcaatggcaacaaggagggcgcctccggccggccaggttcacccaaaatggagggcactggtaagaaggctgtggcaggtcagcaacaggcctcggtcacagcgggtaaagtccccgaggtggtggcattaggcgccgcagagaagaaggtgaagatgctcgaacagcagcggtag

SEQ ID NO: 93390 - DNA, 1671 bp, Artificial Sequence
  derived and/or modified sequence
atggagggccgcgggccttaccgcatctacgacccaggagggtccgttccctctggcgaagcctcagctgccttcgagcgcctggtgaaagaaaactctcggctcaaagagaagatgcagggcattaagatgctgggggaactgttagaggagagccagatggaagcgactcgcttgaggcagaaggccgaagaactggtcaaggacaatgagctcctgcctccaccttctcctagcctcgggtcatttgaccccctggctgaactcacgggaaaggatagtaacgtgaccgcttctccgactgccccagcctgtccctcagacaaacccgcgcccgttcagaagcccccttcttcaggaacctccagcgagtttgaagtggttacccccgaggagcagaatagccccgaaagtagtagccatgcgaatgccatggccttagggcctctgccccgtgaagatgggaatttgatgctacatcttcaaagacttgaaacaacattgtctgtgtgtgcggaagagccagaccatgggcaactgttcacacatctgggcagaatggcgcttgagttcaatcgactcgcatctaaggttcacaaaaacgagcagaggacgagcattttgcagactctgtgcgagcagctgaggaaagagaacgaggccctgaaggccaagcttgataaggggctcgagcagagggaccaggccgccgaaagactccgggaagagaatcttgagctgaaaaagctgctgatgagcaatggaaacaaggaaggggctagtgggcgccccggctcacccaagatggaagggacagggaagaaagctgtcgcaggccagcagcaggccagcgttacagcaggcaaggtccctgaggtcgtggccctgggagctgccgagaagaaagttaagatgctcgaacagcagcgaagtgagttgctggaggtgaacaaacagtgggaccagcacttcagatccatgaagcagcagtatgagcagaaaattaccgagctgcggcagaagctggccgatctccaaaagcaggtaaccgacctggaggctgagagagagcagaagcagagggattttgataggaagctacttctcgcgaaatcgaaaatcgagatggaggagacggataaggagcagctcacagccgaggccaaagaactgcggcagaaagtgaagtatcttcaggaccagttgtctcccttgacacggcagagagagtaccaggaaaaagagatacagagactgaataaggcgctcgaggaggccctgtcaatccagaccccaccctcatcgcctcccacagctttcggaagtcccgagggcgctggtgccctccttagaaagcaggaactggttacccagaacgagctgctgaaacaacaggtgaaaatctttgaggaagacttccagagagaaaggtccgacagggaaaggatgaatgaagagaaggaggagttgaagaaacaggtggaaaagctgcaggctcaggtgactttgtctaatgctcagttaaaagcctttaaagatgaagagaaggccagggaggccttaagacagcagaagagaaaggccaagagcttgcagaagatgactgtgaggggtctgagcgaaaccagactgtgccaccttgcaccccccagcagctgccgggcatcttag

SEQ ID NO: 93391 - DNA, 1542 bp, Artificial Sequence
  derived and/or modified sequence
atgcttggtgagctgctggaggagtcccaaatggaagccacaaggttgcgccagaaagcggaggaactggttaaggataacgaactgctgcctcccccttctccttcactggggtcattcgaccccctggccgaactgactggtaaagactcaaatgtgactgcaagccctaccgcacccgcttgcccaagcgataaaccagcaccagtgcagaagccaccctcttccggcacctcatccgaattcgaggtggtgaccccagaagagcagaacagcccagagtcctcctcacatgccaatgccatggcactgggtccactgccccgtgaggacggaaacctcatgctgcacctccaaagacttgaaacgaccctttccgtctgtgccgaagagccagaccatggtcagctcttcacacatctgggccggatggcgctggagtttaatcgactcgcgagcaaagtccacaaaaacgaacagaggacaagcatccttcagacactgtgtgagcagttacgtaaggaaaatgaagctttaaaggccaaactcgataaaggtttggagcagagagaccaagctgctgagagactgcgagaagagaatcttgaacttaaaaaattgctgatgtctaacggaaacaaggagggcgcctcgggtagacctggtagtccgaaaatggaaggaaccggtaagaaagccgtggctggccagcaacaggcaagcgtgacagctggaaaggtgcccgaggtggtggccttgggcgctgccgagaagaaggtcaaaatgctagagcagcagcgctccgagctgctcgaggtgaataaacagtgggaccagcacttccgcagcatgaaacaacagtatgagcagaaaatcactgaactgcgacagaaattagctgacctgcagaaacaggtgacagatttggaagcggagagagaacagaaacaacgcgactttgatcggaagttgctcctcgctaagtctaagattgagatggaggagacggacaaggagcagctgactgctgaagccaaggaattaagacaaaaagtcaaatatctgcaggaccagctgagtcccctaaccagacagcgcgagtaccaggagaaagagatccagcgcttaaacaaagcccttgaggaggcgctatccatccagaccccaccatcatctccgccaacagcatttggctcacccgaaggcgctggtgcactcctcagaaagcaggaactggtgacacagaacgagcttctcaaacagcaggtgaaaatcttcgaggaggacttccagcgagaaaggagcgatcgggagcggatgaatgaggagaaggaggagctaaaaaagcaggtcgagaagctgcaggcgcaagtgaccttgtccaacgcccagctcaaggcattcaaggatgaggaaaaggcgagagaggcactgaggcaacaaaaacgaaaggccaaaagcctccagaagatgactgtgagagggctttccgaaaccagactatgtcacctagcaccgcctagctcttgtcgcgctagttag

SEQ ID NO: 93392 - DNA, 1509 bp, Artificial Sequence
  derived and/or modified sequence
atgcttggggaactcctggaggaaagccaaatggaggccaccaggctacgccaaaaggcagaggagctagtgaaggataacgagctcctgcccccgccttctcccagcttaggttccttcgaccccctggctgagctgaccgggaaagacagtaacgtaactgcaagcccaaccgctccagcctgtccaagtgacaagccggcaccagtgcaaaagccaccatctagtggcactagctcagaattcgaagtggtcacacccgaggagcagaattcaccagaatctagctcacacgccaatgcaatggccttgggtccgctgccccgcgaagacggtaatttaatgctccatctgcaaaggctcgaaacgaccttgagcgtctgcgccgaagaaccagatcacggccaactgttcactcacttgggaagaatggcgctcgagtttaatcggctagctagcaaggtacacaaaaacgaacagagaacgtcaatactccagacgctgtgcgaacagctacgcaaggaaaacgaggccctgaaggccaaactggataagggtctagagcagagagatcaagctgctgaacgtctgcgcgaagaaaacctcgagttaaaaaagctgctcatgagcaatggaaacaaggaaggcgccagcgggagacccgggtctccaaagatggaaggcacaggtaagaaggccgtggcaggtcagcagcaggcctctgtcaccgccgggaaggttcctgaagtggtggctcttggcgccgcggaaaagaaagttaaaatgctcgagcagcagcggtctgaactcctggaagtgaataagcagtgggatcagcacttccgctccatgaagcagcagtatgagcaaaagataaccgagctgaggcagaagctggccgacctacagaaacaggtgacggacctggaggcggagcgggagcagaagcagagagactttgatcgcaaactgctgttggctaaaagtaagattgaaatggaagagaccgataaagagcagcttaccgcagaggccaaggagcttcggcagaaggtgaagtacctgcaggatcagttgtcaccccttacccgacagagagagtatcaggagaaagagatacagcgtctgaacaaggctctcgaggaggcgcttagcattcaaactccaccatcttcccctcctaccgcatttgggtcacccgaaggggccggcgcgctgctgaggaagcaggagcttgtgacgcaaaatgaactcttaaagcaacaggtgaaaattttcgaggaggactttcagcgggaaaggtccgaccgggagagaatgaatgaagaaaaggaggaactcaagaagcaagtcgagaaattgcaggcccaggtaaccttatccaacgcccagttaaaagccttcaaagacgaggagaaagcccgtgaggctctgagacagcagaagcggaaggctaaaggcacgcatcggggatgcccccgccatctaccggagcgtaaagtgaagtag

SEQ ID NO: 93393 - DNA, 1479 bp, Artificial Sequence
  derived and/or modified sequence
atggaggccacccggctgcggcagaaggccgaggagctggtgaaggacaatgagctgctgcccccacccagccccagcctgggcagctttgaccccctggccgagctgaccgggaaggacagcaatgtgacagccagccccacagccccagcctgccccagcgacaagccagcccctgtgcagaagccacccagcagcggcaccagcagcgagtttgaggtggtgaccccagaggagcagaacagccctgagagcagcagccacgccaatgccatggccctgggccccctgccccgggaggatggcaacctgatgctgcacctgcagaggctggagaccaccctgtctgtgtgtgccgaggagccagaccacggccagctgttcacccacctgggccgcatggccctggagttcaaccggctggccagcaaggtgcacaagaatgagcagaggaccagcatcctgcagaccctgtgtgagcagctgaggaaagaaaatgaggccctgaaggccaagctggacaagggcctggagcagagggaccaggccgctgagcggctgcgggaggagaacctggagctgaagaagctgctgatgagcaatggaaacaaggagggcgccagcggccggcccggcagccccaagatggagggcaccgggaagaaggctgtggccggccagcagcaggcctctgtgacagctgggaaggtgcctgaggtggtggccctgggcgctgctgagaagaaggtgaagatgctggagcagcagaggtctgagctgctggaggtgaacaagcagtgggaccagcacttccgctccatgaagcagcagtatgagcagaagatcacagagctgcggcagaagctggccgacctgcagaagcaggtgacagacctggaggccgagcgggagcagaagcagagggactttgacaggaagctgctgctggccaagagcaagattgagatggaggagacagacaaggagcagctgacagctgaggccaaggagctgcggcagaaggtgaagtacctgcaggaccagctgagccccctgacccggcagcgggagtaccaggagaaggagatccagaggctgaacaaggccctggaggaggccctgagcatccagaccccacccagcagccccccaacagccttcggcagccctgagggcgctggggccctgctgaggaagcaggagctggtgacccagaatgagctgctgaagcagcaggtgaagatctttgaggaggacttccagcgggagaggagtgaccgggagaggatgaatgaggagaaggaggagctgaagaagcaggtggagaagctgcaggcccaggtgaccctgagcaatgcccagctgaaggccttcaaggatgaggagaaggcccgggaggccctgcggcagcagaagaggaaggccaagggcacccaccggggctgccccaggcacctgcctgagaggaaggtgaagtag

SEQ ID NO: 93394 - DNA, 435 bp, Artificial Sequence
  derived and/or modified sequence
atggagggccggggcccctaccgcatctatgaccccggcggctctgtgcccagcggggaggccagcgctgcctttgagcggctggtgaaggagaacagccggctgaaggagaagatgcagggcatcaagatgctgggggagctgctggaggagagccagatggaggccacccggctgcggcagaaggccgaggagctggtgaaggacaatgagctgctgcccccacccagccccagcctgggcagctttgaccccctggccgagctgaccgggaaggacagcaatgtgacagccagccccacagccccagcctgccccagcgacaagccagcccctgtgcagaagccacccagcagcggcaccagcagcgagtttgaggtggtgaccccagaggagcagaacagccctgagagcagcagccacgccaatgcctag

SEQ ID NO: 93395 - DNA, 402 bp, Artificial Sequence
  derived and/or modified sequence
atggagggccggggcccctaccgcatctatgaccccggcggctctgtgcccagcggggaggccagcgctgcctttgagcggctggtgaaggagaacagccggctgaaggagaagatgcagggcatcaagatgctgggggagctgctggaggagagccagatggaggccacccggctgcggcagaaggccgaggagctggtgaaggacaatgagctgctgcccccacccagccccagcctgggcagctttgaccccctggccgagctgaccgggaaggacagcaatgtgacagccagccccacagccccagcctgccccagcgacaagccagcccctgtgcagaagccacccagcagcggcaccagcagcgagtttgaggtggtgaccccagaggagcagtag

SEQ ID NO: 93396 - DNA, 774 bp, Artificial Sequence
  derived and/or modified sequence
atggaggccacccggctgcggcagaaggccgaggagctggtgaaggacaatgagctgctgcccccacccagccccagcctgggcagctttgaccccctggccgagctgaccgggaaggacagcaatgtgacagccagccccacagccccagcctgccccagcgacaagccagcccctgtgcagaagccacccagcagcggcaccagcagcgagtttgaggtggtgaccccagaggagcagaacagccctgagagcagcagccacgccaatgccatggccctgggccccctgccccgggaggatggcaacctgatgctgcacctgcagaggctggagaccaccctgtctgtgtgtgccgaggagccagaccacggccagctgttcacccacctgggccgcatggccctggagttcaaccggctggccagcaaggtgcacaagaatgagcagaggaccagcatcctgcagaccctgtgtgagcagctgaggaaagaaaatgaggccctgaaggccaagctggacaagggcctggagcagagggaccaggccgctgagcggctgcgggaggagaacctggagctgaagaagctgctgatgagcaatggaaacaaggagggcgccagcggccggcccggcagccccaagatggagggcaccgggaagaaggctgtggccggccagcagcaggcctctgtgacagctgggaaggtgcctgaggtggtggccctgggcgctgctgagaagaaggtgaagatgctggagcagcagaggtag

SEQ ID NO: 93397 - DNA, 1671 bp, Artificial Sequence
  derived and/or modified sequence
atggagggccggggcccctaccgcatctatgaccccggcggctctgtgcccagcggggaggccagcgctgcctttgagcggctggtgaaggagaacagccggctgaaggagaagatgcagggcatcaagatgctgggggagctgctggaggagagccagatggaggccacccggctgcggcagaaggccgaggagctggtgaaggacaatgagctgctgcccccacccagccccagcctgggcagctttgaccccctggccgagctgaccgggaaggacagcaatgtgacagccagccccacagccccagcctgccccagcgacaagccagcccctgtgcagaagccacccagcagcggcaccagcagcgagtttgaggtggtgaccccagaggagcagaacagccctgagagcagcagccacgccaatgccatggccctgggccccctgcccagagaagatggcaacctgatgctgcacctgcagaggctggagaccaccctgtctgtgtgtgccgaggagccagaccacggccagctgttcacccacctgggccgcatggccctggagttcaaccggctggccagcaaggtgcacaagaatgagcagaggaccagcatcctgcagaccctgtgtgagcagctgaggaaagaaaatgaggccctgaaggccaagctggacaagggcctggagcagagggaccaggccgctgagcggctgcgggaggagaacctggagctgaagaagctgctgatgagcaatggaaacaaggagggcgccagcggccggcccggcagccccaagatggagggcaccgggaagaaggctgtggccggccagcagcaggcctctgtgacagctgggaaggtgcctgaggtggtggccctgggcgctgctgagaagaaggtgaagatgctggagcagcagaggtctgagctgctggaggtgaacaagcagtgggaccagcacttccgctccatgaagcagcagtatgagcagaagatcacagagctgcggcagaagctggccgacctgcagaagcaggtgacagacctggaggccgagcgggagcagaagcagagggactttgacaggaagctgctgctggccaagagcaagattgagatggaggagacagacaaggagcagctgacagctgaggccaaggagctgcggcagaaggtgaagtacctgcaggaccagctgagccccctgacccggcagcgggagtaccaggagaaggagatccagaggctgaacaaggccctggaggaggccctgagcatccagaccccacccagcagccccccaacagccttcggcagccctgagggcgctggggccctgctgaggaagcaggagctggtgacccagaatgagctgctgaagcagcaggtgaagatctttgaggaggacttccagcgggagaggagtgaccgggagaggatgaatgaggagaaggaggagctgaagaagcaggtggagaagctgcaggcccaggtgaccctgagcaatgcccagctgaaggccttcaaggatgaggagaaggcccgggaggccctgcggcagcagaagaggaaggccaagagcctgcagaagatgacagtgcggggcctgtctgagacccggctgtgccacctggccccacccagcagctgccgggccagctag

SEQ ID NO: 93398 - DNA, 1542 bp, Artificial Sequence
  derived and/or modified sequence
atgctgggggagctgctggaggagagccagatggaggccacccggctgcggcagaaggccgaggagctggtgaaggacaatgagctgctgcccccacccagccccagcctgggcagctttgaccccctggccgagctgaccgggaaggacagcaatgtgacagccagccccacagccccagcctgccccagcgacaagccagcccctgtgcagaagccacccagcagcggcaccagcagcgagtttgaggtggtgaccccagaggagcagaacagccctgagagcagcagccacgccaatgccatggccctgggccccctgccccgggaggatggcaacctgatgctgcacctgcagaggctggagaccaccctgtctgtgtgtgccgaggagccagaccacggccagctgttcacccacctgggccgcatggccctggagttcaaccggctggccagcaaggtgcacaagaatgagcagaggaccagcatcctgcagaccctgtgtgagcagctgaggaaagaaaatgaggccctgaaggccaagctggacaagggcctggagcagagggaccaggccgctgagcggctgcgggaggagaacctggagctgaagaagctgctgatgagcaatggaaacaaggagggcgccagcggccggcccggcagccccaagatggagggcaccgggaagaaggctgtggccggccagcagcaggcctctgtgacagctgggaaggtgcctgaggtggtggccctgggcgctgctgagaagaaggtgaagatgctggagcagcagaggtctgagctgctggaggtgaacaagcagtgggaccagcacttccgctccatgaagcagcagtatgagcagaagatcacagagctgcggcagaagctggccgacctgcagaagcaggtgacagacctggaggccgagcgggagcagaagcagagggactttgacaggaagctgctgctggccaagagcaagattgagatggaggagacagacaaggagcagctgacagctgaggccaaggagctgcggcagaaggtgaagtacctgcaggaccagctgagccccctgacccggcagcgggagtaccaggagaaggagatccagaggctgaacaaggccctggaggaggccctgagcatccagaccccacccagcagccccccaacagccttcggcagccctgagggcgctggggccctgctgaggaagcaggagctggtgacccagaatgagctgctgaagcagcaggtgaagatctttgaggaggacttccagcgggagaggagtgaccgggagaggatgaatgaggagaaggaggagctgaagaagcaggtggagaagctgcaggcccaggtgaccctgagcaatgcccagctgaaggccttcaaggatgaggagaaggcccgggaggccctgcggcagcagaagaggaaggccaagagcctgcagaagatgacagtgcggggcctgtctgagacccggctgtgccacctggccccacccagcagctgccgggccagctag

SEQ ID NO: 93399 - DNA, 1509 bp, Artificial Sequence
  derived and/or modified sequence
atgctgggggagctgctggaggagagccagatggaggccacccggctgcggcagaaggccgaggagctggtgaaggacaatgagctgctgcccccacccagccccagcctgggcagctttgaccccctggccgagctgaccgggaaggacagcaatgtgacagccagccccacagccccagcctgccccagcgacaagccagcccctgtgcagaagccacccagcagcggcaccagcagcgagtttgaggtggtgaccccagaggagcagaacagccctgagagcagcagccacgccaatgccatggccctgggccccctgccccgggaggatggcaacctgatgctgcacctgcagaggctggagaccaccctgtctgtgtgtgccgaggagccagaccacggccagctgttcacccacctgggccgcatggccctggagttcaaccggctggccagcaaggtgcacaagaatgagcagaggaccagcatcctgcagaccctgtgtgagcagctgaggaaagaaaatgaggccctgaaggccaagctggacaagggcctggagcagagggaccaggccgctgagcggctgcgggaggagaacctggagctgaagaagctgctgatgagcaatggaaacaaggagggcgccagcggccggcccggcagccccaagatggagggcaccgggaagaaggctgtggccggccagcagcaggcctctgtgacagctgggaaggtgcctgaggtggtggccctgggcgctgctgagaagaaggtgaagatgctggagcagcagaggtctgagctgctggaggtgaacaagcagtgggaccagcacttccgctccatgaagcagcagtatgagcagaagatcacagagctgcggcagaagctggccgacctgcagaagcaggtgacagacctggaggccgagcgggagcagaagcagagggactttgacaggaagctgctgctggccaagagcaagattgagatggaggagacagacaaggagcagctgacagctgaggccaaggagctgcggcagaaggtgaagtacctgcaggaccagctgagccccctgacccggcagcgggagtaccaggagaaggagatccagaggctgaacaaggccctggaggaggccctgagcatccagaccccacccagcagccccccaacagccttcggcagccctgagggcgctggggccctgctgaggaagcaggagctggtgacccagaatgagctgctgaagcagcaggtgaagatctttgaggaggacttccagcgggagaggagtgaccgggagaggatgaatgaggagaaggaggagctgaagaagcaggtggagaagctgcaggcccaggtgaccctgagcaatgcccagctgaaggccttcaaggatgaggagaaggcccgggaggccctgcggcagcagaagaggaaggccaagggcacccaccggggctgccccaggcacctgcctgagaggaaggtgaagtag

SEQ ID NO: 93400 - DNA, 1479 bp, Artificial Sequence
  derived and/or modified sequence
atggaggccacccggctgcggcagaaggccgaggagctggtgaaggacaacgaactgcttcccccccctagccccagtctggggtctttcgaccctctcgccgagctgactggtaaggactcaaatgttaccgctagcccaacagcaccggcgtgtccaagtgacaagccagccccagtacagaagcctccttcttccgggacatccagcgaattcgaggtggttacacccgaggagcagaattcgccggagtctagcagtcatgccaacgcgatggccttggggcccctgccacgggaagacggcaatctcatgctgcatctgcagagactggaaactacactgtctgtctgtgctgaagagcccgatcacgggcagttgttcacccacctggggaggatggctctggaatttaatagactagctagtaaggtgcacaaaaatgagcaaagaaccagcatcctgcaaaccctctgtgaacagctccgcaaggaaaatgaggctctaaaggccaaattggataaaggactcgagcagagggatcaggccgccgaaaggctgcgtgaggaaaacctggagcttaaaaagctcctgatgagcaacggaaacaaggagggcgcttctggacgacctgggtcacctaaaatggagggcacgggtaagaaggctgtggccggtcagcagcaggcatccgttaccgccggtaaagtgccagaggtcgtggccctgggcgcagcagaaaagaaggtgaagatgctggagcagcagcgctctgagttgcttgaggtgaataaacagtgggatcagcacttccggtccatgaaacagcagtacgaacagaagatcacagagctgcggcagaaattagctgacctgcagaagcaagtgacagacttggaggccgaacgcgagcaaaaacaacgggacttcgacagaaaactgctgctggcgaaaagcaaaatagaaatggaagagacggataaggaacaattaaccgcagaagcgaaagagctcaggcagaaggtcaagtatctgcaggatcagctgtcccctcttacacggcagagggagtaccaagaaaaagagatacagaggcttaacaaagccctggaagaggccttgtccatccagactcccccttctagcccacctacggcttttggctctcctgagggtgcaggggctctcctccgtaaacaggaactcgtgactcagaacgagcttcttaagcagcaggtcaagatctttgaggaagactttcagcgagagagaagtgatagggagcgtatgaacgaggaaaaggaggaactgaagaagcaggtcgagaaattgcaggctcaggtgaccctgagcaatgctcagctgaaagcttttaaggacgaggagaaggctcgtgaggcgttgcggcaacagaagaggaaggctaagggaacccatcgaggctgtcctcggcatctcccagagaggaaggtgaagtag

SEQ ID NO: 93401 - DNA, 435 bp, Artificial Sequence
  derived and/or modified sequence
atggagggccggggcccctaccggatctacgaccccggcggcagcgtgccctctggggaggcctctgctgccttcgaacgcctggtgaaggagaactcccgccttaaggagaagatgcaggggatcaagatgcttggggaacttcttgaagaatctcaaatggaagccacacgcctccgccagaaggctgaggagctggtgaaagacaacgaactgctgccaccaccaagtccttctctcgggtcgttcgaccccctggcagaacttacgggcaaagattccaacgtgacagcttccccaacggcacccgcatgcccaagtgacaaaccggctccagtgcagaagcctccgagctctggaacgtcgtcagagtttgaggtagtgacccctgaggaacagaattcgcctgagtcttcctcccacgccaacgcctag

SEQ ID NO: 93402 - DNA, 402 bp, Artificial Sequence
  derived and/or modified sequence
atggagggccggggcccctaccggatctacgaccccggcggcagcgtgcccagtggagaggcctctgccgcattcgaaaggctggtcaaagagaactcaaggttgaaagagaagatgcagggaatcaagatgctgggcgagctgctcgaggagagccaaatggaggctacccgacttaggcagaaagcagaggagctcgttaaagacaacgaattgctacctccaccttctcccagtctaggctctttcgaccctctagccgaactgaccggcaaggattccaatgtgaccgcttcaccaactgcgcctgcgtgccctagcgacaaaccagcacccgtacagaaacctccttctagtggaaccagcagcgaattcgaggtcgtcacgcctgaagagcagtag

SEQ ID NO: 93403 - DNA, 774 bp, Artificial Sequence
  derived and/or modified sequence
atggaggccacccggctgcggcagaaggccgaggagctggtgaaggataatgagttactgccccccccaagtcccagccttggctctttcgatccgttagcagagcttacggggaaagactcaaacgtcacggcttcaccgactgcaccggcctgccctagtgataagcccgccccagtccagaagccccccagctcagggacgagttctgagttcgaagtcgtgacccccgaagagcagaatagtcccgagagtagttcacacgccaatgccatggccctgggccccctccccagggaggatggaaatctgatgttgcatttgcagagactcgagaccactctgtcagtttgcgctgaggagcctgatcacggccagttattcacccacctgggaagaatggcccttgaattcaataggctcgccagcaaggtccacaaaaacgaacagcggacatcaattctgcagaccctctgcgaacaactgcggaaggagaatgaagcactgaaggccaagctcgataaagggctagagcagagggaccaggcggcagaacggctgcgggaggaaaatctggagctgaagaagctacttatgtcgaatggcaataaagagggggccagtgggcggccagggagtcctaagatggagggcaccgggaaaaaggctgtcgctggacaacagcaagcctccgtgacggccggcaaagtcccagaggttgtagccttgggagccgccgaaaagaaggtgaaaatgctggaacagcagcgctag

SEQ ID NO: 93404 - DNA, 1671 bp, Artificial Sequence
  derived and/or modified sequence
atggagggccggggcccctaccggatctacgaccccggcggcagcgtacccagtggcgaggcctcggccgcgtttgagagactcgtcaaagagaatagccggctaaaagaaaagatgcagggtattaagatgctgggggaacttttagaagagtcacagatggaggccaccaggttacgtcaaaaggctgaggaactggttaaagataacgagctgttgcccccgcccagcccgtccctcggctctttcgaccctctggccgagctgactggtaaggacagcaacgttactgccagcccgacagctcctgcctgccctagtgataaaccagctcccgtgcagaagccgcccagcagcgggacgagttcagagttcgaggtggtcacgcctgaggaacaaaacagtcctgagtcatcatctcacgctaacgccatggcgttaggcccactgcctcgcgaggacggaaatctgatgctgcacttgcagcggttagagacaaccttaagtgtctgcgccgaagagccagatcatggacagctatttacacacctgggccgcatggctcttgaattcaacagacttgcaagcaaggtccataagaacgaacagcggacatccatcctgcaaacattatgcgaacaactgcggaaggagaacgaagcactcaaggcaaagctcgacaagggacttgagcagagagatcaagcagcagaaagattacgggaagagaatctcgagctgaaaaaactgctgatgtcaaatgggaataaagaaggcgcctccggtagacctggatcacctaaaatggaggggaccggcaaaaaggctgtggctgggcagcaacaggcctcagtgaccgccggtaaagtcccggaagtggtagctctcggtgccgccgaaaagaaagttaagatgctggagcagcaacgcagtgaactgttagaagtgaataaacaatgggatcagcatttccgctcaatgaagcagcagtacgagcagaagatcacagaactcagacagaaattagctgacttgcagaagcaggtcactgacttggaagccgagcgggaacaaaagcagagggactttgatcgtaagttattactggccaagtccaaaattgaaatggaggagacagacaaagagcagctgaccgcggaagccaaagagcttcgtcaaaaggtgaagtatctgcaggatcaactgtctcctctcactcggcagcgggagtatcaagagaaagaaatacagcgcttgaataaagccctggaggaggctcttagcatccaaacccccccttccagccccccaaccgctttcggttcccccgaaggagcaggtgccctcctcagaaaacaagagctcgtgacacagaacgagctcctgaaacagcaggtgaagatcttcgaagaagactttcaacgcgaaagatcagatcgtgagaggatgaatgaggaaaaagaggagcttaaaaagcaagtggagaaactgcaggcacaggtgacgctgtcaaatgctcagctcaaagcctttaaagatgaagaaaaggcccgtgaggctctgaggcagcaaaagaggaaggccaagagccttcagaaaatgaccgtccgcggcctcagcgagacgcggctttgtcacctggccccaccctctagctgtcgggcctcttag

SEQ ID NO: 93405 - DNA, 1542 bp, Artificial Sequence
  derived and/or modified sequence
atgctgggcgagctgctggaggagagccagatggaggccacccggctaaggcagaaggctgaggagctggtgaaagacaatgaactgcttccaccaccgtccccctccctaggaagctttgacccacttgcagagctgacagggaaagactctaatgtgacagcctccccaacagcaccggcatgcccctcagataagcccgcaccggtccagaagccccccagcagtggcacgagcagcgagttcgaggtggttacaccggaggagcagaatagcccagagtcctcttcacatgccaacgctatggcattaggcccactccctcgtgaagacggtaatctgatgctgcatttgcagcggctggagactacattgagcgtctgcgccgaagagcctgaccatgggcagctcttcacacatttaggccgcatggcactggagtttaacaggctggcatccaaggttcacaagaatgagcagcggaccagtattctgcagacattgtgtgaacaacttcgcaaagagaatgaagccctgaaagcgaagctcgacaaaggactggaacagcgcgaccaagccgcagagaggctacgggaggagaatctagagctcaaaaagctgctgatgagcaatggtaacaaggaaggagcttccgggcggccgggcagcccaaaaatggaaggcacaggcaagaaagctgtggccgggcagcaacaggctagcgtgaccgccgggaaagtgccggaagtagtcgcactgggtgcggcagaaaaaaaagtgaagatgctggaacagcagagatcagagttgcttgaagttaacaaacagtgggatcagcactttcggtcaatgaaacagcagtacgagcagaagatcactgaactgcgccagaaactggccgacttgcagaagcaggtgactgacctggaagctgagagggagcaaaaacagagggattttgaccggaaactgctgctcgctaaaagcaagatcgaaatggaggaaacagacaaagaacagctgacggcagaagccaaggagctgcgacagaaagttaaatatttacaagaccagctgtcccctctgacacgccagagggaatatcaagaaaaagaaatccagcggctcaataaggcactggaggaagcactgtccatccagacgccaccttcatctccaccgaccgctttcgggtcacccgaaggagccggcgcccttctgcggaagcaggagctcgtgacgcagaatgaactgctcaaacagcaggtcaaaatttttgaggaagattttcagagggaaagatcagatagagagcgaatgaacgaggagaaggaagagcttaaaaagcaggttgaaaaattgcaggcccaagtgacactgtccaacgctcaactgaaagcctttaaggacgaggaaaaggctcgtgaggccttacgccaacagaagcgcaaggccaaatcgctgcagaaaatgacggtgcggggcctgtcagaaacgcgcctgtgccacttggccccacctagttcttgtcgtgcttcctag

SEQ ID NO: 93406 - DNA, 1509 bp, Artificial Sequence
  derived and/or modified sequence
atgctgggcgagctgctggaggagagccagatggaggccacccggctgaggcagaaggccgaggagcttgtaaaagataatgagcttcttcctccaccctctcccagtctggggtcctttgatcccctcgctgagctgactggcaaagacagcaacgtgaccgcttcccctactgccccagcgtgtccttccgacaaacctgcgcctgtgcagaagcccccctcttctggaaccagcagtgagtttgaggtggttacacccgaggaacagaattcccccgaaagctcctctcacgctaacgctatggctttaggtcctttacctagggaagatgggaacctgatgctgcacctgcagagactggagaccactcttagtgtttgcgctgaggaacctgatcacggacagctcttcacacatctggggaggatggctctggagtttaacagacttgcgagcaaggtgcataagaatgaacaacggacaagcatcctacagaccctgtgcgaacagctgcgtaaggagaatgaggctctcaaggcaaaactcgataaaggacttgagcaacgtgaccaggctgctgaacgcctcagagaggagaacctcgagctcaagaagctgctcatgtctaatggcaacaaggagggggccagcgggcgccccgggtctccaaaaatggaaggcactggtaagaaagctgtagccggccaacagcaggctagtgtgaccgcgggcaaagtacctgaggtagtggcgttaggggcggcggaaaaaaaggtgaagatgttggaacaacagcgctcagagctgctggaagtgaataagcagtgggatcagcatttccgctcaatgaagcaacagtatgagcagaagattactgagttacgacaaaaactagccgacctccagaagcaagtaaccgatctagaggcagagagagagcagaaacagagggactttgatcgcaagctcttgctcgcaaagagtaaaatagaaatggaggaaaccgacaaggaacagttgactgctgaggctaaggaactacggcagaaggttaagtacttgcaagaccagctctcccccttgacgaggcagagagagtaccaggagaaggaaatccagaggttgaacaaagccctggaggaggccctgtctatccagactccaccctcttcccccccgactgcctttggctccccagagggtgctggagccctgctgagaaagcaggagttggtcacacagaatgaactcctgaagcagcaggtcaaaatcttcgaggaagacttccaacgcgagagaagtgaccgcgagcgaatgaacgaagaaaaagaagagctgaagaagcaggtggagaagcttcaggcgcaggtgacactgtccaacgctcaactcaaggctttcaaggatgaggaaaaggcccgagaagcattgagacaacagaagaggaaagcgaagggcacccatcgggggtgccctaggcaccttcccgaacgcaaagtgaaatag

SEQ ID NO: 93407 - DNA, 1479 bp, Artificial Sequence
  derived and/or modified sequence
atggaggccacacgcctgcggcagaaggccgaagagctggtgaaagataatgagctcctaccccctccttcaccctccctgggaagcttcgaccccctcgccgagctgaccggcaaagatagtaacgtaaccgcaagtcctacagccccagcttgtcccagcgataagcctgctcccgtgcagaagcccccaagttcaggcacctcttcagaatttgaagtcgtcacccccgaggagcagaatagcccagaatcctcgagccacgcgaatgccatggcgcttggaccactgcccagggaggatggcaacctgatgttacacctgcagcgtttggaaacaactctctcggtatgtgcagaagagccagatcacggccagctgtttactcatctgggaaggatggcactggaattcaaccggctggctagcaaagttcataaaaacgagcaacggacaagcatcctgcagaccttatgcgaacaactgcgtaaggaaaacgaagccctgaaggcaaagctggataagggactggaacaaagagatcaggcagctgaaagattacgggaagagaacctggaactcaagaaactcttgatgtcaaatgggaacaaggagggagcgtccggcaggccgggtagccctaagatggaaggaaccggtaagaaagcagtggcaggacagcaacaggcaagcgtgacggccggaaaagtgcccgaagttgtcgctcttggcgctgccgagaagaaagtgaaaatgctggaacagcaaagatctgagttattggaggtcaacaaacagtgggatcagcatttccgttctatgaagcagcaatacgagcagaagatcaccgaactgcggcaaaagctggcggatctccagaaacaggtgacggatctggaagccgaaagagaacaaaaacaaagagacttcgatcggaagctcctgctggcaaaatcaaagatcgaaatggaggaaactgataaagaacaactcaccgcggaggcaaaggaactccggcagaaggtcaaatatctacaggatcaactgagccctctgactagacaaagggaataccaggagaaagagatacagaggttaaataaggcgttggaggaggcattgagtatccaaaccccacctagctccccacctacagctttcggttctcccgagggtgctggggctctcctgcgtaagcaggaactggtaacacagaacgaactcttgaaacagcaggtcaagattttcgaggaggattttcagcgagagcggtccgatagggagcgtatgaatgaggaaaaagaagaactgaaaaaacaagtggagaagctccaggctcaagttacactctccaacgcccagcttaaggcatttaaagacgaagagaaagcccgtgaagctttacggcaacaaaagcgtaaggccaaaggaacccatagaggctgcccccgtcatctgcccgagcggaaagttaaatag

SEQ ID NO: 93408 - DNA, 435 bp, Artificial Sequence
  derived and/or modified sequence
atggaaggtcggggaccctatagaatctatgatcccggtgggtctgttccctccggggaggccagtgcggcttttgaacgattggtcaaagaaaatagccgattgaaagagaaaatgcaggggattaaaatgttgggtgaacttttggaagaaagtcaaatggaggccactagactgaggcagaaggctgaagagctcgtgaaggacaacgagctcctgccccctccatcaccttctctaggctcattcgacccacttgctgaattgaccggtaaggatagtaacgtgactgccagtcctaccgctccagcctgtccatctgacaagcctgctccagtgcagaagcccccaagcagtggcacctcctctgaattcgaagtggtgacaccggaggagcaaaattcaccagagtcgtcttctcacgcgaacgcctag

SEQ ID NO: 93409 - DNA, 402 bp, Artificial Sequence
  derived and/or modified sequence
atggagggtcgcggtccatacagaatttacgatcccggagggtctgttccttccggggaggcgtccgcagcattcgagcgcctggtgaaagaaaattctcgactgaaagagaagatgcaaggaattaagatgctcggcgaactgttagaggaatctcagatggaggccacccgcctgcgccaaaaagccgaggaacttgtaaaggataatgaactcttgccacccccttccccttccctgggctcatttgatcccctagcagagctgaccgggaaagatagtaatgtcaccgccagccccactgccccagcttgtcctagtgacaaaccggctcccgtccaaaagcctccttctagtggcacatcgagcgaattcgaagtggtgacacccgaagaacagtag

SEQ ID NO: 93410 - DNA, 774 bp, Artificial Sequence
  derived and/or modified sequence
atggaagctacccgcctgaggcagaaggcagaagagttggtcaaggataatgagctgcttcctcctccatcccccagtctgggatctttcgacccactggctgaattgaccgggaaagatagcaacgtgaccgcgagccccactgcgcctgcctgtcctagtgacaagcccgctcctgtgcagaagccaccgtcttcaggcacatcctcagaattcgaagttgtcacccctgaagagcagaactctcccgagagctccagtcatgccaacgctatggcactcggtccacttccccgtgaagacggcaatctcatgctgcaccttcagcgcctcgagacaaccctcagcgtttgcgccgaagaacctgatcacggacagctattcactcacctgggacgcatggctttagagtttaaccggctggcaagtaaggtccacaagaatgagcaacgcaccagcatcctgcagaccctgtgcgaacagctcaggaaggaaaacgaagctctcaaggctaagctcgataagggcctcgaacaacgtgaccaggctgctgagcggctccgtgaggaaaatctggagctcaaaaaattgcttatgtccaatggaaacaaagagggggcatccgggagacctggtagccctaaaatggagggcaccgggaaaaaagccgtagcagggcagcagcaggccagcgttacagctggcaaagtcccggaggtcgttgcactgggcgcagctgagaaaaaggtgaaaatgctcgagcagcagcgctag

SEQ ID NO: 93411 - DNA, 1671 bp, Artificial Sequence
  derived and/or modified sequence
atggaaggcaggggtccctaccgaatctacgaccctggcggaagcgtccctagcggagaggccagcgctgcctttgagcgtcttgtgaaggaaaactccagattgaaggaaaagatgcagggcatcaaaatgctaggagaactgctggaggagagtcagatggaggccacccgactgaggcagaaagctgaggaactcgtaaaggataatgagcttctccccccaccctctcctagcttgggctccttcgatcccctggctgagctgacaggaaaagactccaacgtcactgccagtcctacagcgcctgcctgtccttccgacaaaccagccccagtgcagaaacctcccagtagcggcacatcttcagagtttgaagtcgttactccagaggaacaaaactccccagaatcctctagccacgccaacgctatggccctagggccacttcccagagaagatgggaacctgatgttgcatctgcagaggctcgagaccactctctcagtgtgcgccgaggagcctgatcacggccagctgttcactcatctgggtagaatggccttggaatttaaccggcttgcatcgaaagttcacaaaaacgaacagcgaacttccattcttcagaccctttgcgagcagctgcgcaaagagaacgaggccctgaaggccaagctggataaaggcctggagcagagggatcaggctgcagaacgcctgagggaagagaatctcgagctgaagaagctgctgatgtccaatggtaataaggagggcgcttcaggccgacccggaagtccaaagatggagggcactggcaaaaaagctgtggccggtcagcagcaagcatccgttaccgcaggaaaagttcccgaagtagtggccctcggagccgctgagaaaaaagtgaaaatgcttgagcaacagcgtagcgaattgctggaggtgaataagcagtgggatcaacacttccgatctatgaagcagcagtatgagcagaaaatcaccgaactgagacagaagctagccgacctgcagaagcaggtcacggatctagaggctgagcgagagcagaaacagcgagactttgaccgcaagttgttgcttgccaagtcaaagatcgaaatggaagaaaccgacaaagaacagctaacagccgaggctaaggagttgcgacagaaggtgaagtacctccaggatcagctgagccccctgactaggcagcgcgaataccaggaaaaagagatacaaaggctgaacaaggctctggaggaagcgctgtcaattcagacacccccttccagtcctcctaccgccttcggttctcccgagggggcaggtgcactcctgcggaagcaagaattggtcactcagaacgaacttcttaaacagcaggtgaagatctttgaagaagacttccagagggagcgtagcgatcgagagcgaatgaatgaggagaaagaggagctgaagaagcaggttgagaagctgcaggcccaggtaaccctcagtaacgcacagctgaaggcctttaaggacgaggagaaggcgagggaagcgctgaggcagcagaaaaggaaggctaagtcgctgcaaaagatgaccgttaggggtctctccgagacaaggctgtgtcacctcgcccctccgtcgtcatgcagggcctcctag

SEQ ID NO: 93412 - DNA, 1542 bp, Artificial Sequence
  derived and/or modified sequence
atgctcggggaactcctggaagagtctcagatggaggcaacaaggctgcgtcagaaagccgaagaattggtgaaggataatgagttgcttccacccccaagccctagcctgggctccttcgacccactcgcagaacttacaggaaaagatagcaatgtgacagcatcccctacggcccctgcctgtccttccgacaaaccggctccggtgcagaaaccgccttccagcggcacctcctccgaatttgaagttgtaacccccgaagagcagaactcccccgagtcttctagtcacgccaatgctatggcgttaggccctctgccccgtgaggacggcaatctgatgttgcacctgcagcggctggagacaaccctaagcgtttgcgcagaagagccagatcatggccaactgttcacccatcttgggcgtatggccctggaatttaatcgtctggcatccaaggttcacaagaatgaacagcgcacctccatattgcagaccctgtgcgaacaactcaggaaggaaaacgaggccctcaaagcaaagctggacaaagggctcgaacagagagaccaggccgctgagcgacttagagaggagaatcttgagctgaaaaagctgctgatgtctaacggtaataaggagggagcatcaggcaggcccggtagtcctaaaatggagggaactggaaaaaaagcagtggcaggacagcaacaggcctcggtcacagctggaaaagtcccagaagttgtggctctcggggcagcggagaagaaggtcaagatgctggaacagcagaggagcgaactcctggaagttaacaaacagtgggatcagcatttcaggtccatgaaacagcaatatgaacagaagatcacggagctaagacagaaacttgccgatttacagaagcaggtgacagacctagaagctgagagagagcagaagcagcgcgatttcgaccgaaagctgctcctagccaagagtaagatcgagatggaagagaccgacaaggaacaactgacggccgaggccaaagagctgagacagaaggtgaagtatttacaagaccagctaagccctctcacgaggcagcgggagtatcaggagaaggagatccagcgattaaacaaggcactagaggaggctctgagtatccagacacctccttccagcccgccaacagcttttgggtcacctgaaggggctggcgcactgctgcgtaaacaggagctggtgacacagaatgagctcctgaaacagcaggtgaagatttttgaggaggactttcagcgcgaacgctcagaccgggaacgtatgaatgaggagaaggaggaactgaaaaagcaggtcgaaaagttgcaggcccaagtaacccttagcaacgcccaactaaaagccttcaaagacgaggagaaagctcgtgaagccctaagacagcagaagaggaaggccaagtcgcttcagaagatgactgtccgaggtctaagtgagacccgactttgtcacctagctccaccaagttcctgtagggcctcatag

SEQ ID NO: 93413 - DNA, 1509 bp, Artificial Sequence
  derived and/or modified sequence
atgctgggagaactgttggaagaaagtcagatggaggccacaagattacggcaaaaggcggaggaactcgtcaaggataatgagctcctgccccctccctcaccaagcctgggatcgttcgatcctttagccgaattgacaggcaaggatagtaacgttaccgcatccccaacagccccagcttgccccagcgataagccagccccagtgcagaagcctccttcaagtggaacaagttcggagtttgaggtcgtgactcccgaagaacagaactctccagaatccagcagccacgctaatgcgatggccctagggcctctacctagagaagacggaaatctgatgctgcatttgcagcgcctggaaactacgctgagtgtgtgcgccgaggagccagatcacgggcagctgtttacgcacctgggtagaatggccctggagtttaaccgtcttgcctccaaggtgcacaagaatgaacagaggacatccatcttacaaacactctgtgagcagctgcgcaaagaaaatgaggcccttaaggccaagcttgataaggggttggaacagagagatcaagccgctgaaagattgcgcgaagagaatcttgaactgaagaaactcttgatgtcaaacgggaataaggaaggagcgagcggcaggccagggagcccaaagatggaaggaacgggaaagaaagctgtggcaggacagcaacaggcgtctgttacggcagggaaggtgccagaagtagttgctttgggggcagccgaaaaaaaagtgaagatgctagaacagcagagaagcgagttgctggaggtgaataagcaatgggaccaacacttccgcagtatgaagcaacagtacgagcagaaaataactgagctgaggcaaaaattagcggacctccaaaagcaagtgaccgatttagaggcggagagggagcagaagcagagagactttgacagaaaactgcttctagctaagagtaagattgaaatggaagagacagataaagagcagctcactgccgaggcaaaggagctcagacagaaggtcaaatatctccaggatcagctcagccctctgacccgccagagggaataccaggaaaaagagattcagagattgaacaaggccctggaagaggcactgtctattcagacccctccaagtagccctccaacagccttcggctcccctgagggcgctggcgctctgctgagaaagcaggagctggtcacgcagaacgagctcctcaaacaacaggtcaagatcttcgaggaggactttcagcgcgaacgtagcgatcgagagcgcatgaacgaggagaaggaggaactgaagaagcaggtggagaagctacaggcccaggttacactgtcgaacgcacagcttaaggctttcaaggatgaggagaaggctcgggaggctctaaggcagcagaagagaaaagctaaagggacccaccgcggttgccctcgacacctgccagagcgcaaggtcaagtag

SEQ ID NO: 93414 - DNA, 1815 bp, Artificial Sequence
  derived and/or modified sequence
gggagcttttggaagagtcccagatggaagcgaccaggctccggcagaaggcagaggagctagtgaaggacaacgagctgctcccaccaccttctccctccttgggctccttcgaccccctggctgagctcacaggaaaggactcaaatgtcacagcatctcccacagcccctgcatgccccagtgacaagccagcaccagtccagaagcctccatccagtggcacctcctctgaatttgaagtggtcactcctgaggagcagaattcaccagagagcagcagccatgccaatgcgatggcgctgggccccctgccccgtgaggacggcaacctgatgctgcacctgcagcgcctggagaccacgctgagtgtgtgtgccgaggagccggaccacggccagctcttcacccacctgggccgcatggccctggagttcaaccgactggcatccaaggtgcacaagaatgagcagcgcacctccattctgcagaccctgtgtgagcagcttcggaaggagaacgaggctctgaaggccaagttggataagggcctggaacagcgggatcaggctgccgagaggctgcgggaggaaaatttggagctcaagaagttgttgatgagcaatggcaacaaagagggtgcgtctgggcggccaggctcaccgaagatggaagggacaggcaagaaggcagtggctggacagcagcaggctagtgtgacggcaggtaaggtcccagaggtggtggccttgggcgcagccgagaagaaggtgaagatgctggagcagcagcgcagtgagctgctggaagtgaacaagcagtgggaccagcatttccggtccatgaagcagcagtatgagcagaagatcactgagctgcgtcagaagctggctgatttgcagaagcaggtgactgacctggaggccgagcgggagcagaagcagcgtgactttgaccgcaagctcctcctggccaagtccaagattgaaatggaggagaccgacaaggagcagctgacagcagaggccaaggagctgcgccaaaaggtcaagtacctgcaggatcagctgagcccactcacccgacagcgtgagtaccaggaaaaggagatccagcggctcaacaaggccctggaggaagcactgagcatccaaaccccgccatcatctccaccaacagcatttgggagcccagaaggagcaggggccctcctaaggaaacaggagctggtcacgcagaatgagttgctgaaacagcaggtgaagatcttcgaggaggacttccagagggagcgcagtgatcgtgagcgcatgaatgaggagaaggaagagctgaagaagcaagtggagaagctgcaggcccaggtcaccctgtcaaatgcccagctaaaagcattcaaagatgaggagaaggcaagagaagccctcagacagcagaagaggaaagcaaagggcacacacagaggctgccccagacaccttccagagaggaaggttaagtgaggggttcagaaactgcatccttctgaactaaacagcaccgtggtggcagccggaatacacctggcgtctaccctgtggaggggttcgaaatccaaatcagagctcccaagtgatggaccctcccacagccaggcctacagaaccagagtctccaaaaaatgaccgtgaggggcctcagtgagaccagattgtgtcatttggctccaccttcatcttgcagagccagctgatctcagattgccaagaaactagaagccacttgcacggtgtggccagagcctcagctggatgagaggctgagatgggtggccag

SEQ ID NO: 93415 - DNA, 658 bp, Artificial Sequence
  derived and/or modified sequence
acttcctcgtcctcggcccgggtgccctgcccccgtccaggagccctaggagtgctacggggggccggagccttgcccgggccgctgccccgtccctggattcggggctggacgcagcaagcggggcgctgtgtccccaagctccccgtcctcgggaaaccgaggtacttggagcttgaggtcacacagctccaggcgggcaccacggcaggggctgagctaccctcatggaagggagaggaccgtaccggatctacgaccctgggggcagcgtgccctcaggagaggcatccgcagcttttgagcgcctagtgaaggagaattcccggctgaaggaaaaaatgcaagggataaagatgttaggggagcttttggaagagtcccagatggaagcgaccaggctccggcagaaggcagaggagctagtgaaggacaacgagctgctcccaccaccttctccctccttgggctccttcgaccccctggctgagctcacaggaaaggactcaaatgtcacagcatctcccacagcccctgcatgccccagtgacaagccagcaccagtccagaagcctccatccagtggcacctcctctgaatttgaagtggtcactcctgaggagcagaattcaccagagagcagcagccatgccaatgc

SEQ ID NO: 93416 - DNA, 575 bp, Artificial Sequence
  derived and/or modified sequence
atacatactgttctgtgactccccgaaagagggattctctctacattctgaaatttgttgtccctatcctggtattgagaagtcaccttcctgatacaaaaagaaggaacaagttgggagaccacagtgactcaacgacaccaggcgggcaccacggcaggggctgagctaccctcatggaagggagaggaccgtaccggatctacgaccctgggggcagcgtgccctcaggagaggcatccgcagcttttgagcgcctagtgaaggagaattcccggctgaaggaaaaaatgcaagggataaagatgttaggggagcttttggaagagtcccagatggaagcgaccaggctccggcagaaggcagaggagctagtgaaggacaacgagctgctcccaccaccttctccctccttgggctccttcgaccccctggctgagctcacaggaaaggactcaaatgtcacagcatctcccacagcccctgcatgccccagtgacaagccagcaccagtccagaagcctccatccagtggcacctcctctgaatttgaagtggtcactcctgaggagcag

SEQ ID NO: 93417 - DNA, 877 bp, Artificial Sequence
  derived and/or modified sequence
agaagcacagtgagccgaggagccttcatagggacagccgcccctggtgcacacaccctcgtattctcctgcccttccccaggggagcttttggaagagtcccagatggaagcgaccaggctccggcagaaggcagaggagctagtgaaggacaacgagctgctcccaccaccttctccctccttgggctccttcgaccccctggctgagctcacaggaaaggactcaaatgtcacagcatctcccacagcccctgcatgccccagtgacaagccagcaccagtccagaagcctccatccagtggcacctcctctgaatttgaagtggtcactcctgaggagcagaattcaccagagagcagcagccatgccaatgcgatggcgctgggccccctgccccgtgaggacggcaacctgatgctgcacctgcagcgcctggagaccacgctgagtgtgtgtgccgaggagccggaccacggccagctcttcacccacctgggccgcatggccctggagttcaaccgactggcatccaaggtgcacaagaatgagcagcgcacctccattctgcagaccctgtgtgagcagcttcggaaggagaacgaggctctgaaggccaagttggataagggcctggaacagcgggatcaggctgccgagaggctgcgggaggaaaatttggagctcaagaagttgttgatgagcaatggcaacaaagagggtgcgtctgggcggccaggctcaccgaagatggaagggacaggcaagaaggcagtggctggacagcagcaggctagtgtgacggcaggtaaggtcccagaggtggtggccttgggcgcagccgagaagaaggtgaagatgctggagcagcagcgca

SEQ ID NO: 93418 - DNA, 1716 bp, Artificial Sequence
  derived and/or modified sequence
atggaagggagaggaccgtaccggatctacgaccctgggggcagcgtgccctcaggagaggcatccgcagcttttgagcgcctagtgaaggagaattcccggctgaaggaaaaaatgcaagggataaagatgttaggggagcttttggaagagtcccagatggaagcgaccaggctccggcagaaggcagaggagctagtgaaggacaacgagctgctcccaccaccttctccctccttgggctccttcgaccccctggctgagctcacaggaaaggactcaaatgtcacagcatctcccacagcccctgcatgccccagtgacaagccagcaccagtccagaagcctccatccagtggcacctcctctgaatttgaagtggtcactcctgaggagcagaattcaccagagagcagcagccatgccaatgcgatggcgctgggccccctgccccgtgaggacggcaacctgatgctgcacctgcagcgcctggagaccacgctgagtgtgtgtgccgaggagccggaccacggccagctcttcacccacctgggccgcatggccctggagttcaaccgactggcatccaaggtgcacaagaatgagcagcgcacctccattctgcagaccctgtgtgagcagcttcggaaggagaacgaggctctgaaggccaagttggataagggcctggaacagcgggatcaggctgccgagaggctgcgggaggaaaatttggagctcaagaagttgttgatgagcaatggcaacaaagagggtgcgtctgggcggccaggctcaccgaagatggaagggacaggcaagaaggcagtggctggacagcagcaggctagtgtgacggcaggtaaggtcccagaggtggtggccttgggcgcagccgagaagaaggtgaagatgctggagcagcagcgcagtgagctgctggaagtgaacaagcagtgggaccagcatttccggtccatgaagcagcagtatgagcagaagatcactgagctgcgtcagaagctggctgatttgcagaagcaggtgactgacctggaggccgagcgggagcagaagcagcgtgactttgaccgcaagctcctcctggccaagtccaagattgaaatggaggagaccgacaaggagcagctgacagcagaggccaaggagctgcgccaaaaggtcaagtacctgcaggatcagctgagcccactcacccgacagcgtgagtaccaggaaaaggagatccagcggctcaacaaggccctggaggaagcactgagcatccaaaccccgccatcatctccaccaacagcatttgggagcccagaaggagcaggggccctcctaaggaaacaggagctggtcacgcagaatgagttgctgaaacagcaggtgaagatcttcgaggaggacttccagagggagcgcagtgatcgtgagcgcatgaatgaggagaaggaagagctgaagaagcaagtggagaagctgcaggcccaggtcaccctgtcaaatgcccagctaaaagcattcaaagatgaggagaaggcaagagaagccctcagacagcagaagaggaaagcaaagagtctccaaaaaatgaccgtgaggggcctcagtgagaccagattgtgtcatttggctccaccttcatcttgcagagccagctgatctcagattgccaagaaactagaagccacttgcacggtgtggcca

SEQ ID NO: 93419 - DNA, 2489 bp, Artificial Sequence
  derived and/or modified sequence
agtgagccgaggagccttcatagggacagccgcccctggtgcacacaccctcgtattctcctgcccttccccagccaggcgggcaccacggcaggggctgagctaccctcatggaagggagaggaccgtaccggatctacgaccctgggggcagcgtgccctcaggagaggcatccgcagcttttgagcgcctagtgaaggagaattcccggctgaaggaaaaaatgcaagggataaagatgttaggggagcttttggaagagtcccagatggaagcgaccaggctccggcagaaggcagaggagctagtgaaggacaacgagctgctcccaccaccttctccctccttgggctccttcgaccccctggctgagctcacaggaaaggactcaaatgtcacagcatctcccacagcccctgcatgccccagtgacaagccagcaccagtccagaagcctccatccagtggcacctcctctgaatttgaagtggtcactcctgaggagcagaattcaccagagagcagcagccatgccaatgcgatggcgctgggccccctgccccgtgaggacggcaacctgatgctgcacctgcagcgcctggagaccacgctgagtgtgtgtgccgaggagccggaccacggccagctcttcacccacctgggccgcatggccctggagttcaaccgactggcatccaaggtgcacaagaatgagcagcgcacctccattctgcagaccctgtgtgagcagcttcggaaggagaacgaggctctgaaggccaagttggataagggcctggaacagcgggatcaggctgccgagaggctgcgggaggaaaatttggagctcaagaagttgttgatgagcaatggcaacaaagagggtgcgtctgggcggccaggctcaccgaagatggaagggacaggcaagaaggcagtggctggacagcagcaggctagtgtgacggcaggtaaggtcccagaggtggtggccttgggcgcagccgagaagaaggtgaagatgctggagcagcagcgcagtgagctgctggaagtgaacaagcagtgggaccagcatttccggtccatgaagcagcagtatgagcagaagatcactgagctgcgtcagaagctggctgatttgcagaagcaggtgactgacctggaggccgagcgggagcagaagcagcgtgactttgaccgcaagctcctcctggccaagtccaagattgaaatggaggagaccgacaaggagcagctgacagcagaggccaaggagctgcgccaaaaggtcaagtacctgcaggatcagctgagcccactcacccgacagcgtgagtaccaggaaaaggagatccagcggctcaacaaggccctggaggaagcactgagcatccaaaccccgccatcatctccaccaacagcatttgggagcccagaaggagcaggggccctcctaaggaaacaggagctggtcacgcagaatgagttgctgaaacagcaggtgaagatcttcgaggaggacttccagagggagcgcagtgatcgtgagcgcatgaatgaggagaaggaagagctgaagaagcaagtggagaagctgcaggcccaggtcaccctgtcaaatgcccagctaaaagcattcaaagatgaggagaaggcaagagaagccctcagacagcagaagaggaaagcaaagagtctccaaaaaatgaccgtgaggggcctcagtgagaccagattgtgtcatttggctccaccttcatcttgcagagccagctgatctcagattgccaagaaactagaagccacttgcacggtgtggccagagcctcagctggatgagaggctgagatgggtggccagcttgtacaccagtccctgaactgagctgtttacaggactggggaggctccacccagaaggctttcatttgtactctgctgggagtgactgggaaaaactccttccctgctgctgagtggagagaggcctcatccggctttgacccaccatccgttgcagaagcctccaggagcagcaatcctaagagtgggaggcagccaagacccccttccttcaaaacctcccggaagtggtttcaggccctctagttgccatgaccaatttgtgtgtgtgtttaatttttgcttcaagctctgtagcaggacctgccccacgcacacccctacccctctgtgaggagctgtgggaagtgtgggtttgtctccagaacagaagagaatgatggatattctggctctggggccctctccaccaccactcacagtagccttgctgaagccatcacagatgggagaaggccatgccagccacgtccgccgaggggcgccagcctgaagctgccaggccctgaggttcagaccctggaccccatagctggaggcctgtggtgccagaagcccagattagggtggctgtccatccctggatagctatttgcacgaatcatggacataaatccaagttg

SEQ ID NO: 93420 - DNA, 1748 bp, Artificial Sequence
  derived and/or modified sequence
agtgagccgaggagccttcatagggacagccgcccctggtgcacacaccctcgtattctcctgcccttccccagccaggcgggcaccacggcaggggctgagctaccctcatggaagggagaggaccgtaccggatctacgaccctgggggcagcgtgccctcaggagaggcatccgcagcttttgagcgcctagtgaaggagaattcccggctgaaggaaaaaatgcaagggataaagatgttaggggagcttttggaagagtcccagatggaagcgaccaggctccggcagaaggcagaggagctagtgaaggacaacgagctgctcccaccaccttctccctccttgggctccttcgaccccctggctgagctcacaggaaaggactcaaatgtcacagcatctcccacagcccctgcatgccccagtgacaagccagcaccagtccagaagcctccatccagtggcacctcctctgaatttgaagtggtcactcctgaggagcagaattcaccagagagcagcagccatgccaatgcgatggcgctgggccccctgccccgtgaggacggcaacctgatgctgcacctgcagcgcctggagaccacgctgagtgtgtgtgccgaggagccggaccacggccagctcttcacccacctgggccgcatggccctggagttcaaccgactggcatccaaggtgcacaagaatgagcagcgcacctccattctgcagaccctgtgtgagcagcttcggaaggagaacgaggctctgaaggccaagttggataagggcctggaacagcgggatcaggctgccgagaggctgcgggaggaaaatttggagctcaagaagttgttgatgagcaatggcaacaaagagggtgcgtctgggcggccaggctcaccgaagatggaagggacaggcaagaaggcagtggctggacagcagcaggctagtgtgacggcaggtaaggtcccagaggtggtggccttgggcgcagccgagaagaaggtgaagatgctggagcagcagcgcagtgagctgctggaagtgaacaagcagtgggaccagcatttccggtccatgaagcagcagtatgagcagaagatcactgagctgcgtcagaagctggctgatttgcagaagcaggtgactgacctggaggccgagcgggagcagaagcagcgtgactttgaccgcaagctcctcctggccaagtccaagattgaaatggaggagaccgacaaggagcagctgacagcagaggccaaggagctgcgccaaaaggtcaagtacctgcaggatcagctgagcccactcacccgacagcgtgagtaccaggaaaaggagatccagcggctcaacaaggccctggaggaagcactgagcatccaaaccccgccatcatctccaccaacagcatttgggagcccagaaggagcaggggccctcctaaggaaacaggagctggtcacgcagaatgagttgctgaaacagcaggtgaagatcttcgaggaggacttccagagggagcgcagtgatcgtgagcgcatgaatgaggagaaggaagagctgaagaagcaagtggagaagctgcaggcccaggtcaccctgtcaaatgcccagctaaaagcattcaaagatgaggagaaggcaagagaagccctcagacagcagaagaggaaagcaaagggcacacacagaggctgccccagacaccttccagagaggaaggttaagtga

SEQ ID NO: 93421 - protein, 247 aa, Artificial Sequence
  derived and/or modified sequence
MTEDSQRNFRSVYYEKVGFRGVEEKKSLEILLKDDRLDTEKLCTFSQRFPLPSMYRALVWKVLLGILPPHHESHAKVMMYRKEQYLDVLHALKVVRFVSDATPQAEVYLRMYQLESGKLPRSPSFPLPKAFEQYLNLEDGRLLTHLRMCSAAPKLPYDLWFKRCFAGCLPESSLQRVWDKVVSGSCKILVFVAVEILLTFKIKVMALNSAEKITKFLENIPQDSSDAIVSKAIDLWHKHCGTPVHSS

SEQ ID NO: 93422 - DNA, 744 bp, Artificial Sequence
  derived and/or modified sequence
atgaccgaggacagccagagaaacttcagaagcgtgtactacgagaaggtgggcttcagaggcgtggaggagaagaagagcctggagatcctgctgaaggacgacagactggacaccgagaagctgtgcaccttcagccagagattccccctgcccagcatgtacagagccctggtgtggaaggtgctgctgggcatcctgcccccccaccacgagagccacgccaaggtgatgatgtacagaaaggagcagtacctggacgtgctgcacgccctgaaggtggtgagattcgtgagcgacgccaccccccaggccgaggtgtacctgagaatgtaccagctggagagcggcaagctgcccagaagccccagcttccccctgcccaaggccttcgagcagtacctgaacctggaggacggcagactgctgacccacctgagaatgtgcagcgccgcccccaagctgccctacgacctgtggttcaagagatgcttcgccggctgcctgcccgagagcagcctgcagagagtgtgggacaaggtggtgagcggcagctgcaagatcctggtgttcgtggccgtggagatcctgctgaccttcaagatcaaggtgatggccctgaacagcgccgagaagatcaccaagttcctggagaacatcccccaggacagcagcgacgccatcgtgagcaaggccatcgacctgtggcacaagcactgcggcacccccgtgcacagcagctag

SEQ ID NO: 93423 - DNA, 826 bp, Artificial Sequence
  derived and/or modified sequence
ggcgctgagttttgtctcccgggccgtctgggcgcgcgcgggtgtcccagaatgaaatatgactgaggactctcagagaaactttcgttcagtatattatgagaaagtggggtttcgtggagttgaagaaaagaaatcattagaaattctcctaaaagatgaccgtctggatactgagaaactttgtacttttagtcagaggttccctctcccgtccatgtaccgtgcattggtatggaaggtgcttctaggaatcttgcctccacaccacgagtcccatgccaaggtgatgatgtatcgtaaggagcagtacttggatgtccttcatgccctgaaagtcgttcgctttgttagtgatgccacacctcaggctgaagtctatctccgcatgtatcagctggagtctgggaagttacctcgaagtccctcttttccactgccaaaagcgtttgaacaatacttgaatctggaagatggcagactgctgactcatctgaggatgtgttccgcggcgcccaaacttccttatgatctctggttcaagaggtgctttgcgggatgtttgcctgaatccagtttacagagggtttgggataaagttgtgagtggatcctgtaagatcctagtttttgtagctgtcgaaattttattaacctttaaaataaaagttatggcactgaacagtgcagagaagataacaaagtttctggaaaatattccccaggacagctcagacgcgatcgtgagcaaggccattgacttgtggcacaaacactgtgggaccccggtccattcaagctgaacgcacccgctggttgtggaccgt

SEQ ID NO: 93424 - DNA, 744 bp, Artificial Sequence
  derived and/or modified sequence
atgacagaggatagtcaacggaacttccgaagcgtgtattatgaaaaggtagggttcaggggtgtggaggagaagaagtcccttgaaatattgttaaaggatgatcgtcttgataccgaaaaactatgtactttcagtcagaggtttcctctcccatccatgtacagggccctggtgtggaaggtgctattaggcatccttcctccacaccacgagtcccatgccaaggtaatgatgtaccggaaagaacagtatttggatgtattgcatgctcttaaggtcgttaggtttgtgagcgacgccacaccccaggcggaggtctacctgcgtatgtaccaactcgaatctggcaaattaccccgttcgcctagttttccgttgccaaaggctttcgaacagtacctgaatttggaggacgggcgcctcttgactcatctccgcatgtgtagcgctgcacccaagttgccttacgatctttggttcaaaaggtgttttgcgggatgtctgccagagagttcactgcagcgagtctgggataaagtggtgtctgggtcttgcaagatcctcgtgttcgttgctgtcgagatcttactgacattcaagattaaggtgatggccttgaattccgccgagaagattacgaagtttctggagaatattcctcaagacagctcagatgcgatcgtcagcaaagctatcgatctgtggcacaagcactgcgggacccctgtgcacagctcttag

SEQ ID NO: 93425 - DNA, 744 bp, Artificial Sequence
  derived and/or modified sequence
atgacagaggacagccagaggaacttccgctctgtgtactatgagaaggtgggcttccggggcgtggaggagaagaagagcctggagatcctgctgaaggatgaccggctggacacagagaagctgtgcaccttcagccagcgcttccccctgcccagcatgtaccgggccctggtgtggaaggtgctgctgggcatcctgcccccccaccacgagagccacgccaaggtgatgatgtacaggaaggagcagtacctggatgtgctgcacgccctgaaggtggtgcgctttgtgtctgatgccaccccccaggccgaggtgtacctgaggatgtaccagctggagagcggcaagctgcccaggagccccagcttccccctgcccaaggcctttgagcagtacctgaacctggaggatggccgcctgctgacccacctgaggatgtgcagcgctgcccccaagctgccctatgacctgtggttcaagcgctgctttgctggctgcctgcctgagagcagcctgcagagggtgtgggacaaggtggtgtctggcagctgcaagatcctggtgtttgtggccgtggagatcctgctgaccttcaagatcaaggtgatggccctgaacagcgctgagaagatcaccaagttcctggagaacatcccccaggacagcagtgatgccatcgtgtccaaggccatcgacctgtggcacaagcactgcggcacccctgtgcacagcagctag

SEQ ID NO: 93426 - DNA, 744 bp, Artificial Sequence
  derived and/or modified sequence
atgaccgaggacagccagcggaacttccggagcgtgtactacgagaaggtggggtttcggggagtggaggagaagaagtccctggagattctgctgaaggacgacagattggacactgagaagctttgcaccttctcacagagatttccactacccagcatgtaccgggctctagtttggaaagttcttcttgggatattgccgccccaccacgagtcccacgccaaagtaatgatgtatcgcaaagagcagtacctcgacgtgctccatgctctgaaggttgttagatttgtcagcgatgccacgccacaggctgaagtatatcttagaatgtaccagttggaaagtggcaagctcccacgttccccatcctttccattaccgaaagcatttgagcagtatcttaacctggaagacgggcgtctgttaacccacttgcggatgtgcagcgcagcccccaagcttccatatgacctttggttcaaacgctgttttgctggctgtctgcctgaatcgagtttgcaacgcgtgtgggacaaggttgtgtcaggcagttgtaaaattctggtgtttgtcgccgtagagatactcttaaccttcaagataaaggtgatggcccttaactccgccgagaagatcaccaagtttctggagaacatcccccaggattcgtcagacgctatagtgtctaaagctattgatttgtggcacaagcactgtggaactccagtgcatagcagttag

SEQ ID NO: 93427 - DNA, 744 bp, Artificial Sequence
  derived and/or modified sequence
atgactgaggacagccagcggaatttccggtccgtctactacgagaaggtgggttttcggggagtggaggagaaaaaatccctcgagattttactgaaagatgaccgattggacactgagaaactgtgtaccttttctcagcgcttcccccttccttcaatgtaccgggcactggtgtggaaggttctgctcgggattcttccccctcatcatgagtctcacgctaaggtgatgatgtatcggaaggaacagtacttggacgtgcttcatgcactcaaggtggtccggttcgtctccgatgcaacaccacaggccgaagtgtacctcagaatgtatcagttggagtctggtaagctgccaaggtctccaagtttccctcttcccaaggctttcgaacaatacctaaaccttgaagacggaagactgcttactcatttacggatgtgtagcgcagcgcctaagttaccttatgacctgtggttcaagcgttgctttgctggatgcttaccagaatctagtcttcaaagagtctgggacaaggtggtgagtgggtcatgcaagatcctagtctttgtggctgtggagatcctgcttacttttaagatcaaagtgatggccctgaacagtgctgagaagattacgaaatttctggaaaacatcccccaggattcatcggacgcaattgtatccaaagctatcgacctgtggcataagcactgcggcactcctgtccattctagttag

SEQ ID NO: 93428 - protein, 419 aa, Artificial Sequence
  derived and/or modified sequence
MTRDEALPDSHSAQDFYENYEPKEILGRGVSSVVRRCIHKPTSQEYAVKVIDVTGGGSFSPEEVRELREATLKEVDILRKVSGHPNIIQLKDTYETNTFFFLVFDLWEDTDTMEMEQKWCLGWDSPKSTNFRAQGRARMKRGELFDYLTEKVTLSEKETRKIMRALLEVICTLHKLNIVHRDLKPENILLDDNMNIKLTDFGFSCQLEPGERLREVCGTPSYLAPEIIECSMNEDHPGYGKEVDMWSTGVIMYTLLAGSPPFWHRKQMLMLRMIMSGNYQFGSPEWDDYSDTVKDLVSRFLVVQPQNRYTAEEALAHPFFQQYLVEEVRHFSPRGKFKVIALTVLASVRIYYQYRRVKPVTREIVIRDPYALRPLRRLIDAYAFRIYGHWVKKGQQQNRAALFENTPKAVLLSLAEEDY

SEQ ID NO: 93429 - DNA, 1260 bp, Artificial Sequence
  derived and/or modified sequence
atgactcgtgacgaggccctaccagattctcactccgctcaagatttttatgagaactatgaacccaaagagatcctgggccggggtgtctcttccgtcgttcgtaggtgcatccacaaaccaacttcacaagaatacgccgtgaaggtcatagatgttaccggaggaggaagtttctcaccagaggaggttagagaattaagggaggctactttgaaggaggtggatatactacgaaaagtgtctggacaccccaatatcattcaactcaaggacacgtatgagaccaacacgttttttttcttagtctttgacttgtgggaggataccgataccatggagatggaacagaaatggtgtcttggatgggattctccaaagtcaacaaacttcagagcccaggggcgcgctcgaatgaagagaggggaactgttcgattatctgacagaaaaagttaccctctctgagaaggaaacaagaaaaatcatgagagcactgctggaagtcatttgcaccctgcacaagttgaatattgtgcatagagaccttaagccggaaaacatccttttggatgacaatatgaatataaaactgacggatttcggcttctcctgccagctggagccaggggaaaggctgcgggaagtatgtggaacaccttcttatctagctccagagatcattgaatgttccatgaatgaggatcatccagggtatggaaaggaagtagatatgtggtctacaggcgtgatcatgtatactctgttggctgggtccccccctttttggcatcgcaaacagatgttgatgttaagaatgatcatgtctgggaactaccaattcggatctccggaatgggacgactacagtgacaccgttaaagacctggttagtcgtttcctagtggtccagccccagaatcggtatacggcagaggaagccctggctcatccattctttcaacagtatttggtagaagaggtacgccacttcagcccaagaggaaaatttaaggtgattgctcttacagtgttggcctccgtacgtatctactatcagtaccgccgagttaaacccgtgaccagggaaatcgtgatccgcgacccttatgctctgaggcctctgcgccgcctcattgatgcttacgctttcaggatctacggtcactgggtaaaaaagggccagcagcagaaccgggccgcgctatttgagaacacacccaaagcggtcctgctgtccctggccgaggaggactattag

SEQ ID NO: 93430 - DNA, 1260 bp, Artificial Sequence
  derived and/or modified sequence
atgaccagagatgaggccctgcctgacagccacagcgcccaggacttctatgagaactatgagcccaaggagatcctgggccggggcgtgtcctctgtggtgcggcgctgcatccacaagcccaccagccaggagtatgctgtgaaggtgattgatgtgactggaggcggcagcttcagccctgaggaggtgcgggagctgcgggaggccaccctgaaggaggtggacatcctgaggaaggtgtctggccaccccaacatcatccagctgaaggacacctatgagaccaacaccttcttcttcctggtgtttgacctgtgggaggacacagacaccatggagatggagcagaagtggtgcctgggctgggacagccccaagagcaccaacttccgggcccagggccgggccaggatgaagagaggagagctgtttgactacctgacagagaaggtgaccctgtctgagaaggagaccaggaagatcatgagggccctgctggaggtgatctgcaccctgcacaagctgaacatcgtgcaccgggacctgaagccagagaacatcctgctggatgacaacatgaacatcaagctgacagactttggcttcagctgccagctggagcctggagagcggctgcgggaggtgtgtggcacccccagctacctggcccctgagatcattgaatgttccatgaatgaagaccaccctggctacggcaaggaggtggacatgtggagcactggagtcatcatgtacaccctgctggccggcagcccccccttctggcacaggaagcagatgctgatgctgaggatgatcatgagcggcaactaccagtttggcagccctgagtgggatgactacagcgacacagtgaaggacctggtgagccgcttcctggtggtgcagccccagaaccgctacacagctgaggaggccctggcccaccccttcttccagcagtacctggtggaggaggtgcgccacttcagcccccggggcaagttcaaggtgattgccctgactgtgctggcctctgtgcgcatctactaccagtacagaagagtgaagcctgtgacccgggagatcgtcatccgggacccctatgccctgcggcccctgcggcggctgattgatgcctatgccttccgcatctacggccactgggtgaagaagggccagcagcagaacagagctgccctgtttgagaacacccccaaggctgtgctgctgagcctggccgaggaggactactag

SEQ ID NO: 93431 - DNA, 1260 bp, Artificial Sequence
  derived and/or modified sequence
atgacccgggacgaggccctgcccgacagccacagcgcccaggacttctacgagaattacgagccgaaggaaattctcggaaggggcgtctcttctgttgttagaagatgtatccataaacctacatcccaagaatatgctgtgaaggtaatcgatgtgactggcggagggtctttctctcctgaagaagtgcgcgaattgagggaagcgactctgaaggaagtggatatcctgcgcaaagtatctgggcatcccaatattatccagctcaaggacacttatgaaacaaatacattttttttcctggtcttcgacctgtgggaggataccgacactatggaaatggaacaaaagtggtgcctcgggtgggattctcccaagtcaacaaatttccgcgcgcagggccgggcaaggatgaagcgcggagaattgttcgattacctaaccgagaaagtgaccctatctgagaaggagacaaggaagatcatgcgggctctgttggaggtgatctgtactctgcataaactcaacatcgtgcacagagatctgaagcccgaaaatattctcctggacgataatatgaacattaaacttaccgatttcgggttctcttgccaactcgaacccggtgagcggctgagggaggtgtgcggtaccccctcctaccttgctccggagatcatcgagtgttccatgaatgaagaccacccgggctacggtaaggaagtcgatatgtggagcaccggagtcatcatgtatactctcctcgctggcagtcctcccttctggcaccgcaaacagatgcttatgttacgtatgattatgtctgggaattatcagttcgggtccccagagtgggacgattattcagataccgtgaaagatttagtgtcccggtttttggtcgtgcagcctcaaaacaggtatactgccgaagaggccttagcgcaccctttcttccaacagtatctggtggaggaagttcgacacttctcgccgcgaggcaagtttaaggtgattgcattaactgtgctggcatctgtacggatctactatcagtaccgtagagtgaaacccgtcacccgggaaatcgtaatccgagacccgtatgcactgcgccccttacggcgtcttatcgacgcttacgcttttcgaatctacggccattgggttaaaaagggacaacagcagaatcgggccgcactgtttgagaatacccccaaggccgtcctactatccctagcggaagaggactattag

SEQ ID NO: 93432 - DNA, 1717 bp, Artificial Sequence
  derived and/or modified sequence
gatgatatcttccaagtgtctgctcgggacacggcttcagccctctgtggtcccctctccccggggggctttgggattcttgtcaagctccttcaagagcctgcaagcacttaaccagccacccagagttccctcactgaagatctgagcatgacccgggacgaggcactgccggactctcattctgcacaggacttctatgagaattatgagcccaaagagatcctgggcaggggcgttagcagtgtggtcaggcgatgcatccacaagcccacgagccaggagtacgccgtgaaggtcatcgacgtcaccggtggaggcagcttcagcccggaggaggtgcgggagctgcgagaagccacgctgaaggaggtggacatcctgcgcaaggtctcagggcaccccaacatcatacagctgaaggacacttatgagaccaacactttcttcttcttggtgtttgacctatgggaagacactgatacaatggagatggaacagaaatggtgcttgggctgggactctcccaagtccaccaacttcagggcccagggcagggcaaggatgaagagaggggagctctttgactacctcactgagaaggtcaccttgagtgagaaggaaaccagaaagatcatgcgagctctgctggaggtgatctgcaccttgcacaaactcaacatcgtgcaccgggacctgaagcccgagaacattctcttggatgacaacatgaacatcaagctcacagactttggcttttcctgccagctggagccgggagagaggctgcgagaggtctgcgggacccccagttacctggcccctgagattatcgagtgctccatgaatgaggaccacccgggctacgggaaagaggtggacatgtggagcactggcgtcatcatgtacacgctgctggccggctccccgcccttctggcaccggaagcagatgctgatgctgaggatgatcatgagcggcaactaccagtttggctcgcccgagtgggatgattactcggacaccgtgaaggacctggtctcccgattcctggtggtgcaaccccagaaccgctacacagcggaagaggccttggcacaccccttcttccagcagtacttggtggaggaagtgcggcacttcagcccccgggggaagttcaaggtgatcgctctgaccgtgctggcttcagtgcggatctactaccagtaccgccgggtgaagcctgtgacccgggagatcgtcatccgagacccctatgccctccggcctctgcgccggctcatcgacgcctacgctttccgaatctatggccactgggtgaagaaggggcagcagcagaaccgggcagcccttttcgagaacacacccaaggccgtgctcctctccctggccgaggaggactactgaggggctggccagtcagggagggctagggggcaggtggggaggggaagccatggaaatacaagtcaaaggggtgagatgcgtgcaggcctctgcagaaggagcacttggccctggccaggaacccctggaactgaggccacgatcccctctcaaaggctgtgcacaagggaagtgggtgttcccaccacacagcaatacctgcaggctggggcaggccctgggtgggcagagatcacacgtggcctgagaaccaggaaccccctgctcctctacttcctagatgagccaccatctccatttctcttta

SEQ ID NO: 93433 - DNA, 1260 bp, Artificial Sequence
  derived and/or modified sequence
atgactcgagacgaggctctgccagactcacactcggctcaggacttttacgagaattatgagcctaaagagatcctaggccgtggagtctcgagtgtggtccgccgatgtatccataagccgacgagccaggagtacgctgttaaagtaattgacgtgaccgggggagggtccttctcgcccgaagaggttcgagagctccgagaagcgacactcaaggaggtagacatcctccggaaggtgtctggccatcccaacatcattcagcttaaggacacctatgagacaaacacctttttttttctggtgttcgatctatgggaagatacagacaccatggaaatggaacagaaatggtgtctcggctgggattctcccaaaagcaccaacttccgcgcacagggtagggccaggatgaaaaggggggagctgttcgactacctgactgagaaagtcacccttagtgagaaggagacccgtaagatcatgcgagccctcctcgaagtgatctgcacactgcataagctgaatattgtgcacagggatcttaaacctgagaacatcctgctggacgataatatgaacattaagttaaccgacttcggattttcatgccagcttgagcctggagaacgtctgagagaagtttgtggcacgccaagctatctggcaccagaaatcattgaatgcagtatgaacgaggatcatcctggatatggcaaggaggtggatatgtggagcaccggagtgataatgtacactctgctcgcagggtcgccgccattttggcacagaaagcagatgttgatgctgagaatgatcatgagcggcaattatcaattcggaagccctgaatgggacgactactcagacacagtaaaagatcttgtctcccgatttctcgtggttcagcctcaaaacagatataccgctgaggaggccctggcccacccgttcttccagcagtatcttgtggaggaggtacggcacttctcgcctagaggcaaattcaaggtcatcgccctgactgtcctcgcctccgtgaggatctattaccagtatcgaagagtcaagcccgttacgagggaaattgtgattagagacccctacgctctgcggcctctgaggcgcttaattgatgcgtatgcatttcgcatatacggccactgggtcaaaaaaggtcaacagcagaaccgcgctgccttgttcgagaacaccccaaaagccgtccttctctctttggcagaggaagactactag

SEQ ID NO: 93434 - DNA, 1260 bp, Artificial Sequence
  derived and/or modified sequence
atgaccagagacgaggccctgcccgacagccacagcgcccaggacttctacgagaactacgagcccaaggagatcctgggcagaggcgtgagcagcgtggtgagaagatgcatccacaagcccaccagccaggagtacgccgtgaaggtgatcgacgtgaccggcggcggcagcttcagccccgaggaggtgagagagctgagagaggccaccctgaaggaggtggacatcctgagaaaggtgagcggccaccccaacatcatccagctgaaggacacctacgagaccaacaccttcttcttcctggtgttcgacctgtgggaggacaccgacaccatggagatggagcagaagtggtgcctgggctgggacagccccaagagcaccaacttcagagcccagggcagagccagaatgaagagaggcgagctgttcgactacctgaccgagaaggtgaccctgagcgagaaggagaccagaaagatcatgagagccctgctggaggtgatctgcaccctgcacaagctgaacatcgtgcacagagacctgaagcccgagaacatcctgctggacgacaacatgaacatcaagctgaccgacttcggcttcagctgccagctggagcccggcgagagactgagagaggtgtgcggcacccccagctacctggcccccgagatcatcgagtgcagcatgaacgaggaccaccccggctacggcaaggaggtggacatgtggagcaccggcgtgatcatgtacaccctgctggccggcagcccccccttctggcacagaaagcagatgctgatgctgagaatgatcatgagcggcaactaccagttcggcagccccgagtgggacgactacagcgacaccgtgaaggacctggtgagcagattcctggtggtgcagccccagaacagatacaccgccgaggaggccctggcccaccccttcttccagcagtacctggtggaggaggtgagacacttcagccccagaggcaagttcaaggtgatcgccctgaccgtgctggccagcgtgagaatctactaccagtacagaagagtgaagcccgtgaccagagagatcgtgatcagagacccctacgccctgagacccctgagaagactgatcgacgcctacgccttcagaatctacggccactgggtgaagaagggccagcagcagaacagagccgccctgttcgagaacacccccaaggccgtgctgctgagcctggccgaggaggactactag

SEQ ID NO: 93435 - protein, 333 aa, Artificial Sequence
  derived and/or modified sequence
MHPQAHEPGVRREGHRRHRWRQLQPGGGAGAARSHAEGGGHPAQGLRAPQHQMKRGELFDYLTEKVTLSEKETRKIMRALLEVICTLHKLNIVHRDLKPENILLDDNMNIKLTDFGFSCQLEPGERLREVCGTPSYLAPEIIECSMNEDHPGYGKEVDMWSTGVIMYTLLAGSPPFWHRKQMLMLRMIMSGNYQFGSPEWDDYSDTVKDLVSRFLVVQPQNRYTAEEALAHPFFQQYLVEEVRHFSPRGKFKVIALTVLASVRIYYQYRRVKPVTREIVIRDPYALRPLRRLIDAYAFRIYGHWVKKGQQQNRAALFENTPKAVLLSLAEEDY

SEQ ID NO: 93436 - protein, 522 aa, Artificial Sequence
  derived and/or modified sequence
MRRPRGEPGPRAPRPTEGATCAGPGESWSPSPNSMLRVLLSAQTSPARLSGLLLIPPVQPCCLGPSKWGDRPVGGGPSAGPVQGLQRLLEQAKSPGELLRWLGQNPSKVRAHHYSVALRRLGQLLGSRPRPPPVEQVTLQDLSQLIIRNCPSFDIHTIHVCLHLAVLLGFPSDGPLVCALEQERRLRLPPKPPPPLQPLLREARPEELTPHVMVLLAQHLARHRLREPQLLEAIAHFLVVQETQLSSKVVQKLVLPFGRLNYLPLEQQFMPCLERILAREAGVAPLATVNILMSLCQLRCLPFRALHFVFSPGFINYISGTPHALIVRRYLSLLDTAVELELPGYRGPRLPRRQQVPIFPQPLITDRARCKYSHKDIVAEGLRQLLGEEKYRQDLTVPPGYCTDFLLCASSSGAVLPVRTQDPFLPYPPRSCPQGQAASSATTRDPAQRVVLVLRERWHFCRDGRVLLGSRALRERHLGLMGYQLLPLPFEELESQRGLPQLKSYLRQKLQALGLRWGPEGG

SEQ ID NO: 93437 - DNA, 1764 bp, Artificial Sequence
  derived and/or modified sequence
gagccacgtctccgaagaccgatagctgcttcgggattggcgtccgggcggctatctaggggctgctgggaagatggcggactcggtggctagccgatgaggaggccgcggggggaacccggcccccgggccccgagaccgactgagggagcgacctgcgcagggcccggggagtcatggtctccatcacccaactccatgcttcgagtcctgctctctgctcagacctcccctgctcggctgtctggcctgctgctgatccctccagtacagccctgctgtttggggcccagcaaatggggggaccggcctgttggaggaggccccagtgcaggtcctgtgcaaggactgcagcggcttctggaacaggcgaagagccctggggagctgctgcgctggctgggccagaaccccagcaaggtgcgcgcccaccactactcggtggcgcttcgtcgtctgggccagctcttggggtctcggccacggccccctcctgtggagcaggtcacactgcaggacttgagtcagctcatcatccgaaactgcccctcctttgacattcacaccatccacgtgtgtctgcaccttgcagtcttacttggctttccatctgatggtcccctggtgtgtgccctggaacaggagcgaaggctccgcctccctccgaagccacctccccctttgcagccccttctccgagaggcaaggccagaggaactgactccccacgtgatggtgctcctggcccagcacctggcccggcaccggttgcgggagccccagcttctggaagccattgcccacttcctggtggttcaggaaacgcaactcagcagcaaggtggtacagaagttggtcctgccctttgggcgactgaactacctgcccctggaacagcagtttatgccctgccttgagaggatcctggctcgggaagcaggggtggcacccctggctacagtcaacatcttgatgtcactgtgccaactgcggtgcctgcccttcagagccctgcactttgttttttcccctggcttcatcaactacatcagtggcacccctcatgctctgattgtgcgtcgctacctctccctgctggacacggccgtggagctggagctcccaggataccggggtccccgccttccccgaaggcagcaagtgcccatctttccccagcctctcatcaccgaccgtgcccgctgcaagtacagtcacaaggacatagtagctgaggggttgcgccagctgctgggggaggagaaataccgccaggacctgactgtgcctccaggctactgcacagacttcctgctgtgcgccagcagctctggtgctgtgcttcccgtgaggacccaggaccccttcctgccatacccaccaaggtcctgcccacagggccaggctgcctctagcgccactactcgagaccctgcccagagggtggtgctggtgttgcgggaacgctggcatttctgccgggacggccgggtgctgctgggctcgagggccctgagggagcggcacctaggcctgatgggctaccagctcctgccgctacccttcgaggaactggagtcccagagaggcctgccccagctcaagagctacctgaggcagaagctccaggccctgggcctgcgctgggggcctgaagggggctgaggggttgatgtggggttcaggatggcccccccatggggggtggatgatttgcactttggttccctgtgttttgatttctcattaaagttcctttccttc

SEQ ID NO: 93438 - DNA, 1569 bp, Artificial Sequence
  derived and/or modified sequence
atgaggcgcccccgaggcgagcccggaccccgggcccccaggcctacagaaggggctacgtgtgcaggtccaggcgaatcttggtctccaagtccaaactccatgctgagagtacttctgtcggcccagacaagccctgccaggctgagcggcttactgttgatcccgcctgtgcagccgtgttgcttgggcccctctaagtggggggatagaccagtcggcgggggaccctccgctggaccagttcaaggacttcagagacttcttgagcaggcgaaatcccctggggagttgctgaggtggttgggccaaaatcccagcaaagtgagggctcatcactattcagtcgccctgcggcggctcgggcagttgctcggctcacggcctcgtcctcctcccgtggaacaagtgaccctacaagacctgagccaactgatcattaggaattgtccctccttcgacattcacaccatccacgtgtgcctgcacctggccgttctgttaggcttcccttccgacggcccactcgtctgcgcactggagcaagaaagacgcctgaggctccctccgaaaccgccccctccacttcagcccctgcttcgtgaagctagaccagaagagctcacccctcacgtgatggtgctacttgcccagcacttggcccgacaccggctcagggagccacagctgttggaggctatagcccattttctggttgtgcaagagacacaactgagtagcaaagtggtgcagaagctggttcttcccttcggaaggctcaactatctgccattggaacagcagttcatgccgtgcctcgagagaattcttgccagagaggctggcgtggcgccgttggccaccgtgaacattctcatgtccctctgtcagctcagatgtctgcctttcagagcactacacttcgttttttcaccaggctttatcaactacatctccggaacccctcacgcactcatcgtcagaaggtatctcagtctgctggacacagctgttgaactggagctacccggttataggggccctagacttcctcggagacaacaggtgcccatctttccccaacctctgattacagaccgtgcaaggtgtaagtattctcacaaagacattgttgccgaaggtctgaggcaactgttgggcgaggaaaagtaccggcaggaccttacagtccccccgggctactgcaccgattttcttctctgtgcctcgtcttccggggctgttctgccagtaaggacccaggatccatttttgccataccccccacggtcttgtccacaagggcaagcagctagttcagcgaccacacgggaccccgcacagagggtcgtcttggtgttgagagaacgatggcacttttgccgagacggtcgggtcctcctgggctccagggcactgcgcgagcgtcacctgggactgatggggtaccaactgcttccactgcccttcgaggaactcgaatcacaacggggcttgccacaactcaagtcttacttgaggcagaagcttcaggccttggggttacgctgggggcctgaggggggatag

SEQ ID NO: 93439 - DNA, 1569 bp, Artificial Sequence
  derived and/or modified sequence
atgaggcggcccagaggagagcccggcccccgggccccccggcccacagagggcgccacctgtgccggccctggagagagctggagccccagccccaacagcatgctgcgggtgctgctgagcgcccagaccagccctgcccggctgagcggcctgctgctgatcccccctgtgcagccctgctgcctgggccccagcaagtggggagacaggcctgtgggcggcggccccagcgctggccctgtgcagggcctgcagaggctgctggagcaggccaagagccctggagagctgctgcgctggctgggccagaaccccagcaaggtgcgggcccaccactacagcgtggccctgcggcggctgggccagctgctgggcagccggcccaggcctcctcctgtggagcaggtgaccctgcaggacctgagccagctgatcatccggaactgccccagctttgacatccacaccatccacgtgtgcctgcacctggccgtgctgctgggcttccccagtgatggccccctggtgtgtgccctggagcaggagcggcggctgcggctgccccccaagcccccaccacccctgcagcccctgctgcgggaggcccggcctgaggagctgacccctcatgtgatggtgctgctggcccagcacctggcccggcaccggctgcgggagccccagctgctggaggccatcgcccacttcctggtggtgcaggagacccagctgagcagcaaggtggtgcagaagctggtgctgcccttcggccgcctgaactacctgcccctggagcagcagttcatgccctgcctggagcgcatcctggcccgggaggccggcgtggcccccctggccaccgtgaacatcctgatgagcctgtgccagctgcgctgcctgcccttccgggccctgcactttgtgttcagccctggcttcatcaactacatcagcggcacccctcatgccctgattgtgcggcgctacctgagcctgctggacacagctgtggagctggagctgcccggctaccggggcccccggctgccccggcggcagcaggtgcccatcttcccccagcccctcatcacagaccgggcccgctgcaagtacagccacaaggacatcgtggccgagggcctgcggcagctgctgggggaggagaagtaccggcaggacctgactgtgcccccaggctactgcacagacttcctgctgtgtgccagcagcagcggggctgtgctgcctgtgaggacccaggaccccttcctgccctacccacccaggagctgcccccagggccaggccgccagcagcgccaccacccgggaccctgcccagagggtggtgctggtgctgcgggagcgctggcacttctgcagagatggccgggtgctgctgggcagccgggccctgcgggagcggcacctgggcctgatgggctaccagctgctgcccctgccctttgaggagctggagagccagaggggcctgccccagctgaagagctacctgcggcagaagctgcaggccctgggcctgcgctggggccctgagggcggctag

SEQ ID NO: 93440 - DNA, 1569 bp, Artificial Sequence
  derived and/or modified sequence
atgcggcggccccggggcgagcccggcccccgggccccccggcccacagagggagctacttgcgctggacctggcgagtcgtggtcaccctccccaaacagcatgttaagagttctgctgtccgcccagacaagtccggctcgtctatctggactcctgctgatcccacccgtacaaccatgctgcctcggcccttccaaatggggggataggccagtgggtggcggacctagcgctggacccgtgcagggacttcagcggctccttgagcaggccaaatctcccggggaactcttgcggtggctggggcagaacccatccaaggtaagagcccatcactactcagttgcgctgcgccggctggggcagcttctcggcagccgacctaggcccccaccagtggagcaagtcactctgcaggacctgtcacagctgattatcagaaattgtccaagtttcgacatccataccattcatgtctgtcttcatctcgccgttctgctgggctttccttcggacggccccttggtatgcgcgctcgagcaagaacgcaggttacgactcccaccaaagcccccacccccactccagcccctgctgcgggaagcccgcccggaggagctcaccccccacgtcatggtgcttctggctcagcatctcgctcggcatagactgagagaaccccagctgctggaagctattgcccactttctggtggtgcaggagacccaactcagctcaaaggtcgtgcagaaactggtgctaccgttcggccgtctcaactatctcccattggaacagcagtttatgccctgcttggagcggatcttggctcgcgaggctggcgtcgctccccttgcgaccgttaacatattaatgagtctctgccagctgaggtgtctaccgttcagagcactgcactttgtgttctcacctggcttcatcaattacatcagcggcacaccgcacgccctcattgtgagaagatacctctctctactggatactgcggtggaacttgaattgccaggatatcgggggccccggcttcccaggaggcagcaagttcccatcttccctcaaccactgattaccgacagggcccggtgcaagtacagccacaaagacatcgtcgctgaggggctgcgccagctgctaggagaagagaagtaccggcaggatttgaccgtacccccagggtattgcacagacttccttctgtgcgcatcgtcctcaggcgctgtgctccctgtgagaacacaggaccctttcctgccctaccctcctcggagttgtccacagggacaggccgcgtcctctgctactactcgggatccagctcaacgcgtggtgctcgtcctgagagagcgctggcatttctgccgtgacgggagagtgttgttgggctctcgcgcattgcgggagcgccatctgggcctgatgggttaccaactgctgccgctgccgttcgaggagctggagtcgcagagaggtttaccccaactcaaatcatacctgcgccagaaattacaggcgttgggtctccggtggggtccagaaggagggtag

SEQ ID NO: 93441 - DNA, 1569 bp, Artificial Sequence
  derived and/or modified sequence
atgaggcggcctaggggcgagcccggacctcgggctccgcgtcccaccgaaggagctacatgcgcgggacccggagagagctggagccctagccccaactccatgctgagggtgctgttgagtgcccagacctcgcctgcaagactcagtggactgctgcttattccgcctgtccaaccatgctgtctgggccctagcaaatggggagataggcctgttgggggagggcctagcgccggtcccgtgcaaggacttcagaggcttctggagcaagcaaaatcacccggagagttgttgagatggcttgggcagaatccttcaaaagttcgtgcacaccactattcagtggccttgcggaggctgggccagctgctgggctctcgtcccaggcctcctcccgtggagcaggtaacccttcaggatctatcccagctgatcatccggaattgtcccagttttgatatccatacaatccacgtgtgcctgcatctggctgtcttgctgggctttccttccgatggtcctttggtttgtgccctcgagcaggagagaaggctgcggctgcctccaaagccaccacccccattgcagcctctgctcagagaagcccgaccagaggagctgaccccgcacgtaatggtcctgcttgctcagcaccttgcccgtcaccggctgagggaaccacagctgctggaagccatcgcacactttcttgtcgttcaggagactcagctgtcttcaaaagtcgtgcagaagctggttctcccattcggcagactcaactacttgccacttgagcagcagttcatgccctgcctggaaaggatcctggccagagaggcaggcgtggccccactagccactgtcaatatcctgatgtctctgtgtcagctgcggtgcttgccgtttcgcgctctacatttcgtgttctctcccggattcatcaactatatttctggtactccacacgcactgattgtccgacgatacctgagcctcctggacacagctgtcgagttggagctcccaggctacagaggtcctagacttccacggaggcagcaggttcctatcttcccccagccacttatcacagacagggccagatgtaaatacagccacaaagatatcgtggctgagggtctccggcagttgttaggagaagagaaatatcgtcaggatctaactgtgccacccggatactgtactgatttcctactatgcgctagctccagcggcgctgtcctgcctgtgaggacacaagatccatttttaccctatcccccaagatcatgcccacagggccaggctgcgtcatctgccaccaccagggacccagcccaacgagtggtgctggtgctgagagaaagatggcacttctgtagagacggacgtgtattattaggttcaagagcactccgcgagaggcacctgggtcttatgggctaccagcttctcccattacctttcgaggagctcgagagccagagggggctcccacagttaaaatcgtaccttagacagaaattacaagcattgggtttgcggtggggcccagagggcggatag

SEQ ID NO: 93442 - DNA, 1569 bp, Artificial Sequence
  derived and/or modified sequence
atgagaagacccagaggcgagcccggccccagagcccccagacccaccgagggcgccacctgcgccggccccggcgagagctggagccccagccccaacagcatgctgagagtgctgctgagcgcccagaccagccccgccagactgagcggcctgctgctgatcccccccgtgcagccctgctgcctgggccccagcaagtggggcgacagacccgtgggcggcggccccagcgccggccccgtgcagggcctgcagagactgctggagcaggccaagagccccggcgagctgctgagatggctgggccagaaccccagcaaggtgagagcccaccactacagcgtggccctgagaagactgggccagctgctgggcagcagacccagacccccccccgtggagcaggtgaccctgcaggacctgagccagctgatcatcagaaactgccccagcttcgacatccacaccatccacgtgtgcctgcacctggccgtgctgctgggcttccccagcgacggccccctggtgtgcgccctggagcaggagagaagactgagactgccccccaagccccccccccccctgcagcccctgctgagagaggccagacccgaggagctgaccccccacgtgatggtgctgctggcccagcacctggccagacacagactgagagagccccagctgctggaggccatcgcccacttcctggtggtgcaggagacccagctgagcagcaaggtggtgcagaagctggtgctgcccttcggcagactgaactacctgcccctggagcagcagttcatgccctgcctggagagaatcctggccagagaggccggcgtggcccccctggccaccgtgaacatcctgatgagcctgtgccagctgagatgcctgcccttcagagccctgcacttcgtgttcagccccggcttcatcaactacatcagcggcaccccccacgccctgatcgtgagaagatacctgagcctgctggacaccgccgtggagctggagctgcccggctacagaggccccagactgcccagaagacagcaggtgcccatcttcccccagcccctgatcaccgacagagccagatgcaagtacagccacaaggacatcgtggccgagggcctgagacagctgctgggcgaggagaagtacagacaggacctgaccgtgccccccggctactgcaccgacttcctgctgtgcgccagcagcagcggcgccgtgctgcccgtgagaacccaggaccccttcctgccctacccccccagaagctgcccccagggccaggccgccagcagcgccaccaccagagaccccgcccagagagtggtgctggtgctgagagagagatggcacttctgcagagacggcagagtgctgctgggcagcagagccctgagagagagacacctgggcctgatgggctaccagctgctgcccctgcccttcgaggagctggagagccagagaggcctgccccagctgaagagctacctgagacagaagctgcaggccctgggcctgagatggggccccgagggcggctag

SEQ ID NO: 93443 - protein, 436 aa, Artificial Sequence
  derived and/or modified sequence
MQNSHSGVNQLGGVFVNGRPLPDSTRQKIVELAHSGARPCDISRILQTHADAKVQVLDNQNVSNGCVSKILGRYYETGSIRPRAIGGSKPRVATPEVVSKIAQYKRECPSIFAWEIRDRLLSEGVCTNDNIPSVSSINRVLRNLASEKQQMGADGMYDKLRMLNGQTGSWGTRPGWYPGTSVPGQPTQDGCQQQEGGGENTNSISSNGEDSDEAQMRLQLKRKLQRNRTSFTQEQIEALEKEFERTHYPDVFARERLAAKIDLPEARIQVWFSNRRAKWRREEKLRNQRRQASNTPSHIPISSSFSTSVYQPIPQPTTPVSSFTSGSMLGRTDTALTNTYSALPPMPSFTMANNLPMQPPVPSQTSSYSCMLPTSPSVNGRSYDTYTPPHMQTHMNSQPMGTSGTTSTGLISPGVSVPVQVPGSEPDMSQYWPRLQ

SEQ ID NO: 93444 - protein, 39 aa, Artificial Sequence
  derived and/or modified sequence
MQNSHSGVNQLGGVFVNGRPLPDSTRQKIVELAHSGARP

SEQ ID NO: 93445 - DNA, 1311 bp, Artificial Sequence
  derived and/or modified sequence
atgcagaattctcattcaggcgtgaaccagctcgggggcgtttttgttaacgggcgcccactccccgactcaaccagacagaagatcgtcgaactggcacattcaggcgccaggccctgcgatatctcccgcatactgcagacgcacgctgatgccaaagtgcaggtgcttgataaccaaaatgtgtcaaacggatgcgtgtccaaaattttgggacggtactatgagacgggatccatccgtccacgggccatcggaggatccaaacccagggtggccactccagaagtcgtttccaaaattgcccagtacaagagggagtgcccttccatttttgcttgggagattagagacaggctcctatccgagggtgtctgtaccaatgacaacatccccagcgtgtctagcatcaacagagtgctgagaaacctggcttccgaaaaacagcaaatgggagccgacggaatgtatgataaactgcggatgctcaatggccagaccggttcttggggaactaggccggggtggtatccgggcacaagtgtgcctgggcaaccaacccaggacggctgccagcagcaggaagggggtggcgaaaacactaattcaatctcttccaatggagaggactcagacgaggctcagatgcgcctgcagctcaagaggaagctgcagcgaaataggacctcatttacccaagagcagattgaggctcttgaaaaggaattcgaaaggacccactaccctgacgtgtttgcccgcgagcgcctagcggccaagatcgatctgcctgaagcgagaatacaggtatggttctccaaccgcagagctaagtggcgacgcgaagaaaaactaaggaaccagcgccgccaggcttcaaacacgcctagtcacatccccatttctagttccttcagcacaagcgtctaccagcctattcctcagcccacgacaccagtgtcttccttcacctctgggtctatgctgggacggactgataccgcattgaccaacacctattcagctttacccccaatgccatccttcactatggctaataacctccccatgcaaccccccgtgcccagccagacgtcatcatacagctgcatgctcccaacctcgccatctgtaaacggtcgctcctacgatacatataccccaccccatatgcaaacacacatgaactctcagcccatgggaacatccggcaccacttcgactggattaatctcccctggggtctccgtgcccgtccaggtgcccgggtcagagccagacatgtctcagtattggcctcggctgcagtag

SEQ ID NO: 93446 - DNA, 1311 bp, Artificial Sequence
  derived and/or modified sequence
atgcaaaactctcactcaggtgtgaaccaattgggcggggtcttcgttaacggacgccctctgccagactctacgcgccagaagatcgtggagctagctcatagtggcgctaggccctgtgacatcagccgtatcctacaaacccatgccgacgccaaggtgcaagtgctcgacaaccaaaatgtttctaatggatgtgtcagcaaaattcttggcaggtactacgagacggggtccatacggccgcgcgccattggagggagtaagccacgagtcgctacacctgaggttgtctccaaaatcgcccagtataaaagggagtgccccagtatttttgcatgggaaattagggaccgactcctgagtgaaggagtgtgcacgaatgacaacattcctagcgtgtcaagtattaacagagtcctaaggaatctggccagcgaaaagcagcaaatgggcgctgacggtatgtacgacaaactaaggatgcttaacggtcagactgggagctgggggacacgacccggatggtaccctggcacttctgtcccgggtcagccaactcaggatgggtgccagcagcaagaaggtggaggcgaaaacaccaatagtattagctcgaacggcgaagactcagatgaggctcagatgagactccagttaaaacgcaaactacaaagaaaccgcactagcttcacacaagagcagatcgaggcattagaaaaagagtttgagcgcactcactaccctgacgtgtttgcacgcgaacgtctcgctgcaaagatcgatttaccagaggcccgtattcaggtgtggttttctaaccgacgggcaaaatggcggagagaagaaaaacttcgtaatcagaggcgtcaggccagtaacacaccatcccacatcccaatttcatcttctttcagtactagcgtttatcagccaattccacagccgaccacaccagtatccagctttacgtcaggatccatgctgggccgcactgacacggctctgacaaatacctattcggcccttccgccgatgccatccttcaccatggctaacaatcttccaatgcaaccaccagtcccttcgcagacaagctcatatagctgtatgctcccaacatccccgtctgtcaatggcaggagttacgatacatacacaccccctcacatgcaaactcacatgaactctcaaccaatggggaccagcgggaccacttcaaccggactaatctcgccaggagtgtctgtgccggtgcaagtccctggatccgagcccgacatgtcgcagtactggcctagactgcagtag

SEQ ID NO: 93447 - DNA, 1311 bp, Artificial Sequence
  derived and/or modified sequence
atgcagaactctcattctggcgttaaccagcttgggggagtgtttgttaatggaagaccattgcctgattcaacccgacagaagatcgtggagcttgctcattcaggcgctaggccatgtgacatatccaggattttgcagacacacgctgacgcaaaagtccaagtcctcgataatcagaacgtatcaaacgggtgcgttagcaaaatcctcggtaggtattatgagactggaagtatccggccacgggctattggaggcagtaagcctagagtcgcgactcccgaagttgtctctaagattgcacaatacaagagagagtgtccgagcatttttgcttgggagatcagggataggctgctttcggagggagtctgcaccaacgacaatattccctcagtgagcagcatcaatcgggtactgcgaaatctcgcttccgaaaagcagcagatgggagccgacgggatgtatgataagctccgcatgcttaatggtcagaccggcagctgggggacgcgcccaggatggtaccctgggacttccgtgcctggccagcccactcaggatggatgtcagcagcaggaaggcggcggggaaaacaccaatagtatatcgtcaaacggtgaagactctgatgaagcccagatgcgccttcaactgaagagaaagctccaaaggaacaggacctcattcacacaagaacaaattgaagcactagagaaagagttcgagaggacccattatcccgacgtgttcgcgcgtgagagattggcggctaaaatagacctgccagaggcccggatacaagtatggttttccaatagacgggccaagtggaggagagaggagaagctcagaaatcaacgcagacaggcatccaatactccatcccacatcccaatttcttccagcttttcgacatcagtctaccagcctattccacagccgacaacgcctgtatcctcatttacctccggatctatgttaggccgcactgacactgccttgactaacacctacagtgccctgcccccgatgccgagctttaccatggccaataacctcccaatgcagccccccgtgcctagccagacctcgagttattcctgtatgctgcccacgtccccaagcgtaaacggtcggtcttacgacacttatacgccaccgcacatgcagactcatatgaactcacagcccatgggcacctcagggactacctccaccggactgatttccccgggggtgtctgttcccgtccaggtgccaggaagtgagcctgacatgtctcagtactggcctcggttgcagtag

SEQ ID NO: 93448 - DNA, 1311 bp, Artificial Sequence
  derived and/or modified sequence
atgcagaactcgcactcgggtgtgaatcagctggggggcgtgttcgtcaacggccgccccttgcctgattcaacacgccaaaagatagtcgaacttgcgcactccggcgcacggccgtgcgacataagccggatcttgcagacccatgcagacgcaaaagttcaggtgctcgacaatcagaatgtgtcaaacggctgtgtatccaaaattcttgggcggtactacgaaaccggttcaatcaggcctcgcgcgattggcggctcaaagccacgcgtcgctacaccagaggtggtttccaagatcgcgcagtataagagagaatgccccagcattttcgcttgggagatccgggatcgcctgctttccgaaggtgtgtgtaccaacgataacatcccatctgttagctcaataaatagggtgctgcggaatcttgccagtgagaaacagcaaatgggcgcggacggtatgtacgataaactccggatgctgaatggtcagactggtagttggggcacccgcccaggatggtaccccggcacctctgtacccggacaacctactcaagatgggtgtcaacaacaggaagggggtggcgaaaacaccaacagcatctccagtaatggtgaggactctgacgaggcgcagatgcgactgcaactcaagcgcaaactgcagaggaacagaacttcattcacacaagaacagatcgaggccctcgaaaaggagttcgagaggactcactaccccgacgtcttcgctagggagagactggccgccaagatcgatctgcccgaggcccggatacaggtttggttttctaaccgacgcgctaaatggcgccgggaggagaaactgagaaaccagaggcgacaggcctctaataccccatctcatattcctatctcaagctcttttagcacttccgtgtaccagccaatacctcagcctaccaccccggtgtcctccttcacctccggctccatgctgggaaggaccgataccgcactgactaatacctatagtgcccttccccctatgccttctttcactatggctaacaatctcccaatgcaaccccccgtgcccagtcagactagctcatactcttgcatgctccccacatctccttcggtcaacgggcggtcttacgatacctacaccccaccgcatatgcaaacgcatatgaactcccagcctatggggacgtcgggtactacgtccactggactcatttcccctggagtctctgtgcccgtccaagtccctggctccgaacctgatatgtcccagtattggccccgcctgcagtag

SEQ ID NO: 93449 - DNA, 2591 bp, Artificial Sequence
  derived and/or modified sequence
cgcccgcccgccggccctcgggctttgtgccgcactgggctccggcgcagaagagtcagccggcactcgagcgccgaggggggcaccgcgcccgccaccagcccgagtggagtcagtcggcaaggcagccgcacgctggaggtagagggaagagcgagctagcgcgagccgggaaggaagccaccaggccaaggcggtggaacgcgcgctccgagggagctcagagccgagcgggaggactgtcagcttccacccagcccccgggctcttgcccccaactccactggagcgctgagctcggaacttgaaaactctctgctccccaggcttcccccgactctcatctcccttgccttgcggaggctggggctcttccctgttctccggccccctgcgcttgggggaagactttaactaggggcgcgcagatgtgtgaggccttttattgtgagagtggacagacatccgagatttcagagccccatattcgagccccgtggaatcccgcggcccccagccagagccagcatgcagaacagtcacagcggagtgaatcagctcggtggtgtctttgtcaacgggcggccactgccggactccacccggcagaagattgtagagctagctcacagcggggcccggccgtgcgacatttcccgaattctgcagacccatgcagatgcaaaagtccaagtgctggacaatcaaaacgtgtccaacggatgtgtgagtaaaattctgggcaggtattacgagactggctccatcagacccagggcaatcggtggtagtaaaccgagagtagcgactccagaagttgtaagcaaaatagcccagtataagcgggagtgcccgtccatctttgcttgggaaatccgagacagattactgtccgagggggtctgtaccaacgataacataccaagcgtgtcatcaataaacagagttcttcgcaacctggctagcgaaaagcaacagatgggcgcagacggcatgtatgataaactaaggatgttgaacgggcagaccggaagctggggcacccgccctggttggtatccggggacttcggtgccagggcaacctacgcaagatggctgccagcaacaggaaggagggggagagaataccaactccatcagttccaacggagaagattcagatgaggctcaaatgcgacttcagctgaagcggaagctgcaaagaaatagaacatcctttacccaagagcaaattgaggccctggagaaagagtttgagagaacccattatccagatgtgtttgcccgagaaagactagcagccaaaatagatctacctgaagcaagaatacaggtatggttttctaatcgaagggccaaatggagaagagaagaaaaactgaggaatcagagaagacaggccagcaacacacctagtcatattcctatcagcagtagtttcagcaccagtgtctaccaaccaattccacaacccaccacaccggtttcctccttcacatctggctccatgttgggccgaacagacacagccctcacaaacacctacagcgctctgccgcctatgcccagcttcaccatggcaaataacctgcctatgcaacccccagtccccagccagacctcctcatactcctgcatgctgcccaccagcccttcggtgaatgggcggagttatgatacctacacccccccacatatgcagacacacatgaacagtcagccaatgggcacctcgggcaccacttcaacaggactcatttcccctggtgtgtcagttccagttcaagttcccggaagtgaacctgatatgtctcaatactggccaagattacagtaaaaaaaaaaaaaaaaaaaaaaaggaaaggaaatattgtgttaattcagtcagtgactatggggacacaacagttgagctttcaggaaagaaagaaaaatggctgttagagccgcttcagttctacaattgtgtcctgtattgtaccactggggaaggaatggacttgaaacaaggacctttgtatacagaaggcacgatatcagttggaacaaatcttcattttggtatccaaacttttattcattttggtgtattatttgtaaatgggcatttgtatgttataatgaaaaaaagaacaatgtagactggatggatgtttgatctgtgttggtcatgaagttgttttttttttttttaaaaagaaaaccatgatcaacaagctttgccacgaatttaagagttttatcaagatatatcgaatacttctacccatctgttcatagtttatggactgatgttccaagtttgtatcattcctttgcatataattaaacctggaacaacatgcactagatttatgtcagaaatatctgttggttttccaaaggttgttaacagatgaagtttatgtgcaaaaaagggtaagatataaattcaaggaagaaaaaaagttgatagctaaaaggtagagtgtgtcttcgatataatccaatttgttttatgtcaaaatgtaagtatttgtcttccctagaaatcctcagaatgatttctataataaagttaatttcatttatatttgacaagaatataga

SEQ ID NO: 93450 - DNA, 1763 bp, Artificial Sequence
  derived and/or modified sequence
ggtgcatttgcatgttgcggagtgattagtgggtttgaaaagggaaccgtggctcggcctcatttcccgctctggttcaggcgcaggaggaagtgttttgctggaggatgatgacagaggaatctgagaattgctctcacacaccaacccagcaacatccgtggagaaaactctcaccagcaactcctttaaaacaccgtcatttcaaaccattgtggtcttcaagcaacaacagcagcacaaaaaaccccaaccaaacaaaactcttgacagaagctgtgacaaccagaaaggatgcctcataaagggggaagactttaactaggggcgcgcagatgtgtgaggccttttattgtgagagtggacagacatccgagatttcagagccccatattcgagccccgtggaatcccgcggcccccagccagagccagcatgcagaacagtcacagcggagtgaatcagctcggtggtgtctttgtcaacgggcggccactgccggactccacccggcagaagattgtagagctagctcacagcggggcccggccgtgcgacatttcccgaattctgcagacccatgcagatgcaaaagtccaagtgctggacaatcaaaacgtgtccaacggatgtgtgagtaaaattctgggcaggtattacgagactggctccatcagacccagggcaatcggtggtagtaaaccgagagtagcgactccagaagttgtaagcaaaatagcccagtataagcgggagtgcccgtccatctttgcttgggaaatccgagacagattactgtccgagggggtctgtaccaacgataacataccaagcgtgtcatcaataaacagagttcttcgcaacctggctagcgaaaagcaacagatgggcgcagacggcatgtatgataaactaaggatgttgaacgggcagaccggaagctggggcacccgccctggttggtatccggggacttcggtgccagggcaacctacgcaagatggctgccagcaacaggaaggagggggagagaataccaactccatcagttccaacggagaagattcagatgaggctcaaatgcgacttcagctgaagcggaagctgcaaagaaatagaacatcctttacccaagagcaaattgaggccctggagaaagagtttgagagaacccattatccagatgtgtttgcccgagaaagactagcagccaaaatagatctacctgaagcaagaatacaggtatggttttctaatcgaagggccaaatggagaagagaagaaaaactgaggaatcagagaagacaggccagcaacacacctagtcatattcctatcagcagtagtttcagcaccagtgtctaccaaccaattccacaacccaccacaccggtttcctccttcacatctggctccatgttgggccgaacagacacagccctcacaaacacctacagcgctctgccgcctatgcccagcttcaccatggcaaataacctgcctatgcaacccccagtccccagccagacctcctcatactcctgcatgctgcccaccagcccttcggtgaatgggcggagttatgatacctacacccccccacatatgcagacacacatgaacagtcagccaatgggcacctcgggcaccacttcaacaggactcatttcccctggtgtgtcagttccagttcaagttcccggaagtgaacctgatatgtctcaatactggccaagattacagtaaaaaaaaaaaaaaaaaaa

SEQ ID NO: 93451 - DNA, 2614 bp, Artificial Sequence
  derived and/or modified sequence
accctcttttcttatcattgacatttaaactctggggcaggtcctcgcgtagaacgcggctgtcagatctgccacttcccctgccgagcggcggtgagaagtgtgggaaccggcgctgccaggctcacctgcctccccgccctccgctcccagggggaagactttaactaggggcgcgcagatgtgtgaggccttttattgtgagagtggacagacatccgagatttcagagccccatattcgagccccgtggaatcccgcggcccccagccagagccagcatgcagaacagtcacagcggagtgaatcagctcggtggtgtctttgtcaacgggcggccactgccggactccacccggcagaagattgtagagctagctcacagcggggcccggccgtgcgacatttcccgaattctgcagacccatgcagatgcaaaagtccaagtgctggacaatcaaaacgtgtccaacggatgtgtgagtaaaattctgggcaggtattacgagactggctccatcagacccagggcaatcggtggtagtaaaccgagagtagcgactccagaagttgtaagcaaaatagcccagtataagcgggagtgcccgtccatctttgcttgggaaatccgagacagattactgtccgagggggtctgtaccaacgataacataccaagcgtgtcatcaataaacagagttcttcgcaacctggctagcgaaaagcaacagatgggcgcagacggcatgtatgataaactaaggatgttgaacgggcagaccggaagctggggcacccgccctggttggtatccggggacttcggtgccagggcaacctacgcaagatggctgccagcaacaggaaggagggggagagaataccaactccatcagttccaacggagaagattcagatgaggctcaaatgcgacttcagctgaagcggaagctgcaaagaaatagaacatcctttacccaagagcaaattgaggccctggagaaagagtttgagagaacccattatccagatgtgtttgcccgagaaagactagcagccaaaatagatctacctgaagcaagaatacaggtatggttttctaatcgaagggccaaatggagaagagaagaaaaactgaggaatcagagaagacaggccagcaacacacctagtcatattcctatcagcagtagtttcagcaccagtgtctaccaaccaattccacaacccaccacaccggtttcctccttcacatctggctccatgttgggccgaacagacacagccctcacaaacacctacagcgctctgccgcctatgcccagcttcaccatggcaaataacctgcctatgcaacccccagtccccagccagacctcctcatactcctgcatgctgcccaccagcccttcggtgaatgggcggagttatgatacctacacccccccacatatgcagacacacatgaacagtcagccaatgggcacctcgggcaccacttcaacaggactcatttcccctggtgtgtcagttccagttcaagttcccggaagtgaacctgatatgtctcaatactggccaagattacagtaaaaaaaaaaaaaaaaaaaaaaaggaaaggaaatattgtgttaattcagtcagtgactatggggacacaacagttgagctttcaggaaagaaagaaaaatggctgttagagccgcttcagttctacaattgtgtcctgtattgtaccactggggaaggaatggacttgaaacaaggacctttgtatacagaaggcacgatatcagttggaacaaatcttcattttggtatccaaacttttattcattttggtgtattatttgtaaatgggcatttgtatgttataatgaaaaaaagaacaatgtagactggatggatgtttgatctgtgttggtcatgaagttgttttttttttttttaaaaagaaaaccatgatcaacaagctttgccacgaatttaagagttttatcaagatatatcgaatacttctacccatctgttcatagtttatggactgatgttccaagtttgtatcattcctttgcatataattaaacctggaacaacatgcactagatttatgtcagaaatatctgttggttttccaaaggttgttaacagatgaagtttatgtgcaaaaaagggtaagatataaattcaaggaagaaaaaaagttgatagctaaaaggtagagtgtgtcttcgatataatccaatttgttttatgtcaaaatgtaagtatttgtcttccctagaaatcctcagaatgatttctataataaagttaatttcatttatatttgacaagaatatagatgttttatacacattttcatgcaatcatacgtttcttttttggccagcaaaagttaattgttcttagatatagttgtattactgttcacggtccaatcattttgtgcatctagagttcattcctaatcaattaaaagtgcttgcaagagttttaaacttaagtgttttgaagttgttcacaactacatatcaaaattaaccattgttgattgtaaaaaaccatgccaaagcctttgtatttcctttattatacagttttctttttaacct

SEQ ID NO: 93452 - DNA, 6922 bp, Artificial Sequence
  derived and/or modified sequence
accctcttttcttatcattgacatttaaactctggggcaggtcctcgcgtagaacgcggctgtcagatctgccacttcccctgccgagcggcggtgagaagtgtgggaaccggcgctgccaggctcacctgcctccccgccctccgctcccaggaatctgagaattgctctcacacaccaacccagcaacatccgtggagaaaactctcaccagcaactcctttaaaacaccgtcatttcaaaccattgtggtcttcaagcaacaacagcagcacaaaaaaccccaaccaaacaaaactcttgacagaagctgtgacaaccagaaaggatgcctcataaagggggaagactttaactaggggcgcgcagatgtgtgaggccttttattgtgagagtggacagacatccgagatttcagagccccatattcgagccccgtggaatcccgcggcccccagccagagccagcatgcagaacagtcacagcggagtgaatcagctcggtggtgtctttgtcaacgggcggccactgccggactccacccggcagaagattgtagagctagctcacagcggggcccggccgtgcgacatttcccgaattctgcagacccatgcagatgcaaaagtccaagtgctggacaatcaaaacgtgtccaacggatgtgtgagtaaaattctgggcaggtattacgagactggctccatcagacccagggcaatcggtggtagtaaaccgagagtagcgactccagaagttgtaagcaaaatagcccagtataagcgggagtgcccgtccatctttgcttgggaaatccgagacagattactgtccgagggggtctgtaccaacgataacataccaagcgtgtcatcaataaacagagttcttcgcaacctggctagcgaaaagcaacagatgggcgcagacggcatgtatgataaactaaggatgttgaacgggcagaccggaagctggggcacccgccctggttggtatccggggacttcggtgccagggcaacctacgcaagatggctgccagcaacaggaaggagggggagagaataccaactccatcagttccaacggagaagattcagatgaggctcaaatgcgacttcagctgaagcggaagctgcaaagaaatagaacatcctttacccaagagcaaattgaggccctggagaaagagtttgagagaacccattatccagatgtgtttgcccgagaaagactagcagccaaaatagatctacctgaagcaagaatacaggtatggttttctaatcgaagggccaaatggagaagagaagaaaaactgaggaatcagagaagacaggccagcaacacacctagtcatattcctatcagcagtagtttcagcaccagtgtctaccaaccaattccacaacccaccacaccggtttcctccttcacatctggctccatgttgggccgaacagacacagccctcacaaacacctacagcgctctgccgcctatgcccagcttcaccatggcaaataacctgcctatgcaacccccagtccccagccagacctcctcatactcctgcatgctgcccaccagcccttcggtgaatgggcggagttatgatacctacacccccccacatatgcagacacacatgaacagtcagccaatgggcacctcgggcaccacttcaacaggactcatttcccctggtgtgtcagttccagttcaagttcccggaagtgaacctgatatgtctcaatactggccaagattacagtaaaaaaaaaaaaaaaaaaaaaaaggaaaggaaatattgtgttaattcagtcagtgactatggggacacaacagttgagctttcaggaaagaaagaaaaatggctgttagagccgcttcagttctacaattgtgtcctgtattgtaccactggggaaggaatggacttgaaacaaggacctttgtatacagaaggcacgatatcagttggaacaaatcttcattttggtatccaaacttttattcattttggtgtattatttgtaaatgggcatttgtatgttataatgaaaaaaagaacaatgtagactggatggatgtttgatctgtgttggtcatgaagttgttttttttttttttaaaaagaaaaccatgatcaacaagctttgccacgaatttaagagttttatcaagatatatcgaatacttctacccatctgttcatagtttatggactgatgttccaagtttgtatcattcctttgcatataattaaacctggaacaacatgcactagatttatgtcagaaatatctgttggttttccaaaggttgttaacagatgaagtttatgtgcaaaaaagggtaagatataaattcaaggaagaaaaaaagttgatagctaaaaggtagagtgtgtcttcgatataatccaatttgttttatgtcaaaatgtaagtatttgtcttccctagaaatcctcagaatgatttctataataaagttaatttcatttatatttgacaagaatatagatgttttatacacattttcatgcaatcatacgtttcttttttggccagcaaaagttaattgttcttagatatagttgtattactgttcacggtccaatcattttgtgcatctagagttcattcctaatcaattaaaagtgcttgcaagagttttaaacttaagtgttttgaagttgttcacaactacatatcaaaattaaccattgttgattgtaaaaaaccatgccaaagcctttgtatttcctttattatacagttttctttttaaccttatagtgtggtgttacaaattttatttccatgttagatcaacattctaaaccaatggttactttcacacacactctgttttacatcctgatgatccttaaaaaataatccttatagataccataaatcaaaaacgtgttagaaaaaaattccacttacagcagggtgtagatctgtgcccatttatacccacaacatatatacaaaatggtaacatttcccagttagccatttaattctaaagctcaaagtctagaaataatttaaaaatgcaacaagcgattagctaggaattgttttttgaattaggactggcattttcaatctgggcagatttccattgtcagcctatttcaacaatgatttcactgaagtatattcaaaagtagatttcttaaaggagactttctgaaagctgttgcctttttcaaataggccctctcccttttctgtctccctcccctttgcacaagaggcatcatttcccattgaaccactacagctgttcccatttgaatcttgctttctgtgcggttgtggatggttggagggtggaggggggatgttgcatgtcaaggaataatgagcacagacacatcaacagacaacaacaaagcagactgtgactggccggtgggaattaaaggccttcagtcattggcagcttaagccaaacattcccaaatctatgaagcagggcccattgttggtcagttgttatttgcaatgaagcacagttctgatcatgtttaaagtggaggcacgcagggcaggagtgcttgagcccaagcaaaggatggaaaaaaataagcctttgttgggtaaaaaaggactgtctgagactttcatttgttctgtgcaacatataagtcaatacagataagtcttcctctgcaaacttcactaaaaagcctgggggttctggcagtctagattaaaatgcttgcacatgcagaaacctctggggacaaagacacacttccactgaattatactctgctttaaaaaaatccccaaaagcaaatgatcagaaatgtagaaattaatggaaggatttaaacatgaccttctcgttcaatatctactgttttttagttaaggaattacttgtgaacagataattgagattcattgctccggcatgaaatatactaataattttattccaccagagttgctgcacatttggagacaccttcctaagttgcagtttttgtatgtgtgcatgtagttttgttcagtgtcagcctgcactgcacagcagcacatttctgcaggggagtgagcacacatacgcactgttggtacaattgccggtgcagacatttctacctcctgacattttgcagcctacattccctgagggctgtgtgctgagggaactgtcagagaagggctatgtgggagtgcatgccacagctgctggctggcttacttcttccttctcgctggctgtaatttccaccacggtcaggcagccagttccggcccacggttctgttgtgtagacagcagagactttggagacccggatgtcgcacgccaggtgcaagaggtgggaatgggagaaaaggagtgacgtgggagcggagggtctgtatgtgtgcacttgggcacgtatatgtgtgctctgaaggtcaggattgccagggcaaagtagcacagtctggtatagtctgaagaagcggctgctcagctgcagaagccctctggtccggcaggatgggaacggctgccttgccttctgcccacaccctagggacatgagctgtccttccaaacagagctccaggcactctcttggggacagcatggcaggctctgtgtggtagcagtgcctgggagttggccttttactcattgttgaaataatttttgtttattatttatttaacgatacatatatttatatatttatcaatggggtatctgcagggatgttttgacaccatcttccaggatggagattatttgtgaagacttcagtagaatcccaggactaaacgtctaaattttttctccaaacttgactgacttgggaaaaccaggtgaatagaataagagctgaatgttttaagtaataaacgttcaaactgctctaagtaaaaaaatgcattttactgcaatgaatttctagaatatttttcccccaaagctatgcctcctaacccttaaatggtgaacaactggtttcttgctacagctcactgccatttcttcttactatcatcactaggtttcctaagattcactcatacagtattatttgaagattcagctttgttctgtgaatgtcatcttaggattgtgtctatattcttttgcttatttctttttactctgggcctctcatactagtaagattttaaaaagccttttcttctctgtatgtttggctcaccaaggcgaaatatatattcttctctttttcatttctcaagaataaacctcatctgcttttttgtttttctgtgttttggcttggtactgaatgactcaactgctcggttttaaagttcaaagtgtaagtacttagggttagtactgcttatttcaataatgttgacggtgactatctttggaaagcagtaacatgctgtcttagaaatgacattaataatgggcttaaacaaatgaataggggggtccccccactctccttttgtatgcctatgtgtgtctgatttgttaaaagatggacagggaattgattgcagagtgtcgcttccttctaaagtagttttattttgtctactgttagtatttaaagatcctggaggtggacataaggaataaatggaagagaaaagtagatattgtatggtggctactaaaaggaaattcaaaaagtcttagaacccgagcacctgagcaaactgcagtagtcaaaatatttatctcatgttaaagaaaggcaaatctagtgtaagaaatgagtaccatatagggttttgaagttcatatactagaaacacttaaaagatatcatttcagatattacgtttggcattgttcttaagtatttatatctttgagtcaagctgataattaaaaaaaatctgttaatggagtgtatatttcataatgtatcaaaatggtgtctatacctaaggtagcattattgaagagagatatgtttatgtagtaagttattaacataatgagtaacaaataatgtttccagaagaaaggaaaacacattttcagagtgcgtttttatcagaggaagacaaaaatacacacccctctccagtagcttatttttacaaagccggcccagtgaattagaaaaacaaagcacttggatatgatttttggaaagcccaggtacacttattattcaaaatgcacttttactgagtttgaaaagtttcttttatatttaaaataagggttcaaatatgcatattcaatttttatagtagttatctatttgcaaagcatatattaactagtaattggctgttaattttatagacatggtagccagggaagtatatcaatgacctattaagtattttgacaagcaatttacatatctgatgacctcgtatctctttttcagcaagtcaaatgctatgtaattgttccattgtgtgttgtataaaatgaatcaacacggtaagaaaaaggttagagttattaaaataataaactgactaaaatactcatttgaatttattcagaatgttcataatgctttcaaaggacatagcagagcttttgtggagtatccgcacaacattatttattatctatggactaaatcaattttttgaagttgctttaaaatttaaaagcacctttgcttaatataaagccctttaattttaactgacagatcaattctgaaactttattttgaaaagaaaatggggaagaatctgtgtctttagaattaaaagaaatgaaaaaaataaacccgacattctaaaaaaatagaataagaaacctgatttttagtactaatgaaatagcgggtgacaaaatagttgtctttttgattttgatcacaaaaaataaactggtagtgacaggatatgatggagagatttgacatcctggcaaatcactgtcattgattcaattattctaattctgaataaaagctgtatacagta

SEQ ID NO: 93453 - DNA, 1311 bp, Artificial Sequence
  derived and/or modified sequence
atgcagaacagccacagcggcgtgaaccagctgggcggcgtgtttgtgaatggccggcccctgcctgacagcacccggcagaagatcgtggagctggcccacagcggggcccggccctgtgacatcagccgcatcctgcagacccatgctgatgccaaggtgcaggtgctggacaaccagaatgtgtccaatggctgtgtgtccaagatcctgggccgctactatgaaacaggcagcatccggccccgggccatcggcggcagcaagccccgggtggccaccccagaggtggtgtccaagatcgcccagtacaagagagaatgtcccagcatctttgcctgggagatccgggaccggctgctgtctgagggcgtgtgcaccaatgacaacatccccagcgtgagcagcatcaacagagtgctgaggaacctggccagcgagaagcagcagatgggcgcagatggcatgtatgacaagctgaggatgctgaatggccagacaggctcctggggcacccggcccggctggtacccaggcacctctgtgcccggccagcccacccaggacggctgccagcagcaggagggcggcggggagaacaccaacagcatcagcagcaatggagaagattctgatgaggcccagatgaggctgcagctgaagaggaagctgcagaggaacagaaccagcttcacccaggagcagatcgaggccctggagaaggagtttgagaggacccactacccagatgtgtttgcccgggagcggctggccgccaagattgacctgcctgaggcccgcatccaggtgtggttcagcaacagaagagccaagtggaggcgggaggagaagctgaggaaccagaggcggcaggccagcaacacccccagccacatccccatcagcagcagcttcagcacctctgtgtaccagcccatcccccagcccaccacccctgtgagcagcttcaccagcggctccatgctgggccgcacagacacagccctgaccaacacctacagcgccctgccccccatgcccagcttcaccatggccaacaacctgcccatgcagccccctgtgcccagccagaccagcagctacagctgcatgctgcccaccagccccagcgtgaatggccgctcctatgacacctacaccccaccccacatgcagacccacatgaacagccagcccatgggcaccagcggcaccaccagcacaggcctcatcagccctggggtgtctgtgcctgtgcaggtgcccggcagcgagccagacatgagccagtactggccccggctgcagtag

SEQ ID NO: 93454 - DNA, 1311 bp, Artificial Sequence
  derived and/or modified sequence
atgcagaacagccacagcggcgtgaaccagctgggcggcgtgttcgtgaacggccggcctttacccgactccacccgccaaaaaattgtggagctagcccacagcggagcaagaccctgtgatatctcacgaatcctgcagacccatgcggacgccaaggtgcaggttctggataaccagaacgtgtctaatgggtgcgtatcgaagatcctggggaggtattacgaaaccggctctatccgaccacgcgctattggaggttctaaaccacgcgtggccactcccgaagttgtgagcaaaatcgcgcaatacaaaagagaatgcccttctatttttgcctgggagattcgggatagactgctgtctgagggggtgtgcaccaacgataatattccgagcgtgtcttcaattaatcgcgtgttgaggaatctggcaagtgaaaagcagcagatgggagctgatgggatgtacgataagttaaggatgctcaacggtcagaccggtagctggggcacccgtccaggctggtatcctgggacctcagtgcccgggcagccaacacaggacggctgccagcagcaggagggcggcggcgaaaacacaaacagtatctcttccaatggagaagattccgatgaagcccagatgagactacaactcaaacggaaactgcagcgaaacaggactagttttacccaggagcaaatcgaggctctggagaaagaattcgagcgaacccattatcctgatgtctttgctcgagagcggcttgccgccaagatcgatctgcccgaggccagaattcaggtgtggttctctaatcgaagggctaaatggaggagagaagagaaactgcgcaaccagaggcgtcaggcttctaacactccctcccatatcccaatcagcagctctttttcgacctctgtctaccagccgatcccccagcctacaactcccgtgtcctctttcaccagtggatccatgttaggccgtactgatactgctctcacaaatacttactccgccctgccacctatgccgtcgttcaccatggccaataatctgccaatgcaacccccagtcccatctcaaacatcaagttattcatgcatgctgccaacaagcccctccgtgaacgggcgaagctatgatacttatacacctccacatatgcaaacacacatgaactcacagcctatgggtacgtccggaaccacgagtactggattgatcagtcccggcgtatctgtaccggtccaagtccccggatcggagccggacatgagccagtactggccacggctccaatag

SEQ ID NO: 93455 - DNA, 1311 bp, Artificial Sequence
  derived and/or modified sequence
atgcagaacagccacagcggcgtgaaccagctgggcggcgtgttcgtgaacggacgtccgctgccagactctacacgccaaaaaatcgtggagctggcacattcaggcgcccgtccctgtgacatttcccggatcctccagacacatgccgacgcgaaggtacaggtccttgataaccagaacgtgtctaacgggtgtgtgtcaaagattcttggtcggtactacgagactgggagcatcaggccccgagccatcggcggaagtaagccacgggtggctactcccgaggtggtgtccaaaatcgctcagtataagcgtgagtgtccatccatcttcgcctgggaaattcgtgacagactgctttccgagggcgtgtgtactaatgacaatattccttctgtctctagcatcaacagggtactccggaacctggctagcgagaaacagcaaatgggggctgacggaatgtacgacaagttaaggatgcttaatgggcagactgggagctggggaaccagacctggctggtacccaggtacaagtgtccctggccaacctactcaagatggatgtcaacagcaggaagggggaggtgaaaacaccaactccatttcaagcaacggcgaagattccgatgaagctcagatgcgactgcagcttaagaggaaactacaacgaaataggacctctttcacccaggagcaaatcgaagcccttgaaaaggagtttgagagaacacactatcccgatgtgttcgcacgagagcgccttgcggccaagattgacctgccggaagcacgaatccaggtctggttcagcaatcgccgcgcgaaatggcgcagagaggaaaagcttcggaaccagaggcgacaggcctccaatacaccgtcccatatcccaatttctagcagttttagcacgtccgtttatcagcctatcccccagcccactacccctgtgagttccttcaccagcgggagcatgctgggaagaaccgacaccgccttaacaaacacctactctgcactcccccctatgccatcatttactatggctaataacctacctatgcagccccctgtgcccagccagacctcgagttatagctgcatgcttcccaccagcccgagtgtgaacggcaggagctatgatacgtacacccccccccacatgcagacgcacatgaatagtcaacctatgggtacatcagggacgaccagcactgggctcatatcccctggcgtgtctgtgccagtgcaagtacccgggtccgagccagatatgagtcagtattggcctagacttcagtag

SEQ ID NO: 93456 - DNA, 1311 bp, Artificial Sequence
  derived and/or modified sequence
atgcagaacagccacagcggcgtgaaccagctgggcggcgtgttcgtgaacggcaggcctcttcccgactcaacaagacaaaagatagtcgagctggcccattccggcgcccgaccctgtgatatctcgcgaatactacagacccatgctgacgccaaggttcaggtattggataatcaaaacgtgtcaaacggatgcgtgagcaagatcctgggaaggtactacgaaaccggtagcatcagaccccgcgcgattgggggttctaaaccgagagtggccacacccgaggtggtatccaagatcgcccagtataagcgggagtgtccttccatctttgcttgggaaatcagagacaggctgttgtccgagggggtttgtaccaacgacaacatcccttccgtgagcagcataaacagggtcctgaggaacctggcaagcgagaagcagcagatgggagcggatggcatgtatgataagctcagaatgctgaatggtcagacaggatcttggggaacaagaccagggtggtatcccggaaccagtgtacccggccagccgacacaggatggctgccagcaacaggaaggaggtggcgagaacactaacagcatctcctctaacggggaggattccgacgaggcccagatgcgccttcagctgaaacgcaaacttcaacggaatcgcacgagctttacccaagagcaaatcgaggctctggagaaagagttcgagcgcacccattaccctgacgtttttgccagagagcgcctcgccgctaagatagacctgccagaagcgaggatccaggtttggtttagcaatagacgggccaaatggcgacgagaggaaaagctcaggaatcagaggcgccaggcctcaaatacgccctcacacatccccatatccagttcattttcaacttccgtctaccagccaatcccacagcctactacccccgtgtcgtcctttacaagcgggagcatgctcggccgaacagatacagcattaactaatacctattctgccttgccacccatgccttcatttactatggccaataatctgcccatgcagcctccagtgccttcccagacgtctagctactcctgtatgctcccaactagcccaagcgtgaacggcagatcatacgacacatatacgcccccacacatgcagacccatatgaattcccagcccatgggcacaagcggtacaacatcaaccggacttatctcaccgggggtctccgttccggttcaggttcctggctctgagccggacatgagtcagtattggccgcggttacagtag

SEQ ID NO: 93457 - DNA, 1311 bp, Artificial Sequence
  derived and/or modified sequence
atgcagaacagccacagcggcgtgaaccagctgggcggcgtgttcgtgaatggtaggcccctgccagacagtaccaggcagaagatagtagagctggcccacagcggcgctagaccgtgtgacatctccaggatcctgcaaacacacgctgatgcaaaagtgcaggtgttggataatcagaacgtaagcaatgggtgcgttagcaagatcctcggccgctattatgagacgggatcaatcagaccccgagccatcggcggatcaaagccacgcgttgctactccggaagttgtgagtaagatagcacaatataaaagagaatgtcctagcatcttcgcatgggaaataagagaccggctactgtcagagggagtgtgtacaaacgataacattccatccgtgtcttccattaacagagtgctgagaaacctggcttccgagaaacagcagatgggggccgacgggatgtacgataagctacgtatgttgaacgggcagaccggctcgtggggcacccgacccgggtggtacccgggcaccagtgttccgggccagcccactcaggacgggtgtcagcagcaggaaggcgggggggaaaacaccaattctatttccagcaatggtgaggactccgatgaggcccagatgcgcctgcagctcaaaaggaaactgcagcggaaccgaacctccttcacacaagaacagattgaggccctggaaaaggaattcgagaggactcactatcccgacgttttcgcccgggaaaggctggctgctaagatcgacctacccgaggccagaatccaggtgtggttcagcaaccgcagagccaaatggagacgggaagagaagttgcggaaccagcgacgtcaagcaagcaacactccatctcacattccaatatcaagtagcttcagcacttctgtatatcagcccattcctcagccaaccactcctgtgagctcttttactagcggttccatgctagggcggactgataccgcgctgactaatacctactcagccctgccccctatgcccagcttcaccatggccaataacctaccaatgcagccccctgtgccttcacaaacatcatcctacagttgcatgctccctactagcccctctgtgaatgggcgttcgtatgatacatatacacctccccacatgcaaacccacatgaattcgcagccaatgggcacgagcggaacaacatcgacagggcttatatcccctggggtgtctgttcccgtacaggtgccaggttcagagcccgacatgagccagtattggccccgcctgcaatag

SEQ ID NO: 93458 - DNA, 1311 bp, Artificial Sequence
  derived and/or modified sequence
atgcagaactctcacagcggcgttaaccaattgggaggggtgtttgtgaacggacggccattacccgacagcaccagacagaaaattgtcgagctggctcactcaggcgcacgcccttgcgatatttccagaattctacagacacatgcagacgcgaaggtgcaggttctggacaaccagaacgtgtccaacggttgtgtgtctaaaatactggggaggtactacgaaaccggcagcattaggcccagagccatcgggggaagcaagccacgcgtggcgacccccgaggtggtgagtaaaatcgcccagtataaaagagaatgtccttcaatttttgcttgggagatccgagataggcttttgtctgaaggggtttgcaccaacgacaacattccctccgtctcctctattaatagagtactgcggaaccttgcctctgagaagcagcagatgggtgcagacggcatgtatgataagcttaggatgctgaacggccaaactggctcgtggggcacgcgaccgggatggtacccaggaaccagcgtcccgggacagccaacacaagacggatgtcagcagcaagagggagggggtgagaacactaacagcatcagttcaaatggagaggattctgacgaggcccagatgcggttacagctgaagcggaagctccaacgtaatcgcacctcatttacccaagaacaaattgaggccctggagaaggaattcgagagaacacactaccccgatgtgtttgctagggagcgcctggcagccaaaatcgatcttcccgaggccagaatccaagtgtggttttccaatcgccgagccaagtggcgaagggaggagaaactaaggaaccagcggaggcaggcgtcaaatacccccagccacatcccaatcagctcatccttttctaccagcgtgtatcagcctatcccccagccaacaacaccagtaagctccttcaccagcgggagcatgcttgggaggacagataccgcactaactaatacctactccgccctgcccccaatgccaagcttcactatggccaataacctgcctatgcaaccacccgtaccatcgcagaccagttcatattcttgtatgttgcccacttccccatctgtcaatggcaggtcctacgacacttataccccacctcatatgcagacacatatgaacagtcaacccatgggaacatctgggacaacaagtaccgggctgatctctccaggtgtttccgtgccagtgcaagtgcctggaagtgaacctgatatgagccagtactggcctaggctgcagtag

SEQ ID NO: 93459 - DNA, 1311 bp, Artificial Sequence
  derived and/or modified sequence
atgcagaactcacactctggagtcaaccagctagggggtgttttcgtgaatggacggccactgccggattccaccagacaaaagattgtggagctggcgcatagtggagctcgtccatgtgacatctcgcggatactccaaactcacgcagatgctaaggtacaggttctggacaaccagaatgtgagtaacggctgtgtctctaaaatcttgggcaggtactatgaaacgggatcgatacgacccagggcaattggtggatccaagccaagggtggccacgcccgaggtagtgagcaagatcgcacaatataagagagagtgcccctccatattcgcatgggagattcgtgatcgtctgcttagtgagggggtttgtaccaatgacaacattccgtcagtgagcagtataaaccgagtccttaggaacctggcctctgagaagcagcaaatgggtgccgacggtatgtacgataaactgcgcatgttaaacggccagacgggctcatggggcactcgcccaggctggtaccccggtacctcagtccccggtcagcccacgcaggacggctgccagcaacaggagggaggcggagaaaacactaattccatctcctctaatggtgaggatagcgatgaggcccaaatgcgcctgcagctcaagaggaagttacagcggaatcgcacctcattcacacaggaacagatcgaagcactggagaaggagtttgagagaacacactacccggacgtcttcgcacgggagcgccttgcggctaagatagacctacccgaggccaggatccaggtctggttctccaaccgccgagccaagtggaggagagaagagaagctgcggaatcaacgccgacaggcctccaatactccttcccatatccccattagctccagtttttctacctccgtataccagccaatcccccagccgactacaccagtgagctcctttaccagcggctccatgctgggcagaaccgatacggccctgaccaatacatattccgctctgccaccgatgcccagcttcacaatggcaaataatctccccatgcagccccctgtgccttcgcagacgtctagttacagctgcatgctgccaaccagcccctctgtgaatgggcgttcttacgatacttatacacctccccacatgcagactcacatgaactctcaaccaatgggcacatccgggaccacttcaacagggctgataagccccggtgtgtcagtccccgttcaggtgcctggctccgagcccgatatgtcacagtactggccccgtctgcagtag

SEQ ID NO: 93460 - DNA, 1311 bp, Artificial Sequence
  derived and/or modified sequence
atgcagaattcccatagcggggtgaaccagctcgggggagtctttgtgaatggacgccctctgcctgattctacaaggcagaagattgtggaactagcacacagcggagccagaccgtgcgacatctcccggatcctccagacccacgcagatgccaaggtccaggtactcgataatcaaaatgtgtcgaatgggtgcgtcagcaaaattctggggaggtattacgagacaggtagcattcggccacgcgctatcggaggttccaagccacgggtggcaacccctgaagttgtaagcaagattgctcaatataaacgagaatgtccttcaatcttcgcctgggaaatccgtgatcgactcctgtccgaaggtgtttgcaccaatgacaatataccctctgtatccagtataaatagggtgctgcggaacctggctagcgagaaacagcagatgggagccgacggcatgtacgataagttacgcatgttgaacggccagaccgggagttggggcactagacctggctggtaccccggtacttctgtgcccggtcagccgacccaggatgggtgccagcagcaggaaggtggtggggaaaacaccaacagtatatcctcaaacggcgaagactctgacgaggcgcagatgaggctgcagctgaagcgtaaactccagcgcaaccgaaccagttttacccaggagcagattgaggccctcgaaaaggagttcgagagaacccattatcctgatgtttttgccagggaaagactagccgctaagatcgacctacccgaggcccgaattcaagtttggttcagcaacaggcgggctaaatggagaagggaggagaagctgcgtaaccagcgcagacaggcttctaacaccccaagtcatataccgatctcttcaagtttttccacctccgtataccagcccattcctcagccgacaacccctgtgtcctcctttaccagcggtagcatgttaggaaggacagatactgcactaactaacacgtactcagcactgcctcccatgcctagttttacaatggcaaacaatttaccaatgcagccacccgtaccttcccagacttccagttattcctgcatgctgccaaccagtccctctgtcaatggcagatcatatgacacttacactccaccccacatgcaaactcatatgaattcacagccaatgggaacatccggcacaacttccaccggactgatctcgccaggcgtaagcgttcccgttcaggtgccagggagtgaacctgacatgagtcagtactggcctcgacttcagtag

SEQ ID NO: 93461 - DNA, 1311 bp, Artificial Sequence
  derived and/or modified sequence
atgcagaactcacactccggggtcaaccagctgggcggagtcttcgtgaacggccgtccgctaccagactccactcggcagaaaatcgttgaactggcgcactctggcgcaagaccatgcgacatctcccgtatcctgcaaacacacgcagacgctaaagtgcaggttctggataatcagaacgtgagcaacggttgcgtcagcaagatcctgggcagatattacgagacgggatccatccggccacgcgctatcggaggttctaaacctagagtggctacccctgaggtggtgagcaagatcgcccagtataagagagagtgtcctagcatattcgcctgggaaatacgggaccggttactctccgaaggggtgtgtactaacgacaacattccatctgtgagttccattaacagggttctgcgaaacttagccagtgagaagcagcagatgggtgccgatggaatgtatgataagctgcgtatgctcaacggccagacaggtagctgggggacccgtccagggtggtaccccggaacctctgtacctggtcagcctacacaggatgggtgtcagcagcaggagggcggtggggagaacaccaattccatctcctcaaacggggaagactcggatgaggcacagatgcggcttcagcttaaacgcaagctccagcggaacaggacgtctttcacacaagagcagattgaggcccttgaaaaagagttcgagcgcacacactaccccgatgtgttcgctcgggagaggttggctgcaaaaatagaccttccggaggccagaattcaggtgtggttcagtaacaggcgggcaaagtggcgccgtgaagaaaagttgcgaaaccaacgccgacaggcatcgaatacgccctcacatattcctatatcatcttctttctccactagtgtttatcagcccattccccagcctaccacacccgtatcaagcttcacttccggctccatgctgggcaggactgataccgcgctgacaaacacgtactcagcactgccaccaatgccatccttcaccatggccaacaatctccccatgcagcctcctgtgccatcccagacgagcagctattcctgcatgcttccaacctctccttcagtgaacggcagatcttatgatacttacactcctccccacatgcagactcatatgaactcgcagcccatgggcacgagcggtaccactagcacgggacttatctcgcccggagtgagcgtgccagtgcaggtcccaggctctgaacccgatatgtctcagtactggccacgactccaatag

SEQ ID NO: 93462 - DNA, 1311 bp, Artificial Sequence
  derived and/or modified sequence
atgcagaacagccacagcggcgtgaaccagctgggcggcgtgttcgtgaacggcagacccctgcccgacagcaccagacagaagatcgtggagctggcccacagcggcgccagaccctgcgacatcagcagaatcctgcagacccacgccgacgccaaggtgcaggtgctggacaaccagaacgtgagcaacggctgcgtgagcaagatcctgggcagatactacgagaccggcagcatcagacccagagccatcggcggcagcaagcccagagtggccacccccgaggtggtgagcaagatcgcccagtacaagagagagtgccccagcatcttcgcctgggagatcagagacagactgctgagcgagggcgtgtgcaccaacgacaacatccccagcgtgagcagcatcaacagagtgctgagaaacctggccagcgagaagcagcagatgggcgccgacggcatgtacgacaagctgagaatgctgaacggccagaccggcagctggggcaccagacccggctggtaccccggcaccagcgtgcccggccagcccacccaggacggctgccagcagcaggagggcggcggcgagaacaccaacagcatcagcagcaacggcgaggacagcgacgaggcccagatgagactgcagctgaagagaaagctgcagagaaacagaaccagcttcacccaggagcagatcgaggccctggagaaggagttcgagagaacccactaccccgacgtgttcgccagagagagactggccgccaagatcgacctgcccgaggccagaatccaggtgtggttcagcaacagaagagccaagtggagaagagaggagaagctgagaaaccagagaagacaggccagcaacacccccagccacatccccatcagcagcagcttcagcaccagcgtgtaccagcccatcccccagcccaccacccccgtgagcagcttcaccagcggcagcatgctgggcagaaccgacaccgccctgaccaacacctacagcgccctgccccccatgcccagcttcaccatggccaacaacctgcccatgcagccccccgtgcccagccagaccagcagctacagctgcatgctgcccaccagccccagcgtgaacggcagaagctacgacacctacacccccccccacatgcagacccacatgaacagccagcccatgggcaccagcggcaccaccagcaccggcctgatcagccccggcgtgagcgtgcccgtgcaggtgcccggcagcgagcccgacatgagccagtactggcccagactgcagtag

SEQ ID NO: 93463 - protein, 422 aa, Artificial Sequence [sequence omitted]

SEQ ID NO: 93464 - protein, 58 aa, Artificial Sequence
  derived and/or modified sequence
MQNSHSGVNQLGGVFVNGRPLPDSTRQKIVELAHSGARPCDISRILQVSNGCVSKILG

SEQ ID NO: 93465 - protein, 377 aa, Artificial Sequence [sequence omitted]

SEQ ID NO: 93466 - DNA, 6947 bp, Artificial Sequence
  derived and/or modified sequence
ggtgcatttgcatgttgcggagtgattagtgggtttgaaaagggaaccgtggctcggcctcatttcccgctctggttcaggcgcaggaggaagtgttttgctggaggatgatgacagaggtcaggcttcgctaatgggccagtgaggagcggtggaggcgaggccgggcgccggcacacacacattaacacacttgagccatcaccaatcagcataggaatctgagaattgctctcacacaccaacccagcaacatccgtggagaaaactctcaccagcaactcctttaaaacaccgtcatttcaaaccattgtggtcttcaagcaacaacagcagcacaaaaaaccccaaccaaacaaaactcttgacagaagctgtgacaaccagaaaggatgcctcataaagggggaagactttaactaggggcgcgcagatgtgtgaggccttttattgtgagagtggacagacatccgagatttcagagccccatattcgagccccgtggaatcccgcggcccccagccagagccagcatgcagaacagtcacagcggagtgaatcagctcggtggtgtctttgtcaacgggcggccactgccggactccacccggcagaagattgtagagctagctcacagcggggcccggccgtgcgacatttcccgaattctgcaggtgtccaacggatgtgtgagtaaaattctgggcaggtattacgagactggctccatcagacccagggcaatcggtggtagtaaaccgagagtagcgactccagaagttgtaagcaaaatagcccagtataagcgggagtgcccgtccatctttgcttgggaaatccgagacagattactgtccgagggggtctgtaccaacgataacataccaagcgtgtcatcaataaacagagttcttcgcaacctggctagcgaaaagcaacagatgggcgcagacggcatgtatgataaactaaggatgttgaacgggcagaccggaagctggggcacccgccctggttggtatccggggacttcggtgccagggcaacctacgcaagatggctgccagcaacaggaaggagggggagagaataccaactccatcagttccaacggagaagattcagatgaggctcaaatgcgacttcagctgaagcggaagctgcaaagaaatagaacatcctttacccaagagcaaattgaggccctggagaaagagtttgagagaacccattatccagatgtgtttgcccgagaaagactagcagccaaaatagatctacctgaagcaagaatacaggtatggttttctaatcgaagggccaaatggagaagagaagaaaaactgaggaatcagagaagacaggccagcaacacacctagtcatattcctatcagcagtagtttcagcaccagtgtctaccaaccaattccacaacccaccacaccggtttcctccttcacatctggctccatgttgggccgaacagacacagccctcacaaacacctacagcgctctgccgcctatgcccagcttcaccatggcaaataacctgcctatgcaacccccagtccccagccagacctcctcatactcctgcatgctgcccaccagcccttcggtgaatgggcggagttatgatacctacacccccccacatatgcagacacacatgaacagtcagccaatgggcacctcgggcaccacttcaacaggactcatttcccctggtgtgtcagttccagttcaagttcccggaagtgaacctgatatgtctcaatactggccaagattacagtaaaaaaaaaaaaaaaaaaaaaaaggaaaggaaatattgtgttaattcagtcagtgactatggggacacaacagttgagctttcaggaaagaaagaaaaatggctgttagagccgcttcagttctacaattgtgtcctgtattgtaccactggggaaggaatggacttgaaacaaggacctttgtatacagaaggcacgatatcagttggaacaaatcttcattttggtatccaaacttttattcattttggtgtattatttgtaaatgggcatttgtatgttataatgaaaaaaagaacaatgtagactggatggatgtttgatctgtgttggtcatgaagttgttttttttttttttaaaaagaaaaccatgatcaacaagctttgccacgaatttaagagttttatcaagatatatcgaatacttctacccatctgttcatagtttatggactgatgttccaagtttgtatcattcctttgcatataattaaacctggaacaacatgcactagatttatgtcagaaatatctgttggttttccaaaggttgttaacagatgaagtttatgtgcaaaaaagggtaagatataaattcaaggaagaaaaaaagttgatagctaaaaggtagagtgtgtcttcgatataatccaatttgttttatgtcaaaatgtaagtatttgtcttccctagaaatcctcagaatgatttctataataaagttaatttcatttatatttgacaagaatatagatgttttatacacattttcatgcaatcatacgtttcttttttggccagcaaaagttaattgttcttagatatagttgtattactgttcacggtccaatcattttgtgcatctagagttcattcctaatcaattaaaagtgcttgcaagagttttaaacttaagtgttttgaagttgttcacaactacatatcaaaattaaccattgttgattgtaaaaaaccatgccaaagcctttgtatttcctttattatacagttttctttttaaccttatagtgtggtgttacaaattttatttccatgttagatcaacattctaaaccaatggttactttcacacacactctgttttacatcctgatgatccttaaaaaataatccttatagataccataaatcaaaaacgtgttagaaaaaaattccacttacagcagggtgtagatctgtgcccatttatacccacaacatatatacaaaatggtaacatttcccagttagccatttaattctaaagctcaaagtctagaaataatttaaaaatgcaacaagcgattagctaggaattgttttttgaattaggactggcattttcaatctgggcagatttccattgtcagcctatttcaacaatgatttcactgaagtatattcaaaagtagatttcttaaaggagactttctgaaagctgttgcctttttcaaataggccctctcccttttctgtctccctcccctttgcacaagaggcatcatttcccattgaaccactacagctgttcccatttgaatcttgctttctgtgcggttgtggatggttggagggtggaggggggatgttgcatgtcaaggaataatgagcacagacacatcaacagacaacaacaaagcagactgtgactggccggtgggaattaaaggccttcagtcattggcagcttaagccaaacattcccaaatctatgaagcagggcccattgttggtcagttgttatttgcaatgaagcacagttctgatcatgtttaaagtggaggcacgcagggcaggagtgcttgagcccaagcaaaggatggaaaaaaataagcctttgttgggtaaaaaaggactgtctgagactttcatttgttctgtgcaacatataagtcaatacagataagtcttcctctgcaaacttcactaaaaagcctgggggttctggcagtctagattaaaatgcttgcacatgcagaaacctctggggacaaagacacacttccactgaattatactctgctttaaaaaaatccccaaaagcaaatgatcagaaatgtagaaattaatggaaggatttaaacatgaccttctcgttcaatatctactgttttttagttaaggaattacttgtgaacagataattgagattcattgctccggcatgaaatatactaataattttattccaccagagttgctgcacatttggagacaccttcctaagttgcagtttttgtatgtgtgcatgtagttttgttcagtgtcagcctgcactgcacagcagcacatttctgcaggggagtgagcacacatacgcactgttggtacaattgccggtgcagacatttctacctcctgacattttgcagcctacattccctgagggctgtgtgctgagggaactgtcagagaagggctatgtgggagtgcatgccacagctgctggctggcttacttcttccttctcgctggctgtaatttccaccacggtcaggcagccagttccggcccacggttctgttgtgtagacagcagagactttggagacccggatgtcgcacgccaggtgcaagaggtgggaatgggagaaaaggagtgacgtgggagcggagggtctgtatgtgtgcacttgggcacgtatatgtgtgctctgaaggtcaggattgccagggcaaagtagcacagtctggtatagtctgaagaagcggctgctcagctgcagaagccctctggtccggcaggatgggaacggctgccttgccttctgcccacaccctagggacatgagctgtccttccaaacagagctccaggcactctcttggggacagcatggcaggctctgtgtggtagcagtgcctgggagttggccttttactcattgttgaaataatttttgtttattatttatttaacgatacatatatttatatatttatcaatggggtatctgcagggatgttttgacaccatcttccaggatggagattatttgtgaagacttcagtagaatcccaggactaaacgtctaaattttttctccaaacttgactgacttgggaaaaccaggtgaatagaataagagctgaatgttttaagtaataaacgttcaaactgctctaagtaaaaaaatgcattttactgcaatgaatttctagaatatttttcccccaaagctatgcctcctaacccttaaatggtgaacaactggtttcttgctacagctcactgccatttcttcttactatcatcactaggtttcctaagattcactcatacagtattatttgaagattcagctttgttctgtgaatgtcatcttaggattgtgtctatattcttttgcttatttctttttactctgggcctctcatactagtaagattttaaaaagccttttcttctctgtatgtttggctcaccaaggcgaaatatatattcttctctttttcatttctcaagaataaacctcatctgcttttttgtttttctgtgttttggcttggtactgaatgactcaactgctcggttttaaagttcaaagtgtaagtacttagggttagtactgcttatttcaataatgttgacggtgactatctttggaaagcagtaacatgctgtcttagaaatgacattaataatgggcttaaacaaatgaataggggggtccccccactctccttttgtatgcctatgtgtgtctgatttgttaaaagatggacagggaattgattgcagagtgtcgcttccttctaaagtagttttattttgtctactgttagtatttaaagatcctggaggtggacataaggaataaatggaagagaaaagtagatattgtatggtggctactaaaaggaaattcaaaaagtcttagaacccgagcacctgagcaaactgcagtagtcaaaatatttatctcatgttaaagaaaggcaaatctagtgtaagaaatgagtaccatatagggttttgaagttcatatactagaaacacttaaaagatatcatttcagatattacgtttggcattgttcttaagtatttatatctttgagtcaagctgataattaaaaaaaatctgttaatggagtgtatatttcataatgtatcaaaatggtgtctatacctaaggtagcattattgaagagagatatgtttatgtagtaagttattaacataatgagtaacaaataatgtttccagaagaaaggaaaacacattttcagagtgcgtttttatcagaggaagacaaaaatacacacccctctccagtagcttatttttacaaagccggcccagtgaattagaaaaacaaagcacttggatatgatttttggaaagcccaggtacacttattattcaaaatgcacttttactgagtttgaaaagtttcttttatatttaaaataagggttcaaatatgcatattcaatttttatagtagttatctatttgcaaagcatatattaactagtaattggctgttaattttatagacatggtagccagggaagtatatcaatgacctattaagtattttgacaagcaatttacatatctgatgacctcgtatctctttttcagcaagtcaaatgctatgtaattgttccattgtgtgttgtataaaatgaatcaacacggtaagaaaaaggttagagttattaaaataataaactgactaaaatactcatttgaatttattcagaatgttcataatgctttcaaaggacatagcagagcttttgtggagtatccgcacaacattatttattatctatggactaaatcaattttttgaagttgctttaaaatttaaaagcacctttgcttaatataaagccctttaattttaactgacagatcaattctgaaactttattttgaaaagaaaatggggaagaatctgtgtctttagaattaaaagaaatgaaaaaaataaacccgacattctaaaaaaatagaataagaaacctgatttttagtactaatgaaatagcgggtgacaaaatagttgtctttttgattttgatcacaaaaaataaactggtagtgacaggatatgatggagagatttgacatcctggcaaatcactgtcattgattcaattattctaattctgaataaaagctgtatacagtaaaa

SEQ ID NO: 93467 - DNA, 1269 bp, Artificial Sequence
  derived and/or modified sequence
atgcagaactctcattccggtgttaaccagctgggtggcgtgtttgtgaacggaagaccgcttccagattccacgaggcagaagatcgtagagctagcacactccggggctagaccgtgtgatatctctcgcattctgcaggtctcgaacggatgcgtatcaaaaatcttaggaaggtactacgaaacaggttcgatccggcctcgggctattggcggcagcaaaccccgagtagccacccctgaagtggttagcaaaattgctcagtacaagcgcgagtgcccctcaatttttgcttgggaaattagggaccggctgttgtcggaaggggtttgcactaatgacaatattccgagcgtgtcctccattaatagagtgttgcgaaatttggccagcgagaagcaacagatgggggccgacgggatgtatgacaagctgagaatgctgaatggccagaccgggtcctgggggacaaggcccggatggtatcccggaacatcggtacctggccaaccaacccaggacggctgccagcagcaggaaggtggaggcgaaaacaccaactcaatcagctctaacggcgaagactccgatgaggctcagatgcgcctccaactgaagcggaagctgcagagaaacagaacatcttttacacaggagcagatcgaggccctggagaaggagtttgagcgcacccactaccccgatgtgtttgctcgagaacgcctggctgccaagatcgacctgcccgaagccagaattcaggtctggttttccaacaggcgggccaagtggaggagggaagagaagctacggaaccagagaaggcaagccagtaacacccctagtcatattcctataagtagcagtttctcgactagtgtttaccagcccattccacagcccactacaccagtcagctccttcacctccgggagcatgctcgggcgaactgataccgcactcaccaacacctatagtgctctgcctcccatgccgtctttcactatggccaacaacctaccaatgcagcctccagtgccgagccagacgtcgagttattcttgtatgctccctaccagccctagtgtgaacggtaggtcttacgacacctacacaccccctcacatgcagactcatatgaactctcagcccatgggaacatcaggtacgacctcgacaggtctcattagcccaggcgtgtctgtgcctgtgcaggtgcctggctctgaaccggacatgtcacagtattggcccagactgcaatag

SEQ ID NO: 93468 - DNA, 1269 bp, Artificial Sequence
  derived and/or modified sequence
atgcagaacagccattctggcgtgaaccagctgggaggcgtcttcgtaaatggtagaccactgccggactctacacgccagaaaattgtcgagctcgcacactccggggcaagaccctgcgatatctctcgcattctgcaggtatccaatggctgcgtgagcaaaattctgggccgctattatgagaccggcagcataagaccacgcgccatcggcggttcaaagcctcgggtggctacgccagaggtggtcagcaagatagcccagtacaaaagagagtgcccaagcatctttgcatgggaaatccgcgatcggctcctgtcagaaggagtctgtaccaatgacaatattcctagcgtctcttcaatcaatcgggtattgcggaatctcgcttctgagaagcagcaaatgggcgccgacggcatgtatgacaagctgagaatgttgaacggccagaccggttcttggggcacacgtcctggatggtatccagggacctccgtgcccggacaacctacacaggacggctgccagcaacaggagggggggggagagaatactaactcaatttcttccaatggggaagactccgacgaggcccagatgcggttacagttaaagagaaaactccagcgcaaccgcaccagtttcacacaggaacagatagaggctctagaaaaggagttcgaacggacacactatcccgacgtttttgccagggagcggctggcagctaagatagacctgcccgaggccagaattcaggtttggttctcaaatagaagagcgaaatggaggagggaggaaaaattacgcaatcagagaagacaggcaagtaatactcctagccatattcctataagctcgtcgttcagcaccagcgtgtaccaacctataccgcagcccacgactcccgtgtcctccttcacaagcggttctatgctggggagaactgatactgccttgacgaatacgtatagcgcccttccccccatgccctcattcaccatggcaaataatcttccgatgcaaccccctgttccaagtcaaacctctagttatagctgtatgctgccaacttcgccctcagtgaatggccggtcctacgatacttacacaccaccacacatgcagacgcatatgaacagtcagcctatggggaccagcgggacgaccagtactggcctgatttcacccggggtctcagtaccagttcaggtccccggctcagaaccagacatgtcacaatattggcccaggctgcagtag

SEQ ID NO: 93469 - DNA, 1269 bp, Artificial Sequence
  derived and/or modified sequence
atgcagaattcccattcgggcgtgaaccagcttggcggcgtgtttgtcaacggtcgccccctgccagatagcactcggcagaagatcgtggagctggctcactccggcgccaggccatgtgacatcagccgtattctgcaggtatcaaacggctgtgtgtccaagatcctgggccgttattacgagactggcagtattaggccccgcgcaatcggcggatcaaagcccagggtggccacccctgaggtcgtgagcaagattgcacagtacaaaagagaatgccccagtatcttcgcctgggaaattcgtgaccgcttattgtccgaaggagtctgcactaatgataacatcccatccgtgagcagcatcaacagagtgctgagaaatctggcctccgaaaagcagcagatgggagccgatggcatgtacgataaattacggatgctgaacggacagacaggatcttggggcacacggccggggtggtatcccggcacctctgtccccggccagcctacacaagatgggtgccagcagcaggagggaggaggggaaaacactaattccatttcaagtaatggagaggattctgacgaggcccagatgaggctacagctcaagcgaaagctgcaacgcaatcgaacatcctttacccaggaacagattgaggccctagagaaggagttcgagagaacccattaccctgacgtgtttgctcgcgaacgtttggctgcaaagattgatctgcctgaggctcgcatacaggtgtggttttctaatcgcagggctaaatggcgccgcgaggaaaagcttcggaaccagcgacgacaagcctccaacacccccagtcacatcccgatctcttcttcattttcaacttccgtgtatcagcccataccacaacccaccactcctgtgagctccttcacaagtggaagcatgttgggacgcaccgataccgctctcaccaacacctactctgcactgccaccaatgccaagttttaccatggctaacaatctgccaatgcagccccctgtgccatcacagaccagttcatattcctgcatgctgcccactagtcccagtgtgaacgggagatcatatgacacttacacccctccacatatgcagacacacatgaatagccagccaatgggtacaagcggaacaacctcaactggactgatcagtccgggtgtgagtgtccccgtccaggttccagggtctgaaccagatatgagtcagtattggccaagactccaatag

SEQ ID NO: 93470 - DNA, 1269 bp, Artificial Sequence
  derived and/or modified sequence
atgcagaactctcactcaggggtcaatcagttggggggtgtattcgtgaacgggcggccgctgcccgatagtaccagacagaagatagttgaacttgcccatagcggggctagaccctgtgacatctccagaatcctgcaggtctcaaacgggtgcgtatcaaagatcctcggaagatactacgagacaggcagtattcgtcccagagccatcggcggtagcaagccgcgggtcgcgactcctgaggtcgtaagcaagatagcccaatacaagagggagtgtccttcgatattcgcctgggaaatccgagaccgccttctcagcgaaggggtctgcacaaacgataatatcccttcagtttcttccataaaccgggtgctgcggaacctcgctagtgagaagcagcagatgggcgcggatggcatgtacgataagctaagaatgctgaatgggcaaactgggtcatgggggacaagaccaggttggtatcctggcacgtccgtgcctgggcaacccactcaggatgggtgccagcagcaggagggaggaggagagaatacaaattccatttccagtaacggtgaagactcagacgaggctcagatgcgcctacaactgaaacgcaaactgcagcgtaacagaacaagctttactcaggaacaaattgaggcactcgaaaaggaattcgagagaacccattatccggacgtgttcgcgcgggaacgccttgccgcgaagattgaccttccagaagcacgtattcaggtctggttttccaataggagggctaagtggcggagagaggagaaactgcggaaccagcggcgccaggcgagcaacaccccctcacatatcccgatatcttcttcattcagtacctccgtgtatcagcctattccccagccgactacccccgtttcttcatttacaagcgggagcatgctcgggagaacagataccgccctgaccaacacctattcagctcttccaccgatgccctcgtttactatggctaacaatctacccatgcagccccctgttcccagccagaccagttcctattcttgtatgcttccgacaagcccctctgtcaacggccgtagctacgacacttatacgcctccccatatgcagactcatatgaactcccagcccatggggacctcaggcacaacatccacagggttgatctcccctggcgtgtccgtccccgtgcaggtgccggggtcagagccagacatgagccagtattggccacgattacaatag

SEQ ID NO: 93471 - DNA, 1269 bp, Artificial Sequence
  derived and/or modified sequence
atgcagaactctcacagtggtgtcaaccagctcggtggcgtattcgtgaacggacgacctcttcctgactccacccggcagaagatagtggagctagcgcactctggggccaggccttgtgacatttctagaattttacaggtctccaatggctgcgtatccaaaatactcggaaggtattacgagaccggcagcattcgaccacgcgctatcggcggatcgaaaccaagagtggcaacccctgaagtggtgtccaagatcgctcagtacaaaagagagtgcccgtccatctttgcctgggaaattagggaccgcctgttgtccgagggagtctgtaccaatgacaatattccaagtgtgtcaagcattaatagggtgctgaggaatcttgcctcggaaaaacagcagatgggcgccgatggtatgtacgacaaattgaggatgctgaacgggcagactgggtcttggggaactcggcctggctggtacccgggcacgtcagtccctggccagccaactcaggacgggtgccagcagcaggaggggggaggtgaaaacaccaattcaatatcttccaacggcgaagactcggacgaagcccagatgagacttcagctaaagcgaaaactccagaggaatcggacatctttcacacaagaacagattgaagccctggaaaaagagtttgagaggacacattacccagacgtgttcgctagagaaagactggcagccaaaattgacctgcctgaagctagaatccaagtatggtttagtaatcgaagagcgaagtggaggagagaggagaagctgcggaaccagcggagacaggcctctaatactccatctcacattcccatctctagttctttcagcacaagcgtctatcagcccattccccagcccaccacgccagtctcgtctttcacctctggatccatgcttggcaggacagacacagccctgaccaacacctactctgcattgccccccatgccaagtttcacgatggccaataatttacctatgcagccacccgtgccaagtcagacatcttcttactcttgtatgctgcctacgagcccctccgttaatgggaggtcttatgacacatacacacccccacatatgcagacgcatatgaactcccagcctatgggtacttccggtactacaagcactggccttatatcaccaggcgtgtcagtccccgtccaggtccctggatctgaaccagacatgtcccagtactggcctagactgcaatag

SEQ ID NO: 93472 - DNA, 1134 bp, Artificial Sequence
  derived and/or modified sequence
atgcaggtgtctaacggttgtgtttctaagattttggggagatactacgagacagggtccattaggccacgggcgataggcggttccaaacctcgggtggcaacacccgaggttgtcagcaagatagctcagtacaagcgggagtgtccgtcaatttttgcatgggaaatccgggacaggctcctgtccgagggcgtttgtaccaacgataatatccccagcgtttcaagcatcaacagggtgcttaggaacctggcctcggagaagcaacagatgggcgccgacggcatgtatgataaactcaggatgctcaacggacagactggcagctggggcaccagacctggttggtacccaggcacctcagtgccaggacagcccacccaagatgggtgtcaacagcaagagggcggaggcgaaaacaccaacagcatatcctctaatggcgaggacagcgatgaggctcagatgcggcttcagctgaaacgcaagctgcagcgtaaccggacaagtttcacccaggagcagatagaagcactcgaaaaggaatttgaaagaacccattaccctgatgtgttcgcacgagagcgcctcgccgcaaaaatagatctgccggaggctaggatccaggtatggtttagtaatcggagagctaagtggcgtcgggaagagaagctccgcaaccaaaggcgccaggctagcaatactcctagccacattcctatttccagctcattctcaactagcgtctaccagcccatacctcagcccaccaccccagtgtccagcttcacctctgggagcatgctcggtcggacagatacagcactcaccaatacttacagcgccctgcctccaatgccttcattcaccatggcaaacaatctcccaatgcagcctccagtgccaagccagacctcatcatactcctgcatgttgccaactagtccgtctgtcaacgggcgatcttacgacacctacactcctcctcacatgcagacccacatgaactcgcaacccatgggcacttcaggtacaacatcaaccggtctgatctccccgggggtgagcgtcccggtgcaggtgccagggagtgagcccgacatgagtcagtactggcctagactgcagtag

SEQ ID NO: 93473 - DNA, 1631 bp, Artificial Sequence
  derived and/or modified sequence
gttttgctggaggatgatgacagaggaatctgagaattgctctcacacaccaacccagcaacatccgtggagaaaactctcaccagcaactcctttaaaacaccgtcatttcaaaccattgtggtcttcaagcaacaacagcagcacaaaaaaccccaaccaaacaaaactcttgacagaagctgtgacaaccagaaaggatgcctcataaagggggaagactttaactaggggcgcgcagatgtgtgaggccttttattgtgagagtggacagacatccgagatttcagagccccatattcgagccccgtggaatcccgcggcccccagccagagccagcatgcagaacagtcacagcggagtgaatcagctcggtggtgtctttgtcaacgggcggccactgccggactccacccggcagaagattgtagagctagctcacagcggggcccggccgtgcgacatttcccgaattctgcaggtgtccaacggatgtgtgagtaaaattctgggcaggtattacgagactggctccatcagacccagggcaatcggtggtagtaaaccgagagtagcgactccagaagttgtaagcaaaatagcccagtataagcgggagtgcccgtccatctttgcttgggaaatccgagacagattactgtccgagggggtctgtaccaacgataacataccaagcgtgtcatcaataaacagagttcttcgcaacctggctagcgaaaagcaacagatgggcgcagacggcatgtatgataaactaaggatgttgaacgggcagaccggaagctggggcacccgccctggttggtatccggggacttcggtgccagggcaacctacgcaagatggctgccagcaacaggaaggagggggagagaataccaactccatcagttccaacggagaagattcagatgaggctcaaatgcgacttcagctgaagcggaagctgcaaagaaatagaacatcctttacccaagagcaaattgaggccctggagaaagagtttgagagaacccattatccagatgtgtttgcccgagaaagactagcagccaaaatagatctacctgaagcaagaatacaggtatggttttctaatcgaagggccaaatggagaagagaagaaaaactgaggaatcagagaagacaggccagcaacacacctagtcatattcctatcagcagtagtttcagcaccagtgtctaccaaccaattccacaacccaccacaccggtttcctccttcacatctggctccatgttgggccgaacagacacagccctcacaaacacctacagcgctctgccgcctatgcccagcttcaccatggcaaataacctgcctatgcaacccccagtccccagccagacctcctcatactcctgcatgctgcccaccagcccttcggtgaatgggcggagttatgatacctacacccccccacatatgcagacacacatgaacagtcagccaatgggcacctcgggcaccacttcaacaggactcatttcccctggtgtgtcagttccagttcaagttcccggaagtgaacctgatatgtctcaatactggccaagattacagtaaaaaaaaaaaaaaaaaaaaaaa

SEQ ID NO: 93474 - DNA, 2157 bp, Artificial Sequence
  derived and/or modified sequence
ctacttccagcgaaagcccgcgtcggagggcgactgccggcgagcgggagcggcgcagggctcggggcgggcggccagctcagccccagcgccagcgccagcgccagcgcgggctgagctcgcgggaagaagggagactccaggcgcgacagcagccgcggctcctagccccagcgtcgcccaatgctcccgacccgcgggaaaagacgaagaggctctgtggtgcccaaggccctggaacggccgcagagagcaaccgctgccggctgctttgtccagcccgaggcccagcgaacgcgcagagagcgggcgctccgaggactcgccgagggagcgccgagggaacctgctcgccgcgtctccgcccgcccgccggccctcgggctttgtgccgcactgggctccggcgcagaagagtcagccggcactcgagcgccgaggggggcaccgcgcccgccaccagcccgagtggagtcagtcggcaaggcagccgcacgctggaggtagagggaagagcgagctagcgcgagccgggaaggaagccaccaggccaaggcggtggaacgcgcgctccgagggagctcagagccgagcgggaggactgtcagcttccacccagcccccgggctcttgcccccaactccactggagcgctgagctcggaacttgaaaactctctgctccccaggcttcccccgactctcatctcccttgccttgcggaggctggggctcttccctgttctccggccccctgcgcttgggggaagactttaactaggggcgcgcagatgtgtgaggccttttattgtgagagtggacagacatccgagatttcagagccccatattcgagccccgtggaatcccgcggcccccagccagagccagcatgcagaacagtcacagcggagtgaatcagctcggtggtgtctttgtcaacgggcggccactgccggactccacccggcagaagattgtagagctagctcacagcggggcccggccgtgcgacatttcccgaattctgcaggtgtccaacggatgtgtgagtaaaattctgggcaggtattacgagactggctccatcagacccagggcaatcggtggtagtaaaccgagagtagcgactccagaagttgtaagcaaaatagcccagtataagcgggagtgcccgtccatctttgcttgggaaatccgagacagattactgtccgagggggtctgtaccaacgataacataccaagcgtgtcatcaataaacagagttcttcgcaacctggctagcgaaaagcaacagatgggcgcagacggcatgtatgataaactaaggatgttgaacgggcagaccggaagctggggcacccgccctggttggtatccggggacttcggtgccagggcaacctacgcaagatggctgccagcaacaggaaggagggggagagaataccaactccatcagttccaacggagaagattcagatgaggctcaaatgcgacttcagctgaagcggaagctgcaaagaaatagaacatcctttacccaagagcaaattgaggccctggagaaagagtttgagagaacccattatccagatgtgtttgcccgagaaagactagcagccaaaatagatctacctgaagcaagaatacaggtatggttttctaatcgaagggccaaatggagaagagaagaaaaactgaggaatcagagaagacaggccagcaacacacctagtcatattcctatcagcagtagtttcagcaccagtgtctaccaaccaattccacaacccaccacaccggtttcctccttcacatctggctccatgttgggccgaacagacacagccctcacaaacacctacagcgctctgccgcctatgcccagcttcaccatggcaaataacctgcctatgcaacccccagtccccagccagacctcctcatactcctgcatgctgcccaccagcccttcggtgaatgggcggagttatgatacctacacccccccacatatgcagacacacatgaacagtcagccaatgggcacctcgggcaccacttcaacaggactcatttcccctggtgtgtcagttccagttcaagttcccggaagtgaacctgatatgtctcaatactggccaagattacagt

SEQ ID NO: 93475 - DNA, 1627 bp, Artificial Sequence
  derived and/or modified sequence
ttttattgtcaatctctgtctccttcccaggaatctgagaattgctctcacacaccaacccagcaacatccgtggagaaaactctcaccagcaactcctttaaaacaccgtcatttcaaaccattgtggtcttcaagcaacaacagcagcacaaaaaaccccaaccaaacaaaactcttgacagaagctgtgacaaccagaaaggatgcctcataaagggggaagactttaactaggggcgcgcagatgtgtgaggccttttattgtgagagtggacagacatccgagatttcagagccccatattcgagccccgtggaatcccgcggcccccagccagagccagcatgcagaacagtcacagcggagtgaatcagctcggtggtgtctttgtcaacgggcggccactgccggactccacccggcagaagattgtagagctagctcacagcggggcccggccgtgcgacatttcccgaattctgcaggtgtccaacggatgtgtgagtaaaattctgggcaggtattacgagactggctccatcagacccagggcaatcggtggtagtaaaccgagagtagcgactccagaagttgtaagcaaaatagcccagtataagcgggagtgcccgtccatctttgcttgggaaatccgagacagattactgtccgagggggtctgtaccaacgataacataccaagcgtgtcatcaataaacagagttcttcgcaacctggctagcgaaaagcaacagatgggcgcagacggcatgtatgataaactaaggatgttgaacgggcagaccggaagctggggcacccgccctggttggtatccggggacttcggtgccagggcaacctacgcaagatggctgccagcaacaggaaggagggggagagaataccaactccatcagttccaacggagaagattcagatgaggctcaaatgcgacttcagctgaagcggaagctgcaaagaaatagaacatcctttacccaagagcaaattgaggccctggagaaagagtttgagagaacccattatccagatgtgtttgcccgagaaagactagcagccaaaatagatctacctgaagcaagaatacaggtatggttttctaatcgaagggccaaatggagaagagaagaaaaactgaggaatcagagaagacaggccagcaacacacctagtcatattcctatcagcagtagtttcagcaccagtgtctaccaaccaattccacaacccaccacaccggtttcctccttcacatctggctccatgttgggccgaacagacacagccctcacaaacacctacagcgctctgccgcctatgcccagcttcaccatggcaaataacctgcctatgcaacccccagtccccagccagacctcctcatactcctgcatgctgcccaccagcccttcggtgaatgggcggagttatgatacctacacccccccacatatgcagacacacatgaacagtcagccaatgggcacctcgggcaccacttcaacaggactcatttcccctggtgtgtcagttccagttcaagttcccggaagtgaacctgatatgtctcaatactggccaagattacagtaaaaaaaaaaaaaa

SEQ ID NO: 93476 - DNA, 2160 bp, Artificial Sequence
  derived and/or modified sequence
tgcaccctccgaggactgggagtcccgagtccagcttagggggagtgggggcgcgacccccaacccagaaaccttcacttgaccgctcaagttcgcggcagcagggcgggccgcgccgaatctcggcgtgcgcggagcggggagatgcaggcgagcgccagagcccgggctcgggggccctgcgccggggagaggagccgggacccaccggcggagccgaaaacaagtgtattcatattcaaacaaacggaccaattgcaccaggcggggagagggagcatccaatcggctggcgcgaggccccggcgctgctttgcataaagcaatattttgtgtgagagcgagcggtgcatttgcatgttgcggagtgattagtgggtttgaaaagggaaccgtggctcggcctcatttcccgctctggttcaggcgcaggaggaagtgttttgctggaggatgatgacagaggtcaggcttcgctaatgggccagtgaggagcggtggaggcgaggccgggcgccggcacacacacattaacacacttgagccatcaccaatcagcataggaatctgagaattgctctcacacaccaacccagcaacatccgtggagaaaactctcaccagcaactcctttaaaacaccgtcatttcaaaccattgtggtcttcaagcaacaacagcagcacaaaaaaccccaaccaaacaaaactcttgacagaagctgtgacaaccagaaaggatgcctcataaagggggaagactttaactaggggcgcgcagatgtgtgaggccttttattgtgagagtggacagacatccgagatttcagagccccatattcgagccccgtggaatcccgcggcccccagccagagccagcatgcagaacagtcacagcggagtgaatcagctcggtggtgtctttgtcaacgggcggccactgccggactccacccggcagaagattgtagagctagctcacagcggggcccggccgtgcgacatttcccgaattctgcaggtgtccaacggatgtgtgagtaaaattctgggcaggtattacgagactggctccatcagacccagggcaatcggtggtagtaaaccgagagtagcgactccagaagttgtaagcaaaatagcccagtataagcgggagtgcccgtccatctttgcttgggaaatccgagacagattactgtccgagggggtctgtaccaacgataacataccaagcgtgtcatcaataaacagagttcttcgcaacctggctagcgaaaagcaacagatgggcgcagacggcatgtatgataaactaaggatgttgaacgggcagaccggaagctggggcacccgccctggttggtatccggggacttcggtgccagggcaacctacgcaagatggctgccagcaacaggaaggagggggagagaataccaactccatcagttccaacggagaagattcagatgaggctcaaatgcgacttcagctgaagcggaagctgcaaagaaatagaacatcctttacccaagagcaaattgaggccctggagaaagagtttgagagaacccattatccagatgtgtttgcccgagaaagactagcagccaaaatagatctacctgaagcaagaatacaggtatggttttctaatcgaagggccaaatggagaagagaagaaaaactgaggaatcagagaagacaggccagcaacacacctagtcatattcctatcagcagtagtttcagcaccagtgtctaccaaccaattccacaacccaccacaccggtttcctccttcacatctggctccatgttgggccgaacagacacagccctcacaaacacctacagcgctctgccgcctatgcccagcttcaccatggcaaataacctgcctatgcaacccccagtccccagccagacctcctcatactcctgcatgctgcccaccagcccttcggtgaatgggcggagttatgatacctacacccccccacatatgcagacacacatgaacagtcagccaatgggcacctcgggcaccacttcaacaggactcatttcccctggtgtgtcagttccagttcaagttcccggaagtgaacctgatatgtctcaatactggccaagattacagtaaaaaaaaaaaaaa

SEQ ID NO: 93477 - DNA, 3597 bp, Artificial Sequence
  derived and/or modified sequence
accctcttttcttatcattgacatttaaactctggggcaggtcctcgcgtagaacgcggctgtcagatctgccacttcccctgccgagcggcggtgagaagtgtgggaaccggcgctgccaggctcacctgcctccccgccctccgctcccagggggaagactttaactaggggcgcgcagatgtgtgaggccttttattgtgagagtggacagacatccgagatttcagagccccatattcgagccccgtggaatcccgcggcccccagccagagccagcatgcagaacagtcacagcggagtgaatcagctcggtggtgtctttgtcaacgggcggccactgccggactccacccggcagaagattgtagagctagctcacagcggggcccggccgtgcgacatttcccgaattctgcaggtgtccaacggatgtgtgagtaaaattctgggcaggtattacgagactggctccatcagacccagggcaatcggtggtagtaaaccgagagtagcgactccagaagttgtaagcaaaatagcccagtataagcgggagtgcccgtccatctttgcttgggaaatccgagacagattactgtccgagggggtctgtaccaacgataacataccaagcgtgtcatcaataaacagagttcttcgcaacctggctagcgaaaagcaacagatgggcgcagacggcatgtatgataaactaaggatgttgaacgggcagaccggaagctggggcacccgccctggttggtatccggggacttcggtgccagggcaacctacgcaagatggctgccagcaacaggaaggagggggagagaataccaactccatcagttccaacggagaagattcagatgaggctcaaatgcgacttcagctgaagcggaagctgcaaagaaatagaacatcctttacccaagagcaaattgaggccctggagaaagagtttgagagaacccattatccagatgtgtttgcccgagaaagactagcagccaaaatagatctacctgaagcaagaatacaggtatggttttctaatcgaagggccaaatggagaagagaagaaaaactgaggaatcagagaagacaggccagcaacacacctagtcatattcctatcagcagtagtttcagcaccagtgtctaccaaccaattccacaacccaccacaccggtttcctccttcacatctggctccatgttgggccgaacagacacagccctcacaaacacctacagcgctctgccgcctatgcccagcttcaccatggcaaataacctgcctatgcaacccccagtccccagccagacctcctcatactcctgcatgctgcccaccagcccttcggtgaatgggcggagttatgatacctacacccccccacatatgcagacacacatgaacagtcagccaatgggcacctcgggcaccacttcaacaggactcatttcccctggtgtgtcagttccagttcaagttcccggaagtgaacctgatatgtctcaatactggccaagattacagtaaaaaaaaaaaaaaaaaaaaaaaggaaaggaaatattgtgttaattcagtcagtgactatggggacacaacagttgagctttcaggaaagaaagaaaaatggctgttagagccgcttcagttctacaattgtgtcctgtattgtaccactggggaaggaatggacttgaaacaaggacctttgtatacagaaggcacgatatcagttggaacaaatcttcattttggtatccaaacttttattcattttggtgtattatttgtaaatgggcatttgtatgttataatgaaaaaaagaacaatgtagactggatggatgtttgatctgtgttggtcatgaagttgttttttttttttttaaaaagaaaaccatgatcaacaagctttgccacgaatttaagagttttatcaagatatatcgaatacttctacccatctgttcatagtttatggactgatgttccaagtttgtatcattcctttgcatataattaaacctggaacaacatgcactagatttatgtcagaaatatctgttggttttccaaaggttgttaacagatgaagtttatgtgcaaaaaagggtaagatataaattcaaggaagaaaaaaagttgatagctaaaaggtagagtgtgtcttcgatataatccaatttgttttatgtcaaaatgtaagtatttgtcttccctagaaatcctcagaatgatttctataataaagttaatttcatttatatttgacaagaatatagatgttttatacacattttcatgcaatcatacgtttcttttttggccagcaaaagttaattgttcttagatatagttgtattactgttcacggtccaatcattttgtgcatctagagttcattcctaatcaattaaaagtgcttgcaagagttttaaacttaagtgttttgaagttgttcacaactacatatcaaaattaaccattgttgattgtaaaaaaccatgccaaagcctttgtatttcctttattatacagttttctttttaaccttatagtgtggtgttacaaattttatttccatgttagatcaacattctaaaccaatggttactttcacacacactctgttttacatcctgatgatccttaaaaaataatccttatagataccataaatcaaaaacgtgttagaaaaaaattccacttacagcagggtgtagatctgtgcccatttatacccacaacatatatacaaaatggtaacatttcccagttagccatttaattctaaagctcaaagtctagaaataatttaaaaatgcaacaagcgattagctaggaattgttttttgaattaggactggcattttcaatctgggcagatttccattgtcagcctatttcaacaatgatttcactgaagtatattcaaaagtagatttcttaaaggagactttctgaaagctgttgcctttttcaaataggccctctcccttttctgtctccctcccctttgcacaagaggcatcatttcccattgaaccactacagctgttcccatttgaatcttgctttctgtgcggttgtggatggttggagggtggaggggggatgttgcatgtcaaggaataatgagcacagacacatcaacagacaacaacaaagcagactgtgactggccggtgggaattaaaggccttcagtcattggcagcttaagccaaacattcccaaatctatgaagcagggcccattgttggtcagttgttatttgcaatgaagcacagttctgatcatgtttaaagtggaggcacgcagggcaggagtgcttgagcccaagcaaaggatggaaaaaaataagcctttgttgggtaaaaaaggactgtctgagactttcatttgttctgtgcaacatataagtcaatacagataagtcttcctctgcaaacttcactaaaaagcctgggggttctggcagtctagattaaaatgcttgcacatgcagaaacctctggggacaaagacacacttccactgaattatactctgctttaaaaaaatccccaaaagcaaatg

SEQ ID NO: 93478 - DNA, 6173 bp, Artificial Sequence
  derived and/or modified sequence
gattagtgggtttgaaaagggaaccgtggctcggcctcatttcccgctctggttcaggcgcaggaggaagtgttttgctggaggatgatgacagaggaatctgagaattgctctcacacaccaacccagcaacatccgtggagaaaactctcaccagcaactcctttaaaacaccgtcatttcaaaccattgtggtcttcaagcaacaacagcagcacaaaaaaccccaaccaaacaaaactcttgacagaagctgtgacaaccagaaaggatgcctcataaagggggaagactttaactaggggcgcgcagatgtgtgaggccttttattgtgagagtggacagacatccgagatttcagagccccatattcgagccccgtggaatcccgcggcccccagccagagccagcatgcagaacagtaagtgcctctggtctttctgggacttcgggctcggggtgcgcggacccgagggtcaggggaggacacagggactcgcgacgcccgcgctggcccggccgccgaccgactgaggcccggggacctgcggcggctgctccccgctccgcgcccggcagcccgggaggggagggcgtttgcttggctcttctcgatactggagaagcaggggctgggcccttaagaacagcccgcccgagttttcgaagctgcggtagagaaaccccatcccccccaaatcctgtaactcacaccccctctcgcccctgcccgggctctgaccccggagagaggggctgggctgatcagggcggggcgaagtcttctcctagttgagcgagaaggaggcccctttgggcttagccaagactgaaagtctccaccaacccggcggggttgggggcttctctccccaagtcactctcagggcagctcctcccctcctcaccccactacgggcctagaagggatggggagaggagcccccaggcctgcagcagggtaggggtggtaaactcgctgttacagggcgcgggagagagcacggtttactgggtctggtaaggaggtgcccaggaattggaaaatccctgccctggcaactgcaattgcttgggtcctgatagtcccaggcccagagcgcttttgatacttatggcccttgtacctccctgctttcctctgcccagaccccgtggggtcccacccaccttcctgttcgtggtgggtgctggtacgcggcagggctagtctagagctccgacctgggagcctggaggcccagcgaaaccaggcccggtttgaggttacggttgaggcacacggcgtcggggctcaactgaactcaaagtgtggaaaggcccgggtcttccagcagcctgccctggccgaaccacacaggcttaaggagggtccccagcaccttatccatctgttttggaaacgccggtcgccccctggtgcttccggggctggtaagcgcgtagctgaggaaagggcacaaaggtggcgagctttgcgggagtagttgtgcagaacctgccggaccccagggcttggccggtaggctcgccttcggcggctgggctctccccttggagctcagactccccagccgcaggctgtctctcgggcgggccccagccagggcgcgcagccctgagcgtttgtcgctgcggcccggctggcaggccccgaggggcgcggggtcgcgggccggccggcagggctttgtgccgctcgttcccgggtgtgcgcgaggcgcggagcatccaaattgacaccatatgttttcctattagttgcttcgcggtcgagttctaggcgcataatcatcgccagtgggcgagagcgccagcagtccctagggaagggacacaatgattgaggcttaacctctgaaggggaatttggagctgcgctttctctctgccatttcgatgctgggagtggcgctctggccctggcgtctcctgggcaagcaccagccggcggtatctgcggaggtggctggcacgttgttattttttgaaatgagtgaggagggaggtctagatttaggcggccttacgcgcccgccttggcattagcagactgggaattgccgtggctatgcccgaagtttggaaagtctctctcggtctctttctgggacagcctttctttttccgggaagcttcctgtgcctagaggtggggctctgtagctggaggggtagatggaacttgcgaagcaaaggaaggcaataaaaggaagttaggagaaaccggaaacgtgggccaggccttgctctgttggagaagcggtgtccccgcaaagtccctgcttgcgctggtcccggccggagcccagatcccccaaacgcctgtcacttctcatcgagttgaggctccggcccccacccgcgccttggtgagggccccccctcagccccaagccttcggctaccctgaaaacgcggctcccctcgaaggggaaacaagtgcagttcaatctcgtctgagtgatctacaaataaggacggaaagggtcgttttatcacggtcccgtttgtcgtgacgatgcaatttcccggagcggagcactgtcacaaagtgacaaggctgccacaagcgccccgactgatcttttcaattagccttccatgcatgatccggagcgacttccgcctatttccagaaattaagctcaaacttgacgtgcagctagttttattttaaagacaaatgtcagagaggctcatcatattttcccccctcttctatatttggagcttatttattgctaagaagctcaggctcctggcgtcaatttatcagtaggctccaaggagaagagaggagaggagaggagagctgaacagggagccacgtcttttcctgggagggctgctatctaagtcggggctgcaggttggagatttttaaggaagtggaaattggcaattggctttgtgtgtctgtggtttttggggagggggactacaaagaggggctaactccctctccctattctctaaggttggaccacagggatgaggttgtgagatacaaagataaaggagggatggggaacactatgatgtggtatttttcttttctgttttttctttttgataatatctatccttggctaaggggagggcggagttcagcggcggaaataaagcgagcagtggctggtgcgaaccgactcccggctctaagccttacttgcggtggccggacttgtctgtggctgaagccgagcccgggctctgactctcacgtctgcactggaggtgcggaaacctggactggggttcaccagccacatactggctgctctggttgttctctcctcttccttcttctattctaaccaaacaaaacccaactcgatgcttgtgccaggccttggccagtttggacggtgatggaaacatttctggattttagcgtctaagggagcactcaagggctgtaaggtttgctatcactgtcccaacactgcagagaccttgaaggttcagtgtgggatctgtagaacccatggtttgcggtgacactcagaggggatctttgggagatttatagagccggttcttagcgctttgtgggttcagaggctggctgcagtgtttatgaagaggggcagtgggctggggacactgctggggttatggctgtagtgaggtccatgtgtacttgttccttggcatgtgtctgactctgtgttgctgctgcagtacagtgggcaggggcacggttgcttggactgggctgcccgatgtctggcatggctggtggtcctgttgtcctttatttgatcgatagcagggaactgaccgccgaggttggcacaggttggcagggggatgaggatgcattgtggttgtctcctcctcctctccttcttcctcttccccttcctcctctcctttctgttcttgttctccctcatcttcctcttccttcttctccctcttcttcctcttcactctgctctcttctcttcttttcccctttcctctcctctccctttcctcaggtcacagcggagtgaatcagctcggtggtgtctttgtcaacgggcggccactgccggactccacccggcagaagattgtagagctagctcacagcggggcccggccgtgcgacatttcccgaattctgcaggtgatcctcccggcgccgccccactcgccgcccccgcggccctccactctcaacgccctctcttcatttcttactgtaaacgatgctaattatggacccccccaccctcacccaccccagtccccagtccccccacccactcccctgccttcccactttcccctctccttccaccatccttccctatctctttcaacctgggtcagttacataagataactcatctgcttcagaaaaatattgtgtgcggatttttttaaaaaaatctttctctttttatttggtaaagacattcattgtgggaacagtttatgaaccgtaataagctgagttatataaaccggcataatttcattctgctctccccagcccatgcttacctcagcttttgaggtatttgtttattcttcatgtttatgaataatatatattgattttaaaaggcaaatgctatttactcctccctaactcacatttactcaattgagtattttttaaagaagaagaagtaaaaaaatcagtttattttttacctttgttctttaaaacataacgccactttaagcaaggtcagcacaaaaataaatttatctacttcgttttgatgcatcttcaggcagtgtttaagaaaagttttttttttaaaaaaagcttttaaattcgttttttagttcaaattgtttgaaagtatcatcatatttgtagtttttagggctacaaatgtaattttaagaaaaaaagctctctacagtaagttctcataccattgaaggtatatttttgtgttatagacccatgcagatgcaaaagtccaagtgctggacaatcaaaacgtaagcttgtcattgtttaatgcatacttaaacaattttatttttgtcttgaaattattaataatgtggttttctgtccacttcccctatgcaggtgtccaacggatgtgtgagtaaaattctgggcaggtattacgagactggctccatcagacccagggcaatcggtggtagtaaaccgagagtagcgactccagaagttgtaagcaaaatagcccagtataagcgggagtgcccgtccatctttgcttgggaaatccgagacagattactgtccgagggggtctgtaccaacgataacataccaagcgtgtcatcaataaacagagttcttcgcaacctggctagcgaaaagcaacagatgggcgcagacggcatgtatgataaactaaggatgttgaacgggcagaccggaagctggggcacccgccctggttggtatccggggacttcggtgccagggcaacctacgcaagatggctgccagcaacaggaaggagggggagagaataccaactccatcagttccaacggagaagattcagatgaggctcaaatgcgacttcagctgaagcggaagctgcaaagaaatagaacatcctttacccaagagcaaattgaggccctggagaaagagtttgagagaacccattatccagatgtgtttgcccgagaaagactagcagccaaaatagatctacctgaagcaagaatacaggtatggttttctaatcgaagggccaaatggagaagagaagaaaaactgaggaatcagagaagacaggccagcaacacacctagtcatattcctatcagcagtagtttcagcaccagtgtctaccaaccaattccacaacccaccacaccggtttcctccttcacatctggctccatgttgggccgaacagacacagccctcacaaacacctacagcgctctgccgcctatgcccagcttcaccatggcaaataacctgcctatgcaacccccagtccccagccagacctcctcatactcctgcatgctgcccaccagcccttcggtgaatgggcggagttatgatacctacacccccccacatatgcagacacacatgaacagtcagccaatgggcacctcgggcaccacttcaacaggactcatttcccctggtgtgtcagttccagttcaagttcccggaagtgaacctgatatgtctcaatactggccaagattacagt

SEQ ID NO: 93479 - DNA, 1269 bp, Artificial Sequence
  derived and/or modified sequence
atgcagaacagccacagcggcgtgaaccagctgggcggcgtgtttgtgaatggccggcccctgcctgacagcacccggcagaagatcgtggagctggcccacagcggggcccggccctgtgacatcagccgcatcctgcaggtgtccaatggctgtgtgtccaagatcctgggccgctactatgaaacaggcagcatccggccccgggccatcggcggcagcaagccccgggtggccaccccagaggtggtgtccaagatcgcccagtacaagagagaatgtcccagcatctttgcctgggagatccgggaccggctgctgtctgagggcgtgtgcaccaatgacaacatccccagcgtgagcagcatcaacagagtgctgaggaacctggccagcgagaagcagcagatgggcgcagatggcatgtatgacaagctgaggatgctgaatggccagacaggctcctggggcacccggcccggctggtacccaggcacctctgtgcccggccagcccacccaggacggctgccagcagcaggagggcggcggggagaacaccaacagcatcagcagcaatggagaagattctgatgaggcccagatgaggctgcagctgaagaggaagctgcagaggaacagaaccagcttcacccaggagcagatcgaggccctggagaaggagtttgagaggacccactacccagatgtgtttgcccgggagcggctggccgccaagattgacctgcctgaggcccgcatccaggtgtggttcagcaacagaagagccaagtggaggcgggaggagaagctgaggaaccagaggcggcaggccagcaacacccccagccacatccccatcagcagcagcttcagcacctctgtgtaccagcccatcccccagcccaccacccctgtgagcagcttcaccagcggctccatgctgggccgcacagacacagccctgaccaacacctacagcgccctgccccccatgcccagcttcaccatggccaacaacctgcccatgcagccccctgtgcccagccagaccagcagctacagctgcatgctgcccaccagccccagcgtgaatggccgctcctatgacacctacaccccaccccacatgcagacccacatgaacagccagcccatgggcaccagcggcaccaccagcacaggcctcatcagccctggggtgtctgtgcctgtgcaggtgcccggcagcgagccagacatgagccagtactggccccggctgcagtag

SEQ ID NO: 93480 - DNA, 1134 bp, Artificial Sequence
  derived and/or modified sequence
atgcaggtgtccaatggctgtgtgtccaagatcctgggccgctactatgagaccggcagcatccggccccgggccatcggcggcagcaagccccgggtggccaccccagaggtggtgtccaagatcgcccagtacaagcgggagtgccccagcatctttgcctgggagatccgggaccggctgctgtctgaaggagtgtgcaccaatgacaacatccccagcgtgagcagcatcaacagagtgctgaggaacctggccagcgagaagcagcagatgggcgcagatggcatgtatgacaagctgaggatgctgaatggccagacaggctcctggggcaccaggcctggctggtacccaggcacctctgtgcccggccagcccacccaggacggctgccagcagcaggagggcggcggggagaacaccaacagcatcagcagcaatggagaggacagtgatgaggcccagatgaggctgcagctgaagaggaagctgcagaggaacagaaccagcttcacccaggagcagatcgaggccctggagaaggagtttgagaggacccactacccagatgtgtttgcccgggagcggctggccgccaagattgacctgcctgaggcccgcatccaggtgtggttcagcaacagaagagccaagtggaggcgggaggagaagctgaggaaccagaggcggcaggccagcaacacccccagccacatccccatcagcagcagcttcagcacctctgtgtaccagcccatcccccagcccaccacccctgtgtcctccttcaccagcggctccatgctgggccgcacagacacagccctgaccaacacctacagcgccctgccccccatgcccagcttcaccatggccaacaacctgcccatgcagccccctgtgcccagccagaccagcagctacagctgcatgctgcccaccagccccagcgtgaatggccgctcctatgacacctacaccccaccccacatgcagacccacatgaacagccagcccatgggcaccagcggcaccaccagcacaggcctcatcagccctggggtgtctgtgcctgtgcaggtgcccggcagcgagccagacatgagccagtactggccccggctgcagtag

SEQ ID NO: 93481 - DNA, 1269 bp, Artificial Sequence
  derived and/or modified sequence
atgcagaacagccacagcggcgtgaaccagctgggcggcgtgttcgtgaatggtcgtcctctgcccgattcaacacggcaaaagattgttgagttagcgcacagtggggcaagaccatgtgacatctcacgcatcttacaggtcagcaacgggtgcgtaagcaagatcctgggcaggtactacgagactgggagtattaggccccgcgcaatcggaggatcaaaacccagagtggctacacctgaggtggtgagcaaaattgctcagtacaagcgcgagtgtccatccattttcgcatgggaaatccgagaccggctgctcagtgaaggtgtctgtacaaacgataacattccttccgtgagttctataaacagggtcctgcggaaccttgcctcagaaaaacagcagatgggagcagatggaatgtatgataaattgagaatgctaaacggtcagaccgggtcgtggggtactcgtccaggttggtaccctgggacgtcagtaccaggtcagcctactcaggacggatgccaacagcaggagggggggggtgagaacacgaattccattagcagcaacggagaagattcggacgaggctcagatgcgcttgcagctcaaacggaagctgcaaagaaaccgcacttcttttacccaggagcagattgaagcgttagagaaggaattcgaacggacacactacccagatgtgttcgctcgtgaacgactagctgcaaaaattgatctgccggaggcacggatacaggtgtggttcagcaatagacgcgcaaaatggaggagggaggaaaaattacgcaatcaacgcagacaggcatcaaatactccatcccacatacctataagcagttcatttagcacatctgtgtatcagcccatacctcaacccaccactcccgttagtagctttacttcggggagtatgttagggcggacagacactgccctgacaaacacatactcagctttgccaccgatgccgtctttcactatggctaataacctgccaatgcagccccctgtgccgagtcaaacatcgtcctattcatgcatgctcccgacctccccttcggtcaatggcaggtcctacgatacttataccccaccccacatgcagacccatatgaacagccagcccatgggcacctcagggaccactagcactggcttaatcagcccaggagtgtccgtaccagtacaggtcccgggttctgagccggatatgtcccaatactggcctcggctgcagtag

SEQ ID NO: 93482 - DNA, 1269 bp, Artificial Sequence
  derived and/or modified sequence
atgcagaacagccacagcggcgtgaaccagctgggcggcgtgttcgtaaatggcagacccttgccagacagcacccgccagaagatcgtggagctagcacacagtggcgcccggccctgcgacatctctagaatcctgcaggtgtctaatggctgtgtgagcaagattctaggccgttactacgagactgggtccattcggcccagagccatcggtggctctaaacctcgggtcgccactccagaggtagtatctaagattgctcagtacaagcgtgaatgcccaagcattttcgcctgggaaatccgcgatagactgctaagtgagggagtctgcacgaacgacaacatcccttcagtgtcttctattaatagagttttgagaaacctcgcaagtgaaaaacagcagatgggggccgacgggatgtacgataagcttcgcatgctcaatggccaaaccggttcctggggcaccaggcctggatggtacccaggcacgtcagtccccggccagcccacccaggatggatgccagcagcaggagggcggcggcgagaacaccaacagcatttccagcaacggagaagactccgacgaagctcagatgcggctccaactcaagcggaaactgcagcgcaaccgaacttcattcactcaggagcaaatcgaggcgctggaaaaggaatttgaaaggacacactatcctgatgtatttgcgcgagagagactggctgctaagatcgacctcccagaggcccggattcaggtatggttttcaaataggcgtgccaaatggaggcgggaagagaaactccgcaatcagcggcgccaagcaagcaacactccttcacacattcctatctcaagcagttttagtacctctgtctaccaacctataccacagcccactactcctgtttcttcttttacctctggaagcatgctgggacgcaccgacaccgccctgaccaacacgtactccgccctgccacccatgcctagcttcacaatggccaacaatttgcctatgcagccccctgttccaagccaaacctcgtcctactcttgcatgcttccgacttcccctagcgtgaacggaaggagctacgacacctatacacctccccacatgcagacacacatgaacagtcagcctatgggcacctcaggcactacttcgaccggactgattagcccaggagtgagcgttcccgtacaggtcccaggctccgaacctgatatgagtcaatactggcctaggttgcagtag

SEQ ID NO: 93483 - DNA, 1269 bp, Artificial Sequence
  derived and/or modified sequence
atgcagaacagccacagcggcgtgaaccagctgggcggcgtgttcgttaatggccgccccctgccggacagcactagacagaagatcgtcgaactggcacacagtggagcaagaccttgtgacataagcaggatccttcaagtcagcaatggatgtgtcagcaaaatactgggccgctactacgagacaggctcaatacgccctcgcgcaatcggcgggtctaagccgcgggtggccacacctgaagtggtgtctaagattgcccaatacaagcgggaatgcccttctatatttgcctgggagattagggatcgcctgctgtctgaaggcgtgtgtacgaacgataacataccaagcgtgagttcgatcaatcgggtgttgcgtaacctggcaagcgaaaagcagcagatgggggccgacggaatgtacgataaactgaggatgctgaacggtcagacaggctcgtgggggacgagacccggctggtacccgggcacatctgtccctggacagcccactcaagacggctgtcagcagcaggagggaggcggtgaaaacactaacagtatatcttctaacggggaggattcagacgaagctcagatgaggctgcagctcaaaagaaagctgcagcgcaaccgcaccagttttactcaggaacagatcgaggccctagaaaaggaattcgagcgtacgcactatcccgatgtgttcgcaagggaacggcttgctgcaaaaattgacttgcccgaagccaggatccaggtgtggttctcaaatcggcgcgccaaatggcggagggaggaaaaattgaggaaccagcggagacaggcttctaacaccccgtctcatattcctatttcttctagcttctctacctctgtttaccagccaataccgcagcctaccaccccagtgagtagtttcacgagcgggtcaatgctgggaaggaccgacaccgcccttaccaatacctattcagctctccccccaatgccctctttcacaatggccaacaacttgcctatgcagcccccggtgccatcccagaccagctcatatagctgcatgttgcctacatcaccatcagtcaacggtcgctcttacgacacctataccccccctcacatgcaaactcacatgaactctcaacctatgggaacatcaggcaccacttcaactggactgattagcccaggggtctctgtccccgtgcaagttcctggctctgaaccagacatgtcccagtattggccaaggctgcaatag

SEQ ID NO: 93484 - DNA, 1269 bp, Artificial Sequence
  derived and/or modified sequence
atgcagaacagccacagcggcgtgaaccagctgggcggcgtgttcgtgaatgggcggcctctccccgactccacacggcaaaagatcgttgagttggcccactcgggggcacgtccctgcgacattagtcgaattctgcaagtaagcaacggctgcgtcagcaagatcctgggacggtactatgagaccggatccatcaggccaagagcaatcggtggttccaagcctagagtagcaactcctgaggtggtctctaaaatcgcgcaatacaaacgggagtgtcctagcatttttgcatgggagatcagagatagactgctgtctgaaggcgtttgcaccaacgacaacattcctagtgtgagttccatcaacagggttttgcggaacctggcttccgagaagcagcagatgggagcagatgggatgtatgataagctccggatgctcaatggacagaccggctcatggggtacccggcccggatggtaccctgggacaagtgtcccgggtcagcccacgcaggacggctgccagcaacaggaaggggggggagagaacaccaacagtatctccagcaatggcgaagattcagatgaggctcaaatgcgcttacagctgaaacgcaaactgcaacggaatcggacttcgtttacacaggagcagatcgaagcattagagaaagagttcgaacgcacacactaccctgacgtgtttgcaagagagcggctcgccgcgaagatcgacttaccagaagcccggatccaggtttggtttagcaataggagagcaaagtggagacgagaggagaagctgcggaaccaacggcgccaggcctccaataccccgtctcacatacccatcagcagtagcttcagcacttccgtctatcagccaataccacagcccactaccccggtctccagcttcacctcaggaagcatgctcgggagaactgacaccgccttaaccaacacctattccgctcttccccccatgccgagtttcaccatggccaacaacttacctatgcaacccccagtcccgagccagacaagttcttattcctgcatgctgcctacttctccatccgttaacggaagatcctatgacacttacacccctcctcacatgcagacgcacatgaacagccaacccatggggactagtggcactactagcacaggcctgatctcgcctggggtttcggtgcctgtccaggttcccgggagcgaacccgatatgtcccagtattggcccaggctccagtag

SEQ ID NO: 93485 - DNA, 1269 bp, Artificial Sequence
  derived and/or modified sequence
atgcagaacagccacagcggcgtgaaccagctgggcggcgtgttcgtgaatgggcgccctctccccgactccaccaggcagaagattgtagaactggcgcactcaggggccagaccatgcgatataagcaggattctgcaggtgtctaatggctgtgtgtctaaaatattgggacgctattatgagaccggatcaataaggcctcgggccataggcggctccaaaccccgcgtggctacgcctgaggtggtgtccaagatcgctcaatataagagagaatgtccatcaattttcgcttgggaaattagagatcgactgctgagtgagggtgtgtgtacaaatgacaatattccctcagtgagttcaatcaaccgagtcctgagaaatttggcttcggagaagcagcagatgggcgccgatggcatgtacgataagctccgcatgctaaatggccagacaggctcgtgggggacccgcccaggatggtaccccggcaccagcgtgccagggcaaccgacccaggatggctgccagcagcaggagggggggggtgagaatactaactccattagttcgaatggagaagacagtgacgaggcccaaatgcgcctccaactcaagcgcaaactgcagcggaaccgtacatcctttacacaggagcaaatcgaagcgctcgaaaaggagttcgagaggacacactaccccgatgttttcgctagggagagactggccgctaaaattgacctacctgaggcgcgaatccaggtgtggttttccaatcgacgggccaaatggcgccgagaggaaaaactgcggaaccagcgcaggcaggcatctaacaccccaagccacatcccaatcagctcctcattctccacaagtgtataccagcctattccgcaaccaaccacaccagtgagctctttcacatcaggctccatgcttggacgcacagataccgcgctcaccaatacgtattccgccctgcctcccatgccatcgtttactatggcaaataacctgcctatgcagccgcccgtcccaagccagacaagtagctatagctgtatgctgccaaccagccccagtgtcaatggtcggtcttatgatacttatacaccaccacacatgcaaacgcatatgaattcacaacccatgggaaccagcggcaccacctctaccggcctgatttccccaggcgtttctgtaccggtgcaggtccccggttccgagcctgacatgtctcagtactggcctcgtttgcagtag

SEQ ID NO: 93486 - DNA, 1134 bp, Artificial Sequence
  derived and/or modified sequence
atgcaggtgagcaacggctgcgtgagcaagatcctgggccggtactatgagactggtagtattcgcccacgcgccattgggggaagcaaacctagggtggctacacccgaggtggtcagtaaaatcgcccagtataaaagggagtgcccctccatctttgcgtgggaaattcgggacagactgctctcagaaggtgtttgcactaacgacaacatcccctccgtctcctcgattaaccgagtgctgcgtaatctggcatctgagaaacagcagatgggtgccgacggcatgtacgacaagctccgtatgctgaatgggcagaccggctcatggggaacaaggcctggctggtacccaggcacctctgttcccggacagcctacccaggacgggtgtcagcagcaggaaggcgggggcgagaataccaattccatctcttctaacggcgaagacagcgacgaggctcagatgcgcttgcagctaaagcgcaagctgcaacggaatagaaccagtttcactcaagagcagatcgaggcactggaaaaagagtttgagcggacgcattatccagatgtattcgctcgcgagcgcctcgctgcgaaaatagacctgcccgaagcccgcatccaggtatggtttagtaaccgaagagccaaatggaggcgggaggagaaactccgcaaccagcgtcgacaggcatcaaacacccccagccatatcccaatctccagctcattttccacctctgtctatcagcccatcccacaaccaaccaccccggtcagctctttcacatctgggagtatgctggggaggacggacaccgcgttaacgaatacctactctgccctgccaccaatgccatccttcaccatggctaataacctccccatgcagccacccgtgcctagccagacctcttcgtacagctgtatgctgccgaccagcccatcagtcaatggccgcagttacgacacttataccccgccacatatgcagacccacatgaactctcaaccaatgggcacatccggcactacttcgaccggactcatctctccaggcgtaagcgtgcctgtgcaggtaccaggctcagaacccgatatgtctcagtattggccgaggctgcagtag

SEQ ID NO: 93487 - DNA, 1269 bp, Artificial Sequence
  derived and/or modified sequence
atgcaaaatagtcactccggggtgaatcagctcgggggagttttcgttaacggcagaccactcccagactctacgcggcagaaaatagttgaattggcccatagtggagcccgtccttgcgacatctctcggatattacaggtgtcaaacggatgcgtgtctaagattctgggtcggtactacgagacaggctcgatcaggccaagggcgatcggaggatcgaagcccagagttgcaactcctgaagttgtatccaagatcgcacagtacaaaagggagtgtcccagcatctttgcctgggagatcagagaccgattactctccgagggagtgtgtacaaatgacaatatcccttccgtgagctcaataaatagggtactccgcaatttggcatctgagaagcaacagatgggggcagatggcatgtatgataagcttagaatgttgaacggccagacaggttcctggggcactaggcctggttggtaccccggtaccagtgtaccaggacagccaacccaggatggttgtcagcagcaagaagggggtggagagaacaccaattccataagctctaatggcgaggattccgacgaagcccaaatgagactgcaattgaagcggaagctccagcggaatagaacttcttttactcaggaacagatcgaggccctggagaaggaatttgagcggacacactacccagatgtgtttgccagagaacgtctcgccgcaaagatagatctgcccgaagccaggattcaggtgtggttctctaaccgacgggctaaatggagaagggaggagaagctcagaaaccaaagaagacaagcgtccaacactccttcacatatccccatctccagctctttcagtacctccgtctaccagccaatcccgcaaccgacaacacccgtgagctcttttacgtccggctcaatgttagggagaactgatactgctctgaccaacacctatagcgcgttgcccccaatgccttcctttactatggccaacaatttaccgatgcaacctcctgtgccttcccagacctctagctactcttgtatgttgccaacttccccctctgttaatggaaggtcatatgacacctatacacccccacatatgcagacccacatgaatagccaacccatgggcacgtccgggactacaagtaccggccttatcagcccaggcgtcagcgtgcccgtgcaggtgccagggtccgaaccagacatgtctcagtattggccaagactgcagtag

SEQ ID NO: 93488 - DNA, 1269 bp, Artificial Sequence
  derived and/or modified sequence
atgcagaactcccattccggcgtgaatcagctgggcggtgttttcgtcaatggcagaccccttcccgattcaactcgccaaaagattgtcgaactcgcacactcaggggctaggccatgtgacatctctcggatcttgcaggtttccaatggctgcgtgtctaagattctgggtaggtattatgagaccggttccattcgccctagagctattggtggtagtaagccacgagttgcgacacctgaagtcgtaagcaaaatagcccagtacaaaagagaatgcccaagtatcttcgcctgggagatacgggatcggctccttagcgagggcgtttgtaccaatgataacattcccagcgtgagctcaatcaatcgggtcctcaggaacctggcatccgaaaagcagcagatgggagccgatggaatgtatgataagctgcggatgttgaatggacagacaggcagctggggcactagacccggatggtatcctggcacttctgtccctggccaacccacacaagacgggtgtcagcaacaggaaggcggtggcgagaatacgaacagtatctcgagcaacggtgaggactcagatgaggcccagatgcgactgcagttgaaaagaaaactgcagcgaaaccgaactagctttacccaggagcagatcgaagccctagaaaaggaattcgagcgtacccactaccccgacgtgtttgcgagggagagattagctgccaaaatcgacctgccagaggccaggattcaggtgtggttttccaacaggagagccaagtggagaagagaggagaaactgcgtaaccaacgcagacaagcctcaaacacacccagtcacatccctatttcttcatcgtttagcacatctgtttatcaacccatccctcagcccacaacgcccgtgagctccttcaccagtggatctatgctggggaggacagataccgctctgaccaatacctacagtgccttaccccctatgccatctttcacaatggcaaataatctgcctatgcagccccctgtgcctagccagaccagcagctattcatgcatgctcccgacgagcccttctgtgaacggacgctcttacgatacctacaccccgcctcatatgcagactcacatgaacagccagcctatggggacatccgggactacaagcaccggcctgatctcccccggagtttccgtgcctgttcaggtgccgggttcagagcctgatatgagccagtattggccaagactgcagtag

SEQ ID NO: 93489 - DNA, 1269 bp, Artificial Sequence
  derived and/or modified sequence
atgcaaaactcgcacagtggggtcaaccagttggggggtgtttttgtcaatgggagacctctacctgactcaacccggcagaaaatcgtcgaactcgcacactccggagccagaccctgtgacatttccaggatcctccaggtgtcgaacgggtgcgtaagtaagatcctgggccgatactacgaaacagggtccatacggcctcgggcaatcgggggatctaaacccagggtggccacacctgaggtcgtgtccaaaatcgcacaatacaagagggaatgtcccagcatcttcgcctgggagatccgggacagacttctgagcgaaggcgtgtgcaccaatgacaacataccttccgtctcttctattaaccgtgtgttacggaacctggccagcgagaaacagcaaatgggcgcagacggcatgtatgataagctgaggatgttaaacggtcaaaccggctcttgggggacaaggcccggttggtaccccggaaccagtgtgcccggtcagcctacccaggatggatgtcaacagcaagagggaggcggtgaaaacactaacagcataagttcgaacggcgaggatagcgacgaggcccaaatgagactgcagctgaaaaggaaactgcagaggaataggacttcctttactcaggagcagatcgaagctctggaaaaggagttcgaacgaacccactatcctgatgtgtttgccagagagagactagccgctaaaatagaccttcctgaggccaggatccaggtgtggttttctaaccgcagggccaagtggcgcagggaagaaaagctccgaaatcagagacgccaggccagtaatacgccttcccacatcccgatcagtagctccttcagtacctctgtataccagccaattcctcagcctaccacccctgtgagttcctttactagcggctctatgttgggtaggacggatactgccttaaccaacacctattccgctctgcctcctatgccgagtttcaccatggccaacaatctgcctatgcagcctccggtgccatcacagacctcctcatactcatgcatgcttcccacctcgccatctgtgaatggccgatcttacgacacgtacacgccccctcacatgcagactcacatgaattctcaacctatggggacctcaggaaccacatctactggcctgatctctccgggagtgagtgtgccagtccaggtgccaggcagcgagccagatatgagccaatactggccaaggcttcagtag

SEQ ID NO: 93490 - DNA, 1269 bp, Artificial Sequence
  derived and/or modified sequence
atgcagaactcgcattcgggggttaaccaactgggcggtgtgttcgtaaatggccgaccactgcctgattcaacccggcagaagatcgtggagcttgcccacagtggcgcacgtccctgcgacattagccgcatcctgcaagtaagtaacggctgcgtgtctaagatactgggaagatactacgagacaggttccattcggcctagggcaatcgggggatccaagcccagggttgccacgccagaggtcgttagtaagatcgcacagtataagagggagtgtccttccatctttgcatgggagattcgagatagactgctcagcgaaggagtctgcacaaatgataacattcccagcgtgtcctctatcaatagggttctgcggaatcttgcaagcgagaaacagcagatgggagccgacgggatgtatgacaagctgcggatgttaaatggccaaaccggctcatggggcacacggcctggatggtaccctggtactagtgtcccagggcagcccacccaggatggttgtcagcaacaggaaggcggtggtgagaacacgaactcaatatcttccaacggagaggactccgacgaggcccagatgcgactccagctgaagcgcaagcttcaaaggaatcgtacctcttttacccaggaacagatcgaagctctggagaaagagttcgaacgcacccattaccctgatgttttcgcaagagagcgcctggctgcaaagatcgaccttccagaagcccgaatccaggtctggttctctaatcgacgtgccaagtggaggcgagaggaaaaattgcggaaccagagaaggcaggcttctaataccccatcacatatccccatcagctcctcattctcaacctccgtctatcagccgatcccccagcctaccacaccagtatcctccttcacttcggggagcatgctgggcagaaccgataccgccctcactaatacctacagcgccctgcccccaatgccctcatttactatggctaacaacctacccatgcagcctcctgtgccgagccagactagctcctacagttgcatgctccctacgagcccctccgtcaacggcaggtcatatgatacgtacacgcctccccacatgcaaacccacatgaattcacagcccatgggcactagcggaaccacaagtaccgggctgatctcaccaggggtgtccgtgccagtccaggtgcccggaagcgagcctgatatgtctcagtactggccccgactgcagtag

SEQ ID NO: 93491 - DNA, 1269 bp, Artificial Sequence
  derived and/or modified sequence
atgcaaaattctcactcgggtgtgaaccagctgggaggagtgtttgtcaatggccgacccctgcctgattcaactagacagaagatcgttgaacttgcacattctggagcccgaccatgtgatataagcaggatcctgcaggtatcaaatggttgcgtgagtaagatcttgggacgctactacgagactgggtccatcaggccaagggccatcgggggtagtaagccaagagttgccactcccgaagtggtgtcaaagatcgcccagtacaagcgagagtgtccatccattttcgcttgggagattcgggatagacttctgtcagagggtgtgtgtaccaacgacaatatcccaagtgtctcttccattaacagagtcctgaggaaccttgcgtccgagaaacagcagatgggggctgacggtatgtatgataagcttaggatgctaaacggccagacagggagttggggcacgagaccaggctggtaccctgggacgagcgtccctggccaacccacgcaggacggatgtcaacagcaggaagggggtggggagaatactaactccataagttcgaacggcgaagacagcgatgaggcccaaatgcggctgcagctcaagcgaaagctccagagaaatcgcacttcctttacccaggaacagatcgaagcgttagagaaggagtttgagagaacgcactaccccgacgtgttcgccagagaacgactcgccgcaaaaatcgacctccctgaggcacgcattcaggtctggttcagtaaccgaagagctaaatggaggcgggaagaaaaactgagaaatcagcggagacaggcctcaaatacacctagccatatcccaatttcttctagtttctctacaagcgtttatcagccaatcccacagcccacaactccagtcagctctttcacctctggttctatgttggggagaaccgacactgcacttacaaatacctattccgccctcccacccatgcctagcttcaccatggctaacaacctccctatgcagccccctgtgccctctcagacgtccagttattcatgtatgctccccacaagccccagtgtaaatgggagatcctatgatacttacacacccccacacatgcagacacatatgaattcccagccaatgggcacctccggaaccaccagcacggggctgatcagccccggtgtgtcagtacccgtgcaggtgcctggaagcgagccagatatgagtcagtattggccacggctccaatag

SEQ ID NO: 93492 - DNA, 1134 bp, Artificial Sequence
  derived and/or modified sequence
atgcaggttagtaacggctgtgtgagcaagattctggggagatactacgagacaggttcgatccgaccacgggctatcggcggttctaagccgagggtcgccaccccagaggtggtgagcaaaatcgcgcagtataaacgggagtgcccttccatctttgcttgggagattcgggatcgtctgctctccgaaggagtctgcactaatgacaatattccaagcgtatctagtatcaatagagtcctcaggaatctcgctagcgaaaaacagcagatgggtgccgacggtatgtacgataaactgcgcatgctgaatgggcagaccggaagctgggggactagacccggatggtacccgggaacaagcgtgcccggacagccaacacaggatggctgccaacaacaggaagggggaggcgagaacacgaattcgatttccagcaacggcgaggattcggacgaggcacagatgcgcttacagctgaaaaggaaactgcaacgcaatcggacttcatttactcaggagcagattgaagcgctggagaaagagttcgagaggacccattatcccgatgtctttgcccgagagaggttggccgcaaagatcgatctccctgaagccaggatacaggtttggtttagcaacagacgagcaaaatggaggcgagaagaaaagctgcgcaatcaaaggcgccaggcatctaacacccctagccacattcccatttcgtcttcattcagcaccagcgtctatcagccgatacctcagccgacaaccccagttagttcattcacttctgggtcgatgctgggaagaaccgataccgccctcaccaacacttactcagccctcccacccatgccttccttcacaatggccaataatcttccgatgcagcctccagtgcctagccagacttcaagctactcttgtatgcttcctacaagccccagtgtgaatggtaggtcctacgatacctatactccaccccacatgcagactcacatgaatagccagcccatggggacctccggcaccactagtacaggcctcattagtcctggcgtctccgtccccgtgcaggtcccaggatctgaacccgatatgtctcagtactggccacggcttcaatag

SEQ ID NO: 93493 - DNA, 1269 bp, Artificial Sequence
  derived and/or modified sequence
atgcagaacagccacagcggcgtgaaccagctgggcggcgtgttcgtgaacggcagacccctgcccgacagcaccagacagaagatcgtggagctggcccacagcggcgccagaccctgcgacatcagcagaatcctgcaggtgagcaacggctgcgtgagcaagatcctgggcagatactacgagaccggcagcatcagacccagagccatcggcggcagcaagcccagagtggccacccccgaggtggtgagcaagatcgcccagtacaagagagagtgccccagcatcttcgcctgggagatcagagacagactgctgagcgagggcgtgtgcaccaacgacaacatccccagcgtgagcagcatcaacagagtgctgagaaacctggccagcgagaagcagcagatgggcgccgacggcatgtacgacaagctgagaatgctgaacggccagaccggcagctggggcaccagacccggctggtaccccggcaccagcgtgcccggccagcccacccaggacggctgccagcagcaggagggcggcggcgagaacaccaacagcatcagcagcaacggcgaggacagcgacgaggcccagatgagactgcagctgaagagaaagctgcagagaaacagaaccagcttcacccaggagcagatcgaggccctggagaaggagttcgagagaacccactaccccgacgtgttcgccagagagagactggccgccaagatcgacctgcccgaggccagaatccaggtgtggttcagcaacagaagagccaagtggagaagagaggagaagctgagaaaccagagaagacaggccagcaacacccccagccacatccccatcagcagcagcttcagcaccagcgtgtaccagcccatcccccagcccaccacccccgtgagcagcttcaccagcggcagcatgctgggcagaaccgacaccgccctgaccaacacctacagcgccctgccccccatgcccagcttcaccatggccaacaacctgcccatgcagccccccgtgcccagccagaccagcagctacagctgcatgctgcccaccagccccagcgtgaacggcagaagctacgacacctacacccccccccacatgcagacccacatgaacagccagcccatgggcaccagcggcaccaccagcaccggcctgatcagccccggcgtgagcgtgcccgtgcaggtgcccggcagcgagcccgacatgagccagtactggcccagactgcagtag

SEQ ID NO: 93494 - DNA, 1134 bp, Artificial Sequence
  derived and/or modified sequence
atgcaggtgagcaacggctgcgtgagcaagatcctgggcagatactacgagaccggcagcatcagacccagagccatcggcggcagcaagcccagagtggccacccccgaggtggtgagcaagatcgcccagtacaagagagagtgccccagcatcttcgcctgggagatcagagacagactgctgagcgagggcgtgtgcaccaacgacaacatccccagcgtgagcagcatcaacagagtgctgagaaacctggccagcgagaagcagcagatgggcgccgacggcatgtacgacaagctgagaatgctgaacggccagaccggcagctggggcaccagacccggctggtaccccggcaccagcgtgcccggccagcccacccaggacggctgccagcagcaggagggcggcggcgagaacaccaacagcatcagcagcaacggcgaggacagcgacgaggcccagatgagactgcagctgaagagaaagctgcagagaaacagaaccagcttcacccaggagcagatcgaggccctggagaaggagttcgagagaacccactaccccgacgtgttcgccagagagagactggccgccaagatcgacctgcccgaggccagaatccaggtgtggttcagcaacagaagagccaagtggagaagagaggagaagctgagaaaccagagaagacaggccagcaacacccccagccacatccccatcagcagcagcttcagcaccagcgtgtaccagcccatcccccagcccaccacccccgtgagcagcttcaccagcggcagcatgctgggcagaaccgacaccgccctgaccaacacctacagcgccctgccccccatgcccagcttcaccatggccaacaacctgcccatgcagccccccgtgcccagccagaccagcagctacagctgcatgctgcccaccagccccagcgtgaacggcagaagctacgacacctacacccccccccacatgcagacccacatgaacagccagcccatgggcaccagcggcaccaccagcaccggcctgatcagccccggcgtgagcgtgcccgtgcaggtgcccggcagcgagcccgacatgagccagtactggcccagactgcagtag

SEQ ID NO: 93495 - protein, 560 aa, Artificial Sequence
  derived and/or modified sequence
MPQTRSQAQATISFPKRKLSRALNKAKNSSDAKLEPTNVQTVTCSPRVKALPLSPRKRLGDDNLCNTPHLPPCSPPKQGKKENGPPHSHTLKGRRLVFDNQLTIKSPSKRELAKVHQNKILSSVRKSQEITTNSEQRCPLKKESACVRLFKQEGTCYQQAKLVLNTAVPDRLPAREREMDVIRNFLREHICGKKAGSLYLSGAPGTGKTACLSRILQDLKKELKGFKTIMLNCMSLRTAQAVFPAIAQEICQEEVSRPAGKDMMRKLEKHMTAEKGPMIVLVLDEMDQLDSKGQDVLYTLFEWPWLSNSHLVLIGIANTLDLTDRILPRLQAREKCKPQLLNFPPYTRNQIVTILQDRLNQVSRDQVLDNAAVQFCARKVSAVSGDVRKALDVCRRAIEIVESDVKSQTILKPLSECKSPSEPLIPKRVGLIHISQVISEVDGNRMTLSQEGAQDSFPLQQKILVCSLMLLIRQLKIKEVTLGKLYEAYSKVCRKQQVAAVDQSECLSLSGLLEARGILGLKRNKETRLTKVFFKIEEKEIEHALKDKALIGNILATGLP

SEQ ID NO: 93496 - protein, 629 aa, Artificial Sequence
  derived and/or modified sequence
MQQDGLGVGTRNGSGKGRSVHPSWPWCAPRPLRYFGRDARARRAQTAAMALLAGGLSRGLGSHPAAAGRDAVVFVWLLLSTWCTAPARAIQVTVSNPYHVVILFQPVTLPCTYQMTSTPTQPIVIWKYKSFCRDRIADAFSPASVDNQLNAQLAAGNPGYNPYVECQDSVRTVRVVATKQGNAVTLGDYYQGRRITITGNADLTFDQTAWGDSGVYYCSVVSAQDLQGNNEAYAELIVLDWLFVVVVCLAAFLIFLLLGICWCQCCPHTCCCYVRCPCCPDKCCCPEALYAAGKAATSGVPSIYAPSTYAHLSPAKTPPPPAMIPMGPAYNGYPGGYPGDVDRSSSAGGQGSYVPLLRDTDSSVASVRSGYRIQASQQDDSMRVLYYMEKELANFDPSRPGPPSGRVERAMSEVTSLHEDDWRSRPSRGPALTPIRDEEWGGHSPRSPRGWDQEPAREQAGGGWRARRPRARSVDALDDLTPPSTAESGSRSPTSNGGRSRAYMPPRSRSRDDLYDQDDSRDFPRSRDPHYDDFRSRERPPADPRSHHHRTRDPRDNGSRSGDLPYDGRLLEEAVRKKGSEERRRPHKEEEEEAYYPPAPPPYSETDSQASRERRLKKNLALSRESLVV

SEQ ID NO: 93497 - DNA, 1890 bp, Artificial Sequence
  derived and/or modified sequence
atgcagcaggacggcctgggcgtgggcacccggaacggcagcggcaagggtcgcagcgtgcatccttcttggccttggtgcgccccaagacctctgcggtacttcggacgggacgctagagcccgaagagcccaaaccgcggccatggcattgctagccggcggtttgtcaagaggtctaggctcccaccctgcggcagctggtagagatgctgtcgtgttcgtgtggctcctcctaagtacctggtgcacagcgccggcccgcgccatccaggttacagtttcaaatccttatcatgtggtgattctcttccagccagttaccttgccctgcacatatcaaatgacctccaccccaacgcagcccattgtgatctggaaatataagtctttttgccgggacagaattgccgatgctttttccccagcgtctgtggacaatcagctgaatgctcagctggcggcaggaaacccagggtacaatccttatgtcgaatgtcaggatagtgttagaacagtacgcgtggtcgcaaccaaacaggggaatgctgttacccttggcgattactaccaaggcagaagaatcacaatcaccggaaatgccgatctcactttcgaccagactgcatggggggactctggcgtctactactgctccgtggtgagcgcccaagacctccagggtaacaacgaggcatacgcagaactgattgtgttagattggctgttcgtggttgtggtttgccttgctgcctttctgatttttcttttgttaggaatatgttggtgccagtgctgcccacacacctgctgttgttacgtccggtgtccctgctgtccagacaagtgctgttgtccagaagcgctgtatgctgccggaaaggcagccaccagtggtgtgccttccatctatgctccaagcacatacgcgcacctgtcaccagccaagacgccgccccctcccgcaatgataccaatgggcccagcttacaacggctacccaggcggctacccgggagacgtggataggagttcaagcgcgggaggccagggctcatacgttcccctattacgcgacaccgattcatctgttgcatctgttcgctcaggatatagaatccaagcatcccagcaagacgacagtatgcgcgtgctgtactatatggaaaaggagttagcaaacttcgatccttctagacccggccccccttctggccgtgtggaaagggccatgtccgaagtgacttcactgcacgaggacgattggagatcgcgcccaagtcgcgggcccgccctcactccaattagagatgaggaatggggaggtcacagcccccgctctccacggggctgggatcaggaaccggccagagagcaggctgggggcggctggcgcgctcgtcgcccacgggctagaagtgttgacgccttagatgacttgacccccccatccactgccgaaagtggctctcgtagccctacaagtaatggcggaaggtctagggcgtatatgccccccagaagcagatctagagacgatctatatgaccaggatgacagcagggattttccgcggagcagggatccgcactacgacgactttaggagtagagagagaccgcccgctgatccacgaagtcaccaccatcgtacacgcgacccaagagacaatggttcccggtccggagatctgccgtatgacggaagattgctggaggaggccgtaagaaagaagggctctgaggaaaggcggaggccccataaagaggaggaggaagaggcgtattatcccccagcccctccaccttacagtgaaactgatagtcaggcaagcagagaacgacgtttgaaaaaaaatctcgcactcagtcgggagtcgttggtcgtttag

SEQ ID NO: 93498 - DNA, 1890 bp, Artificial Sequence
  derived and/or modified sequence
atgcagcaggatggtctgggcgtgggtaccaggaatggctcaggcaaagggaggtctgtgcatccctcctggccttggtgcgccccacgtccccttcggtatttcggtagggatgcaagggccaggcgagcccagacagcagcaatggccttgctagccggaggtttatcacgaggtttaggaagtcatcccgcagcagcaggacgcgatgccgtagtcttcgtttggctactcctgagtacatggtgcaccgcccctgctcgcgctattcaggtgactgtcagcaatccgtaccatgttgtgatcttatttcagcccgtgacgctcccctgtacttaccaaatgacatccactcctacccagcccatcgtcatttggaagtacaaatcattttgcagagacagaatcgccgatgcctttagccccgcttctgtcgacaatcagctcaatgctcagttagctgctggaaaccccggttataacccatacgttgaatgccaggactcggttcgcaccgtgcgggtggtggctaccaaacagggcaacgccgtgaccctcggcgactattaccaaggccgaagaatcacaattactggaaatgcagatctgacattcgatcaaacagcctggggagatagcggcgtgtactactgcagtgttgtgagcgctcaggacttgcaggggaataatgaagcttatgccgaactgatagttctcgattggttgttcgttgtggtggtgtgcttggcagcatttctgatttttctattactcggaatttgctggtgccagtgttgcccccatacttgttgttgttatgtgaggtgtccttgttgtcccgacaaatgctgctgtccagaggcattgtatgcggctggcaaggcggcaacctccggggtacccagtatctacgcgccttcaacatacgcccacctctcccctgctaaaaccccaccccctcccgctatgatccccatgggtccagcctacaatggatatcccggtggataccccggagacgttgatagatctagttcggccggaggacagggatcctatgtgcccctcttgcgagacaccgattctagcgtggcttcagtacggtccgggtatagaatccaggccagtcagcaggacgactctatgcgggtgctatactacatggagaaagagttagccaatttcgatccgagcaggccaggtccgccatccggtagggtcgagcgggcaatgtccgaggtgacctctttacatgaggatgattggaggtcccgaccgtctcgtgggcctgccctgacacctatcagggatgaggagtgggggggtcactcgccccgaagccctagagggtgggatcaggagcctgctagagagcaggcgggtggcggatggcgggcacgcaggccgagagcgcgaagcgtggacgcgcttgacgatctgactcctccatctaccgcagaatccggatccaggtctcccacctccaacggcggaaggtctagggcctatatgcctcccaggtcccgaagtagggatgacttgtacgaccaggatgacagcagggattttcctaggagtcgggacccgcactacgacgacttccgctctagggagcgaccgccagcggatccaaggtcccatcaccaccggacccgggacccgagggataatggaagtcgatccggggacctgccctatgacggcagacttctggaggaggccgtccgtaaaaagggaagtgaggagcgcaggcggccacataaagaggaggaagaggaggcttactatcctcccgctccacctccttatagtgagacggacagtcaggcctccagggagaggagactaaagaaaaatttggcgctatctagggaatcacttgttgtatag

SEQ ID NO: 93499 - DNA, 1890 bp, Artificial Sequence
  derived and/or modified sequence
atgcaacaggatggcttaggagtgggcactcgcaacggttcaggtaagggacggtctgtacacccctcttggccgtggtgcgccccaaggcccctgcgttattttggcagggacgcacgggcacgccgtgcccagaccgccgccatggccctactcgctggaggcctgagcagaggtctgggttcccaccccgccgcagccggtagagacgcagtagtcttcgtatggttactgctgtccacctggtgcaccgcacccgccagggcgatccaggtcacagtatcaaacccatatcatgtggtgatactgttccaaccagtaacactgccatgtacttatcagatgacttccacgcccacgcagcccatcgtgatctggaaatataagtcattctgccgagatcgaatagccgatgccttttccccagcctccgtggataaccaacttaacgcccaactcgcagctgggaatccagggtataatccctacgtcgagtgtcaggattcagttcggactgtgcgcgtcgtggccactaagcaggggaatgccgtgacgctgggagactattaccagggtcgacgcattacaatcacaggtaatgccgacttaacattcgaccagaccgcttggggggacagcggagtctactattgttctgtcgtgagtgcacaggatctacagggtaacaacgaggcatatgcggagctgattgtcctggactggctgtttgttgttgtggtgtgtctcgctgcatttctgatattcctattgctgggtatctgttggtgccagtgttgccctcatacctgctgttgttacgtgcgctgcccatgttgccccgacaagtgttgctgcccagaagctctctacgcagctggcaaagctgcgaccagtggcgtgcccagcatttatgccccttcaacttacgcgcatctaagtcccgccaagaccccacccccccccgcaatgatccctatgggccccgcttataacggctatccaggcggatatcccggggacgtggatcggtcaagcagcgctgggggccagggttcctatgtaccgttacttagagacactgactcttctgtcgcgagcgtccgctctggttatcgcatacaagccagtcaacaggatgattctatgcgggtgctctattatatggaaaaggaattggccaatttcgacccaagccggcctggcccaccaagcggtcgcgtggagcgagctatgtcagaagtgacttccctgcacgaggatgactggcggagcagaccatctcggggaccggccctcactcccatccgggacgaagagtggggggggcacagcccgcgctcacccagaggatgggatcaggagcccgccagagagcaggcaggcggaggctggcgcgctagacgacctagagctcggtccgtcgacgccttggatgacctgacccctcctagcacagcagaaagcggatcaagaagtcctacctcaaacggcggccgaagcagagcctacatgcccccccgcagccggtcaagggatgacctgtacgaccaagatgactctagggacttccctcggtcacgtgatccccattacgacgattttagatccagggagagaccacccgccgaccctcggagccatcaccaccgcacccgcgatccaagagataatgggagcaggagcggagacctgccctacgacggacgtttactggaagaagctgtgcggaagaagggaagcgaggagcgaagaaggccacacaaggaggaagaagaagaggcatactacccccctgccccccccccctattcggagaccgattcccaagcatcccgtgaacgccgattgaaaaaaaacctcgctttgtccagggaatctctagtggtctag

SEQ ID NO: 93500 - DNA, 1890 bp, Artificial Sequence
  derived and/or modified sequence
atgcaacaagacggcctcggagtagggacacgaaacggttcgggaaaaggacgctctgttcatccctcctggccctggtgtgcccctcggccgctgcgctattttggaagagatgcgcgcgctaggagagcccaaacagccgcgatggccttactggcaggaggcctctcccggggtcttgggtcccaccccgcagccgcaggccgagatgctgtggtgtttgtttggctgttgctgtctacttggtgtactgccccagcaagagcgattcaggtcacagtttctaatccgtaccacgtggttattcttttccagcctgtgaccctaccgtgtacctaccaaatgacctctacgcccacacaacccattgtcatctggaaatataaaagtttctgtcgcgatagaatcgccgatgctttcagccccgcatccgtggacaatcagttaaatgcccagttagctgctgggaatcctgggtacaacccctacgtggagtgtcaagatagcgtaagaacagtgagagttgtggcaaccaaacaagggaacgcagtgaccctcggcgactactaccaggggagacgaatcaccattactggcaatgcagatctgaccttcgatcaaaccgcgtggggtgactccggcgtttactattgctctgtcgtctccgctcaggaccttcagggaaacaacgaagcctatgcagaactgattgttctcgactggttgtttgtggtggtggtgtgcctggctgccttcctcattttcttgctgctcgggatctgttggtgtcagtgttgtcctcacacatgctgttgttacgtacgctgcccttgttgcccggataaatgctgctgccccgaagccctatacgcggcaggcaaggctgcgacatctggagtgccgtctatctatgcaccaagtacatacgcacaccttagcccagctaagactcctcctccccccgctatgataccaatgggcccagcctataacggataccccggcggctaccctggagacgtcgatcgcagttcctccgctggaggccagggtagttacgtcccccttctcagagataccgacagctctgttgcttcagtccgcagtgggtaccgcatccaagccagccagcaggatgactccatgcgtgtcttgtattacatggaaaaagagctcgcaaatttcgacccatcccgtccaggacccccatccggacgggtggagagagcaatgtcagaggtcacaagtctgcacgaagatgactggagatccagaccttctagaggccccgcactgacaccgatccgcgacgaagaatggggagggcacagtcccagaagcccacgtggatgggaccaagagccagcaagagagcaagccggaggcggatggagagcgcgcagacccagggcaagaagcgtggatgcgctggatgaccttacaccaccttctactgctgagtctggttccaggagccctacaagcaacggtggaaggagtagagcctatatgcctccgcgctctagatctcgcgacgacctgtatgatcaggatgactcccgcgactttccgcgctctagggatccccactatgatgactttcggagtcgcgagcgcccgccagctgatcctcgttcacaccatcatagaactagagaccctcgagacaacgggagtaggtctggtgatctcccatacgacggtcggctccttgaagaggccgtacggaaaaagggcagcgaagagaggcgacgaccccacaaagaagaagaagaagaagcctattaccccccagccccgcccccctattccgaaaccgactctcaggcatcgcgcgagagacgtttaaagaagaatttagcactgagcagagaatcccttgttgtctag

SEQ ID NO: 93501 - DNA, 2480 bp, Artificial Sequence
  derived and/or modified sequence
agactcgctcctcccggcagggcgcacctaggcgggtccatcgccagccggggagaggggtttgggcagggagggaacaggtgcgcggcgggacccgccctatctcaacaggtgaatcgctccaagtgggtctcggttgcatggatctcggtgcgcttggtttggccggagcagatgggggccggaagggacctgtggtccgcaggcgccctcccagcgggccagtcacttggttcgggccctgggggacggagcgcacctgggtcagcccacttccggggagggaggcagaggaacccctccccgccgctcacccctaagcccagccctcggctcccacccttgtgtacctgggccgaaccattcaccggagcgcgcagcgggtggagtgtggctcggaggaccgcggcgggtcaagcacctttctcccccatatctgaaagcatgccctttgtccacgtcgtttacgctcattaaaacttccagaatgcaacaggacggacttggagtagggacaaggaacggaagtgggaaggggaggagcgtgcacccctcctggccttggtgcgcgccgcgccccctaaggtactttggaagggacgcgcgggccagacgcgcccagacggccgcgatggcgctgttggccggcgggctctccagagggctgggctcccacccggccgccgcaggccgggacgcggtcgtcttcgtgtggcttctgcttagcacctggtgcacagctcctgccagggccatccaggtgaccgtgtccaacccctaccacgtggtgatcctcttccagcctgtgaccctgccctgtacctaccagatgacctcgacccccacgcaacccatcgtcatctggaagtacaagtctttctgccgggaccgcatcgccgatgccttctccccggccagcgtcgacaaccagctcaatgcccagctggcagccgggaacccaggctacaacccctacgttgagtgccaggacagcgtgcgcaccgtcagggtcgtggccaccaagcagggcaacgctgtgaccctgggagattactaccagggccggaggattaccatcaccggaaatgctgacctgacctttgaccagacggcgtggggggacagtggtgtgtattactgctccgtggtctcagcccaggacctccaggggaacaatgaggcctacgcagagctcatcgtccttgactggctcttcgtggttgtggtatgcctggctgccttcctcatcttcctcctcctgggcatctgctggtgccagtgctgcccgcacacttgctgctgctacgtcaggtgcccctgctgcccagacaagtgctgctgccccgaggccctgtatgccgccggcaaagcagccacctcaggtgttcccagcatttatgcccccagcacctatgcccacctgtctcccgccaagaccccacccccaccagctatgattcccatgggccctgcctacaacgggtaccctggaggataccctggagacgttgacaggagtagctcagctggtggccaaggctcctatgtacccctgcttcgggacacggacagcagtgtggcctctgtccgcagtggctacaggattcaggccagccagcaggacgactccatgcgggtcctgtactacatggagaaggagctggccaacttcgacccttctcgacctggcccccccagtggccgtgtggagcgggccatgagtgaagtcacctccctccacgaggacgactggcgatctcggccttcccggggccctgccctcaccccgatccgggatgaggagtggggtggccactccccccggagtcccaggggatgggaccaggagcccgccagggagcaggcaggcgggggctggcgggccaggcggccccgggcccgctccgtggacgccctggacgacctcaccccgccgagcaccgccgagtcagggagcaggtctcccacgagtaatggtgggagaagccgggcctacatgcccccgcggagccgcagccgggacgacctctatgaccaagacgactcgagggacttcccacgctcccgggacccccactacgacgacttcaggtctcgggagcgccctcctgccgaccccaggtcccaccaccaccgtacccgggaccctcgggacaacggctccaggtccggggacctcccctatgatgggcggctactggaggaggctgtgaggaagaaggggtcggaggagaggaggagaccccacaaggaggaggaggaagaggcctactacccgcccgcgccgcccccgtactcggagaccgactcgcaggcgtcccgagagcgcaggctcaagaagaacttggccctgagtcgggaaagtttagtcgtctgatctgacgttttctacgtagcttttgtatttttttttttaatttgaaggaacactgatgaagccctgccatacccctcccgagtctaataaaacgtataatcac

SEQ ID NO: 93502 - DNA, 1890 bp, Artificial Sequence
  derived and/or modified sequence
atgcagcaggacggcctgggcgtgggcaccagaaacggcagcggcaagggcagaagcgtgcaccccagctggccctggtgcgcccccagacccctgagatacttcggcagagacgccagagccagaagagcccagaccgccgccatggccctgctggccggcggcctgagcagaggcctgggcagccaccccgccgccgccggcagagacgccgtggtgttcgtgtggctgctgctgagcacctggtgcaccgcccccgccagagccatccaggtgaccgtgagcaacccctaccacgtggtgatcctgttccagcccgtgaccctgccctgcacctaccagatgaccagcacccccacccagcccatcgtgatctggaagtacaagagcttctgcagagacagaatcgccgacgccttcagccccgccagcgtggacaaccagctgaacgcccagctggccgccggcaaccccggctacaacccctacgtggagtgccaggacagcgtgagaaccgtgagagtggtggccaccaagcagggcaacgccgtgaccctgggcgactactaccagggcagaagaatcaccatcaccggcaacgccgacctgaccttcgaccagaccgcctggggcgacagcggcgtgtactactgcagcgtggtgagcgcccaggacctgcagggcaacaacgaggcctacgccgagctgatcgtgctggactggctgttcgtggtggtggtgtgcctggccgccttcctgatcttcctgctgctgggcatctgctggtgccagtgctgcccccacacctgctgctgctacgtgagatgcccctgctgccccgacaagtgctgctgccccgaggccctgtacgccgccggcaaggccgccaccagcggcgtgcccagcatctacgcccccagcacctacgcccacctgagccccgccaagaccccccccccccccgccatgatccccatgggccccgcctacaacggctaccccggcggctaccccggcgacgtggacagaagcagcagcgccggcggccagggcagctacgtgcccctgctgagagacaccgacagcagcgtggccagcgtgagaagcggctacagaatccaggccagccagcaggacgacagcatgagagtgctgtactacatggagaaggagctggccaacttcgaccccagcagacccggcccccccagcggcagagtggagagagccatgagcgaggtgaccagcctgcacgaggacgactggagaagcagacccagcagaggccccgccctgacccccatcagagacgaggagtggggcggccacagccccagaagccccagaggctgggaccaggagcccgccagagagcaggccggcggcggctggagagccagaagacccagagccagaagcgtggacgccctggacgacctgaccccccccagcaccgccgagagcggcagcagaagccccaccagcaacggcggcagaagcagagcctacatgccccccagaagcagaagcagagacgacctgtacgaccaggacgacagcagagacttccccagaagcagagacccccactacgacgacttcagaagcagagagagaccccccgccgaccccagaagccaccaccacagaaccagagaccccagagacaacggcagcagaagcggcgacctgccctacgacggcagactgctggaggaggccgtgagaaagaagggcagcgaggagagaagaagaccccacaaggaggaggaggaggaggcctactacccccccgccccccccccctacagcgagaccgacagccaggccagcagagagagaagactgaagaagaacctggccctgagcagagagagcctggtggtgtag

SEQ ID NO: 93503 - DNA, 1890 bp, Artificial Sequence
  derived and/or modified sequence
atgcaacaagatggattgggcgttggtactagaaatggttcaggtaagggcagatcagttcaccccagctggccttggtgcgctcccagacctctgcgatacttcgggcgcgacgcccgcgcacgaagggctcagacggccgccatggccttacttgccggcggtctttctcgtggtcttggatcacatcccgccgcagccggccgggacgcagtagtttttgtctggctactgctgtccacctggtgtaccgcccccgcccgggccatccaggtgaccgtgagcaatccctaccacgttgttatcctgtttcagccagttacgctcccttgcacataccagatgacatccactcccacgcagcccatcgtcatctggaagtacaagagtttttgcagagatcgaattgctgacgcattctcacctgcgtccgtggacaatcaactgaatgcccagttggcagccggaaaccccggatacaatccgtatgtcgagtgccaggacagcgtcaggactgtccgggttgtcgccaccaaacagggaaacgccgttaccctgggcgactactaccagggtagacgaattactataaccggaaacgcagatcttacgttcgatcagaccgcgtggggagattctggagtctactattgcagcgtggtgagcgcgcaggaccttcaggggaataacgaggcttacgccgagctcattgtgctagattggcttttcgtggttgttgtgtgcctggcagcattcttaatcttccttctgctgggcatatgttggtgtcagtgttgcccccacacttgttgttgctacgttcgctgtccgtgctgccccgataaatgttgttgcccggaggccttatatgcagccggaaaagccgcgacatctggcgtcccatcgatttacgccccatctacatacgctcaccttagccccgcgaaaactccgccacccccagctatgattcctatgggacctgcttataacggctatcccggcgggtacccaggcgatgtcgaccggagctcctccgctggcggacaaggatcttacgtgcctctcctcagggatacagattccagtgtggcatcagtgcggagcgggtacagaattcaggcttcccagcaggacgactctatgcgggtgctgtactatatggaaaaggaactcgcgaactttgacccttcacgccccggacccccctcaggaagagtggagagggctatgagtgaggttacgtctctacacgaagatgactggcgatcgaggccctcccgtgggccagccttaactcctatccgagatgaggaatggggggggcacagccccagatcaccacggggctgggatcaggagccagcgcgtgagcaggccggcggtgggtggcgtgctcgcagaccgagggcccggtcagtggacgcgctagatgatcttacccccccctccacagccgaatctggtagccggtctccgacctctaacggtggcaggtcgagagcatatatgccgccacgatctcggagccgggacgatttgtacgaccaggatgactcccgggattttcctcggtctcgcgacccacattacgacgattttagaagccgtgaaagaccaccggccgacccccggtctcatcatcataggactagggatcccagggataatggatctaggagcggcgatttgccgtatgatgggaggctgctggaggaggccgtacgcaaaaagggcagcgaggagcggcgtaggccccacaaggaggaggaggaagaagcatactaccccccagcacctccaccttatagtgaaacggattcacaggcctccagggagcgcaggttgaagaagaatctggccctgagcagggagtctttagtggtgtag

SEQ ID NO: 93504 - DNA, 1890 bp, Artificial Sequence
  derived and/or modified sequence
atgcagcaggacggcctgggcgtgggcaccagaaatggcagcggcaagggccgctctgtgcaccccagctggccctggtgtgccccccggcccctgcgctacttcggcagagatgcccgggcccggcgggcccagacagctgccatggccctgctggccggcggcctgagccggggcctgggcagccaccctgctgctgctggaagagatgctgtggtgtttgtgtggctgctgctgagcacctggtgcacagccccagcccgggccatccaggtgacagtgagcaacccctaccacgtggtgatcctcttccagcctgtgaccctgccctgcacctaccagatgaccagcacccccacccagcccatcgtcatctggaagtacaagagcttctgccgggacagaattgctgatgccttcagccctgcctctgtggacaaccagctgaatgcccagctggccgccggcaaccctggctacaacccctacgtggagtgccaggacagcgtgaggacagtgcgggtggtggccaccaagcagggcaatgctgtgaccctgggggactactaccagggccgccgcatcaccatcactggaaatgctgacctgacctttgaccagacagcctggggagacagcggcgtgtactactgcagcgtggtgtctgcccaggacctgcagggcaacaatgaggcctatgcagagctgattgtgctggactggctgtttgtggtggtggtgtgcctggccgccttcctgatcttcctgctgctgggcatctgctggtgccagtgctgcccccacacctgctgctgctacgtgcgctgcccctgctgcccagacaagtgctgctgcccagaggccctgtatgctgctgggaaggccgccaccagcggcgtgcccagcatctatgcccccagcacctacgcccacctgagccctgccaagaccccacctcctccagccatgatccccatgggccctgcctacaacggctacccaggcggctacccaggagatgtggacaggagcagcagcgctgggggccagggcagctatgtgcccctgctgcgggacacagacagctctgtggcctctgtgcgcagcggctaccgcatccaggccagccagcaggatgacagcatgagggtgctgtactacatggagaaggagctggccaactttgaccccagccggcccggcccccccagcggccgggtggagcgggccatgtctgaggtgaccagcctgcatgaagatgactggaggagccggcccagccggggccctgccctgacccccatcagagatgaggagtggggcggccacagccccaggagcccccggggctgggaccaggagcccgcccgggagcaggccggcggcggctggagggcccggcggccccgggcccggtctgtggatgccctggatgacctgaccccacccagcacagctgagagcggcagccgcagccccaccagcaatggaggccgcagccgggcctacatgccacccaggagccgcagcagagatgacctgtatgaccaggatgacagccgggacttccccaggagccgggacccccactatgatgacttccgcagccgggagcggcccccagctgaccccaggagccaccaccacaggacccgggacccccgggacaatggcagccgcagcggggacctgccctatgatggccgcctgctggaggaggccgtgaggaagaagggcagcgaggagcggcggcggccccacaaggaggaggaggaggaggcctactaccccccagcccccccaccctacagcgagacagacagccaggccagccgggagcggcggctgaagaagaacctggccctgagccgggagagcctggtggtgtag

SEQ ID NO: 93505 - RNA, 1890 nt, Artificial Sequence
  derived and/or modified sequence
augcaacaggauggcuuaggagugggcacucgcaacgguucagguaagggacggucuguacaccccucuuggccguggugcgccccaaggccccugcguuauuuuggcagggacgcacgggcacgccgugcccagaccgccgccauggcccuacucgcuggaggccugagcagaggucuggguucccaccccgccgcagccgguagagacgcaguagucuucguaugguuacugcuguccaccuggugcaccgcacccgccagggcgauccaggucacaguaucaaacccauaucauguggugauacuguuccaaccaguaacacugccauguacuuaucagaugacuuccacgcccacgcagcccaucgugaucuggaaauauaagucauucugccgagaucgaauagccgaugccuuuuccccagccuccguggauaaccaacuuaacgcccaacucgcagcugggaauccaggguauaaucccuacgucgagugucaggauucaguucggacugugcgcgucguggccacuaagcaggggaaugccgugacgcugggagacuauuaccagggucgacgcauuacaaucacagguaaugccgacuuaacauucgaccagaccgcuuggggggacagcggagucuacuauuguucugucgugagugcacaggaucuacaggguaacaacgaggcauaugcggagcugauuguccuggacuggcuguuuguuguuguggugugucucgcugcauuucugauauuccuauugcuggguaucuguuggugccaguguugcccucauaccugcuguuguuacgugcgcugcccauguugccccgacaaguguugcugcccagaagcucucuacgcagcuggcaaagcugcgaccaguggcgugcccagcauuuaugccccuucaacuuacgcgcaucuaagucccgccaagaccccacccccccccgcaaugaucccuaugggccccgcuuauaacggcuauccaggcggauaucccggggacguggaucggucaagcagcgcugggggccaggguuccuauguaccguuacuuagagacacugacucuucugucgcgagcguccgcucugguuaucgcauacaagccagucaacaggaugauucuaugcgggugcucuauuauauggaaaaggaauuggccaauuucgacccaagccggccuggcccaccaagcggucgcguggagcgagcuaugucagaagugacuucccugcacgaggaugacuggcggagcagaccaucucggggaccggcccucacucccauccgggacgaagaguggggggggcacagcccgcgcucacccagaggaugggaucaggagcccgccagagagcaggcaggcggaggcuggcgcgcuagacgaccuagagcucgguccgucgacgccuuggaugaccugaccccuccuagcacagcagaaagcggaucaagaaguccuaccucaaacggcggccgaagcagagccuacaugcccccccgcagccggucaagggaugaccuguacgaccaagaugacucuagggacuucccucggucacgugauccccauuacgacgauuuuagauccagggagagaccacccgccgacccucggagccaucaccaccgcacccgcgauccaagagauaaugggagcaggagcggagaccugcccuacgacggacguuuacuggaagaagcugugcggaagaagggaagcgaggagcgaagaaggccacacaaggaggaagaagaagaggcauacuaccccccugcccccccccccuauucggagaccgauucccaagcaucccgugaacgccgauugaaaaaaaaccucgcuuuguccagggaaucucuaguggucuag

SEQ ID NO: 93506 - RNA, 1890 nt, Artificial Sequence
  derived and/or modified sequence
augcaacaagacggccucggaguagggacacgaaacgguucgggaaaaggacgcucuguucaucccuccuggcccuggugugccccucggccgcugcgcuauuuuggaagagaugcgcgcgcuaggagagcccaaacagccgcgauggccuuacuggcaggaggccucucccggggucuugggucccaccccgcagccgcaggccgagaugcugugguguuuguuuggcuguugcugucuacuugguguacugccccagcaagagcgauucaggucacaguuucuaauccguaccacgugguuauucuuuuccagccugugacccuaccguguaccuaccaaaugaccucuacgcccacacaacccauugucaucuggaaauauaaaaguuucugucgcgauagaaucgccgaugcuuucagccccgcauccguggacaaucaguuaaaugcccaguuagcugcugggaauccuggguacaaccccuacguggagugucaagauagcguaagaacagugagaguuguggcaaccaaacaagggaacgcagugacccucggcgacuacuaccaggggagacgaaucaccauuacuggcaaugcagaucugaccuucgaucaaaccgcguggggugacuccggcguuuacuauugcucugucgucuccgcucaggaccuucagggaaacaacgaagccuaugcagaacugauuguucucgacugguuguuuguggugguggugugccuggcugccuuccucauuuucuugcugcucgggaucuguuggugucaguguuguccucacacaugcuguuguuacguacgcugcccuuguugcccggauaaaugcugcugccccgaagcccuauacgcggcaggcaaggcugcgacaucuggagugccgucuaucuaugcaccaaguacauacgcacaccuuagcccagcuaagacuccuccuccccccgcuaugauaccaaugggcccagccuauaacggauaccccggcggcuacccuggagacgucgaucgcaguuccuccgcuggaggccaggguaguuacgucccccuucucagagauaccgacagcucuguugcuucaguccgcaguggguaccgcauccaagccagccagcaggaugacuccaugcgugucuuguauuacauggaaaaagagcucgcaaauuucgacccaucccguccaggacccccauccggacggguggagagagcaaugucagaggucacaagucugcacgaagaugacuggagauccagaccuucuagaggccccgcacugacaccgauccgcgacgaagaauggggagggcacagucccagaagcccacguggaugggaccaagagccagcaagagagcaagccggaggcggauggagagcgcgcagacccagggcaagaagcguggaugcgcuggaugaccuuacaccaccuucuacugcugagucugguuccaggagcccuacaagcaacgguggaaggaguagagccuauaugccuccgcgcucuagaucucgcgacgaccuguaugaucaggaugacucccgcgacuuuccgcgcucuagggauccccacuaugaugacuuucggagucgcgagcgcccgccagcugauccucguucacaccaucauagaacuagagacccucgagacaacgggaguaggucuggugaucucccauacgacggucggcuccuugaagaggccguacggaaaaagggcagcgaagagaggcgacgaccccacaaagaagaagaagaagaagccuauuaccccccagccccgccccccuauuccgaaaccgacucucaggcaucgcgcgagagacguuuaaagaagaauuuagcacugagcagagaaucccuuguugucuag

SEQ ID NO: 93507 - protein, 493 aa, Artificial Sequence
  derived and/or modified sequence
MALLAGGLSRGLGSHPAAAGRDAVVFVWLLLSTWCTAPARAIQVTVSNPYHVVILFQPVTLPCTYQMTSTPTQPIVIWKYKSFCRDRIADAFSPASVDNQLNAQLAAGNPGYNPYVECQDSVRTVRVVATKQGNAVTLGDYYQGRRITITGMYAAGKAATSGVPSIYAPSTYAHLSPAKTPPPPAMIPMGPAYNGYPGGYPGDVDRSSSAGGQGSYVPLLRDTDSSVASEVRSGYRIQASQQDDSMRVLYYMEKELANFDPSRPGPPSGRVERAMSEVTSLHEDDWRSRPSRGPALTPIRDEEWGGHSPRSPRGWDQEPAREQAGGGWRARRPRARSVDALDDLTPPSTAESGSRSPTSNGGRSRAYMPPRSRSRDDLYDQDDSRDFPRSRDPHYDDFRSRERPPADPRSHHHRTRDPRDNGSRSGDLPYDGRLLEEAVRKKGSEERRRPHKEEEEEAYYPPAPPPYSETDSQASRERRLKKNLALSRESLVV

SEQ ID NO: 93508 - DNA, 1482 bp, Artificial Sequence
  derived and/or modified sequence
atggccctcctagcagggggactgtccagagggctcgggtcccaccctgccgctgccggaagggacgctgtagtttttgtatggttattgctgagcacctggtgcactgcacctgcccgagctattcaagtgaccgtgtcaaacccctatcatgtagtcattctgtttcagccggtgaccttgccctgtacgtaccagatgacatccactcccactcagccaattgtgatatggaagtataagagcttttgccgggatcgcattgctgacgcgttctctcctgcaagtgtggacaatcagctgaacgcgcaattggccgctggtaacccgggttacaacccgtatgtggagtgccaggatagcgttcgtaccgtccgcgtggtggctacaaaacagggtaatgccgtaacactcggcgattactatcaagggagacgtatcactataacaggcatgtatgccgcaggaaaagccgctacatctggagtccctagcatctacgctccctccacttacgcccatctcagtcccgcaaaaactcccccaccacctgccatgatccctatgggacccgcatacaacggataccccggtggctacccaggtgatgtcgaccggtcatcctctgccggtggccagggcagttatgtccctctgctcagagatacggattcctccgtggcttctgaggtacgtagtgggtaccgcattcaggcttcccagcaggatgactctatgcgggtcctctattacatggaaaaggagttagcaaattttgatccatcaaggccagggccaccctctggtagggttgagcgtgccatgtctgaggttacctccttacatgaagacgactggagatcacgaccatcaagggggcctgcccttacacctattagggacgaggagtgggggggtcacagccctcgatcccctcgaggctgggaccaggaacccgctcgcgagcaggccggaggaggatggcgggctaggcgcccaagagcaaggtctgtggacgctttagatgatttgactcccccttccacagcagaatctggcagtcgaagccctaccagcaatggcggaagaagtagagcttatatgccacctcggagccgtagtcgagatgacctctacgatcaggacgatagtcgcgacttcccgaggtctcgagacccacactatgatgactttagaagcagagagagaccgccagcggatcctcggtcacaccatcatcggacaagggaccctagggacaatggaagccgaagcggtgacctgccgtacgatggaagactcctggaggaagccgttcgaaaaaaggggagcgaggaacggcgacgccctcataaagaggaagaggaggaggcttactatccccctgcccctcccccatactccgaaacagactcccaggcctctcgcgaacggaggttgaagaagaatctcgccctttctcgcgaaagtctagttgtctag

SEQ ID NO: 93509 - DNA, 1606 bp, Artificial Sequence
  derived and/or modified sequence
agacgcgcccagacggccgcgatggcgctgttggccggcgggctctccagagggctgggctcccacccggccgccgcaggccgggacgcggtcgtcttcgtgtggcttctgcttagcacctggtgcacagctcctgccagggccatccaggtgaccgtgtccaacccctaccacgtggtgatcctcttccagcctgtgaccctgccctgtacctaccagatgacctcgacccccacgcaacccatcgtcatctggaagtacaagtctttctgccgggaccgcatcgccgatgccttctccccggccagcgtcgacaaccagctcaatgcccagctggcagccgggaacccaggctacaacccctacgttgagtgccaggacagcgtgcgcaccgtcagggtcgtggccaccaagcagggcaacgctgtgaccctgggagattactaccagggccggaggattaccatcaccggaatgtatgccgccggcaaagcagccacctcaggtgttcccagcatttatgcccccagcacctatgcccacctgtctcccgccaagaccccacccccaccagctatgattcccatgggccctgcctacaacgggtaccctggaggataccctggagacgttgacaggagtagctcagctggtggccaaggctcctatgtacccctgcttcgggacacggacagcagtgtggcctctgaagtccgcagtggctacaggattcaggccagccagcaggacgactccatgcgggtcctgtactacatggagaaggagctggccaacttcgacccttctcgacctggcccccccagtggccgtgtggagcgggccatgagtgaagtcacctccctccacgaggacgactggcgatctcggccttcccggggccctgccctcaccccgatccgggatgaggagtggggtggccactccccccggagtcccaggggatgggaccaggagcccgccagggagcaggcaggcgggggctggcgggccaggcggccccgggcccgctccgtggacgccctggacgacctcaccccgccgagcaccgccgagtcagggagcaggtctcccacgagtaatggtgggagaagccgggcctacatgcccccgcggagccgcagccgggacgacctctatgaccaagacgactcgagggacttcccacgctcccgggacccccactacgacgacttcaggtctcgggagcgccctcctgccgaccccaggtcccaccaccaccgtacccgggaccctcgggacaacggctccaggtccggggacctcccctatgatgggcggctactggaggaggctgtgaggaagaaggggtcggaggagaggaggagaccccacaaggaggaggaggaagaggcctactacccgcccgcgccgcccccgtactcggagaccgactcgcaggcgtcccgagagcgcaggctcaagaagaacttggccctgagtcgggaaagtttagtcgtctgatctgacgttttctacgtagcttttgtatttttttttttaatttgaaggaacactgatgaagccctgccatacccctcccgagtctaataaaacgtataatcac

SEQ ID NO: 93510 - DNA, 1482 bp, Artificial Sequence
  derived and/or modified sequence
atggccctcctcgcagggggattatctagggggctgggatcccaccccgcagccgcaggaagggacgcagtcgttttcgtgtggctcctgctttctacgtggtgtactgctccagcccgtgccattcaggtcactgtttctaatccctaccacgtggtcatactcttccagccagttacactaccttgcacctaccagatgacatctacccccactcagcctattgtgatttggaagtacaaatctttttgccgggaccgtatcgctgatgccttctcacccgccagcgtggacaatcagctcaacgcccagctggctgccggtaacccaggatataacccatatgtggaatgccaggatagcgtgcgcacagtcagagtggtcgccactaagcaggggaacgccgtaactcttggggattattatcagggaaggcgcataaccatcacaggcatgtacgctgctgggaaggccgcgacatctggcgtgccctccatctatgcaccaagcacttatgctcatctgagtcccgctaaaactcccccccccccagcaatgattccgatggggcccgcctataacggctatcctggtgggtatcccggggatgtggacagatccagtagcgccggcggacagggctcgtatgttcccttattacgagacacggattccagcgttgcctccgaggtgcgatctggctacagaattcaggctagccaacaggacgactccatgagagtattgtattatatggaaaaggagctcgctaatttcgaccccagtcggcctggccctccatccggcagagtggaaagagccatgtctgaggtaaccagcttacacgaggatgactggcgctccagaccttctcggggccccgctctgacaccaatcagagatgaagagtgggggggccattcaccgcgcagcccgcgggggtgggaccaggagcccgcacgagagcaggcgggcgggggttggagggcaagacgcccccgagccagatccgtggacgctctggatgacttaaccccaccttctactgccgaatctggcagccgctctccgaccagcaacggtggccgaagcagagcctatatgcccccaagatcacgctcaagggatgacctgtatgatcaggatgattctcgtgacttccctaggtcaagggacccacactacgatgatttcagatccagagaacgccccccagcggaccccagatctcatcaccatcggaccagagatccaagagacaatggctcaagatctggtgatctgccatatgacggacgccttttggaagaagccgtccgaaaaaaggggtcagaggaaagaaggcggccccataaagaagaggaggaagaggcctactacccacccgctccgcccccatactcagagaccgatagtcaggccagcagagagcggaggttaaagaagaacctagccctgagtagagagtccctggttgtgtag

SEQ ID NO: 93511 - DNA, 1482 bp, Artificial Sequence
  derived and/or modified sequence
atggccctgctggccggtggactgtccagaggattggggtcccatccagctgccgccggccgtgatgcagttgttttcgtgtggctgctgctctctacttggtgcaccgcccccgctcgggctatccaggtcactgtttctaatccatatcacgtcgttatactctttcaacctgtgacacttccctgtacttatcagatgacctcaaccccaacccagcccatcgtgatttggaagtacaagtctttctgccgcgataggatcgccgatgccttctcgccagcctccgtggataaccagcttaacgcacagctcgcagccggtaatccaggctacaacccctatgtggagtgccaagacagcgtcaggacagtcagagtcgttgcaactaagcagggtaatgccgtaactctgggagactattatcagggccgccggatcactatcacaggcatgtacgcagccggtaaggccgcaacaagcggggtgccctccatttacgcacccagtacgtatgcccacctctccccagccaaaacccccccccctccagccatgatccctatgggacctgcatacaacggttatcctggaggttaccccggcgatgtagatcgctcgagtagcgctggtggtcaaggctcatatgtacctctgctgcgggacacagactcgagcgtggcctccgaagtacgcagcggataccgaatacaagctagtcagcaagatgattctatgcgcgtgttatactatatggaaaaagaactggccaacttcgatccatcaagacccggccccccatccggacgcgtcgaacgcgctatgagcgaggtgacttcactgcacgaggacgattggagatccagaccaagccgaggacccgctctgaccccaatccgtgacgaggaatggggaggtcacagtcctagaagcccacggggctgggaccaggaaccagcccgagaacaggctggaggagggtggcgcgccagacgcccccgcgctagatctgtagatgccctggatgatcttaccccgcccagtacagctgagtctggatccagatcgccgacctccaatggaggccggtctcgtgcctatatgccaccacgctcacggtcaagggatgacctgtacgatcaagacgatagcagagattttcctaggtctcgcgatcctcactacgatgatttccgctcccgtgagcgacccccggcagacccccgctcccaccatcaccggactagggatcctagagataacggcagcagatcaggagacttaccatatgatggaaggctgctcgaggaagcagttaggaaaaagggatcagaagagcgtcgaaggccccacaaagaggaggaggaagaagcgtactatccacctgccccaccaccatacagcgagacagatagccaggcctcaagagaaagaaggctcaagaagaaccttgcactgagtcgggagtccttagtggtgtag

SEQ ID NO: 93512 - DNA, 1482 bp, Artificial Sequence
  derived and/or modified sequence
atggccctgctggccggcggcctgagcagaggcctgggcagccaccccgccgccgccggcagagacgccgtggtgttcgtgtggctgctgctgagcacctggtgcaccgcccccgccagagccatccaggtgaccgtgagcaacccctaccacgtggtgatcctgttccagcccgtgaccctgccctgcacctaccagatgaccagcacccccacccagcccatcgtgatctggaagtacaagagcttctgcagagacagaatcgccgacgccttcagccccgccagcgtggacaaccagctgaacgcccagctggccgccggcaaccccggctacaacccctacgtggagtgccaggacagcgtgagaaccgtgagagtggtggccaccaagcagggcaacgccgtgaccctgggcgactactaccagggcagaagaatcaccatcaccggcatgtacgccgccggcaaggccgccaccagcggcgtgcccagcatctacgcccccagcacctacgcccacctgagccccgccaagaccccccccccccccgccatgatccccatgggccccgcctacaacggctaccccggcggctaccccggcgacgtggacagaagcagcagcgccggcggccagggcagctacgtgcccctgctgagagacaccgacagcagcgtggccagcgaggtgagaagcggctacagaatccaggccagccagcaggacgacagcatgagagtgctgtactacatggagaaggagctggccaacttcgaccccagcagacccggcccccccagcggcagagtggagagagccatgagcgaggtgaccagcctgcacgaggacgactggagaagcagacccagcagaggccccgccctgacccccatcagagacgaggagtggggcggccacagccccagaagccccagaggctgggaccaggagcccgccagagagcaggccggcggcggctggagagccagaagacccagagccagaagcgtggacgccctggacgacctgaccccccccagcaccgccgagagcggcagcagaagccccaccagcaacggcggcagaagcagagcctacatgccccccagaagcagaagcagagacgacctgtacgaccaggacgacagcagagacttccccagaagcagagacccccactacgacgacttcagaagcagagagagaccccccgccgaccccagaagccaccaccacagaaccagagaccccagagacaacggcagcagaagcggcgacctgccctacgacggcagactgctggaggaggccgtgagaaagaagggcagcgaggagagaagaagaccccacaaggaggaggaggaggaggcctactacccccccgccccccccccctacagcgagaccgacagccaggccagcagagagagaagactgaagaagaacctggccctgagcagagagagcctggtggtgtag

SEQ ID NO: 93513 - DNA, 1482 bp, Artificial Sequence
  derived and/or modified sequence
atggctctcttggcaggaggtctgtctaggggattgggttcccacccagcagcggccggacgcgatgccgtagttttcgtgtggttattgctaagtacttggtgtacagccccagcaagagctatccaggttaccgtctcgaacccttaccatgtagttattctctttcagcccgtcactctgccgtgcacctatcagatgacgtctacacctacacaacccattgtgatctggaaatacaagtcattctgcagagatagaatcgccgatgctttcagcccagctagtgtcgacaatcagctcaacgctcagctagcagccggaaatcccgggtataacccctacgtggaatgtcaggatagtgtgcgaactgtgagagtggtcgctaccaagcagggaaatgctgtgaccctgggagattattaccagggccgaaggatcactataaccggtatgtacgcagctggcaaagccgcaacatcgggagtgccctccatctacgccccctcaacgtatgcacacctgagtcccgcgaagacacctccccctcctgcaatgatcccaatgggccctgcctacaacgggtatcccggaggctacccaggtgacgtggaccgctcgagtagcgctggggggcagggttcttacgtccccctgcttagagataccgacagttctgtcgccagcgaagtccgaagcggctaccgaattcaggcctcccagcaggacgacagcatgagagtactctattacatggagaaagagctagctaattttgatcctagtaggccagggcccccctctggtcgtgtcgaacgggccatgagcgaggtcaccagtctccatgaggacgattggcgttccaggcctagccgcggcccagcacttacaccaatcagggacgaggagtggggcgggcactccccgaggtcgccacggggatgggatcaggagcccgcaagagagcaggcgggtggagggtggagggctcgtcggcctagggcgcggagcgtggatgctttggatgatctaaccccacctagtacagctgaatccggatctcggagtccaacttcaaacggcggtcgctcgagggcctacatgcctccaaggagccggtcccgagacgacttgtatgatcaggatgactccagagacttcccccgaagtagggacccccattacgatgatttcaggagtcgcgagcggccaccggcggacccccgctcccatcatcaccggacacgagaccctagagataatggatcccgtagtggcgacctgccatacgacggcagactgctcgaggaggctgttaggaaaaagggatcagaagaaagacggaggccgcacaaagaagaggaggaggaggcctactatccaccggctccgcctccctacagtgagaccgattctcaggctagcagagagagacgactgaagaagaatctggcactttcgcgcgaaagcttggtggtatag

SEQ ID NO: 93514 - DNA, 1482 bp, Artificial Sequence
  derived and/or modified sequence
atggccctgctggccggcggcctgagccggggcctgggcagccaccctgctgctgctggaagagatgctgtggtgtttgtgtggctgctgctgagcacctggtgcacagccccagcccgggccatccaggtgacagtgagcaacccctaccacgtggtgatcctcttccagcctgtgaccctgccctgcacctaccagatgaccagcacccccacccagcccatcgtcatctggaagtacaagagcttctgccgggacagaattgctgatgccttcagccctgcctctgtggacaaccagctgaatgcccagctggccgccggcaaccctggctacaacccctacgtggagtgccaggacagcgtgaggacagtgcgggtggtggccaccaagcagggcaatgctgtgaccctgggggactactaccagggccgccgcatcaccatcaccggcatgtatgctgctgggaaggccgccaccagcggcgtgcccagcatctatgcccccagcacctacgcccacctgagccctgccaagaccccacctcctccagccatgatccccatgggccctgcctacaacggctacccaggcggctacccaggagatgtggacaggagcagcagcgctgggggccagggcagctatgtgcccctgctgcgggacacagacagctctgtggccagcgaggtgcgcagcggctaccgcatccaggccagccagcaggatgacagcatgagggtgctgtactacatggagaaggagctggccaactttgaccccagccggcccggcccccccagcggccgggtggagcgggccatgtctgaggtgaccagcctgcatgaagatgactggaggagccggcccagccggggccctgccctgacccccatcagagatgaggagtggggcggccacagccccaggagcccccggggctgggaccaggagcccgcccgggagcaggccggcggcggctggagggcccggcggccccgggcccggtctgtggatgccctggatgacctgaccccacccagcacagctgagagcggcagccgcagccccaccagcaatggaggccgcagccgggcctacatgccacccaggagccgcagcagagatgacctgtatgaccaggatgacagccgggacttccccaggagccgggacccccactatgatgacttccgcagccgggagcggcccccagctgaccccaggagccaccaccacaggacccgggacccccgggacaatggcagccgcagcggggacctgccctatgatggccgcctgctggaggaggccgtgaggaagaagggcagcgaggagcggcggcggccccacaaggaggaggaggaggaggcctactaccccccagcccccccaccctacagcgagacagacagccaggccagccgggagcggcggctgaagaagaacctggccctgagccgggagagcctggtggtgtag

SEQ ID NO: 93515 - DNA, 1482 bp, Artificial Sequence
  derived and/or modified sequence
atggccctgctggccggcggcctgagccggggcctgggcagccaccctgcggccgctggccgagatgccgtcgttttcgtatggttactgttgagtacttggtgcactgcccccgctcgggctatccaggtcactgtgagcaacccctaccacgtggtgatactttttcagcccgtgactcttccttgcacatatcaaatgacctctacccccacacagcctatcgtgatttggaagtacaagagcttctgtcgcgaccgaattgccgatgcattttcccctgcatcagtggacaatcagttaaatgcccaactggcggccgggaatcctggctacaacccctatgtcgagtgccaagattccgtaaggacagtaagggtggtggccaccaagcaagggaatgccgtgacactgggtgactattaccagggcagaaggatcaccatcactgggatgtacgcagctggaaaggcagcaacatccggagtgccttctatttacgccccttccacatacgcccatctttctccagctaaaacacctccccctcccgcaatgatccccatgggccctgcctacaatggttaccctgggggctatcctggcgacgtggatcgaagctctagcgctggggggcaagggtcatacgtccccttactgagggacacggattctagcgtggcatcagaggtgagaagcggctatcggatccaggcctcccagcaggacgattccatgcgggttctctattacatggaaaaggagttggccaattttgaccccagccgtccgggccccccttctgggcgggtcgaacgggccatgtcagaagtgacttccctccacgaagatgactggagatccagaccttccagagggccggctctgacacctatccgggatgaagagtggggtgggcactctccccgatctcctagggggtgggaccaggagccggcacgtgagcaagcagggggcgggtggcgagctcgccgcccaagggccaggagcgtggacgctctggacgatctgactccaccatccacagctgagtccggaagtagaagcccgaccagcaacggcggcagatcacgtgcctacatgcccccacgcagccgctctcgagacgatctgtatgaccaggatgacagtagggactttccaagaagtcgcgaccctcactatgacgacttccgctccagagagagaccccctgcggaccccagatcccatcaccatagaacccgagacccacgcgataatggatcccgcagcggagacttgccgtatgatggccgcctcctcgaggaggccgtgagaaaaaagggctcagaggagaggcggcggccccataaggaggaagaggaagaggcgtactacccacccgcaccccctccctacagtgagaccgactctcaagcctcccgcgaacggcgcctgaaaaaaaatttggcacttagtagggagagtctggtggtctag

SEQ ID NO: 93516 - RNA, 1482 nt, Artificial Sequence
  derived and/or modified sequence
auggcccuccucgcagggggauuaucuagggggcugggaucccaccccgcagccgcaggaagggacgcagucguuuucguguggcuccugcuuucuacgugguguacugcuccagcccgugccauucaggucacuguuucuaaucccuaccacguggucauacucuuccagccaguuacacuaccuugcaccuaccagaugacaucuacccccacucagccuauugugauuuggaaguacaaaucuuuuugccgggaccguaucgcugaugccuucucacccgccagcguggacaaucagcucaacgcccagcuggcugccgguaacccaggauauaacccauauguggaaugccaggauagcgugcgcacagucagaguggucgccacuaagcaggggaacgccguaacucuuggggauuauuaucagggaaggcgcauaaccaucacaggcauguacgcugcugggaaggccgcgacaucuggcgugcccuccaucuaugcaccaagcacuuaugcucaucugagucccgcuaaaacucccccccccccagcaaugauuccgauggggcccgccuauaacggcuauccugguggguaucccggggauguggacagauccaguagcgccggcggacagggcucguauguucccuuauuacgagacacggauuccagcguugccuccgaggugcgaucuggcuacagaauucaggcuagccaacaggacgacuccaugagaguauuguauuauauggaaaaggagcucgcuaauuucgaccccagucggccuggcccuccauccggcagaguggaaagagccaugucugagguaaccagcuuacacgaggaugacuggcgcuccagaccuucucggggccccgcucugacaccaaucagagaugaagagugggggggccauucaccgcgcagcccgcgggggugggaccaggagcccgcacgagagcaggcgggcggggguuggagggcaagacgcccccgagccagauccguggacgcucuggaugacuuaaccccaccuucuacugccgaaucuggcagccgcucuccgaccagcaacgguggccgaagcagagccuauaugcccccaagaucacgcucaagggaugaccuguaugaucaggaugauucucgugacuucccuaggucaagggacccacacuacgaugauuucagauccagagaacgccccccagcggaccccagaucucaucaccaucggaccagagauccaagagacaauggcucaagaucuggugaucugccauaugacggacgccuuuuggaagaagccguccgaaaaaaggggucagaggaaagaaggcggccccauaaagaagaggaggaagaggccuacuacccacccgcuccgcccccauacucagagaccgauagucaggccagcagagagcggagguuaaagaagaaccuagcccugaguagagagucccugguuguguag

SEQ ID NO: 93517 - RNA, 1482 nt, Artificial Sequence
  derived and/or modified sequence
auggcccugcuggccgguggacuguccagaggauuggggucccauccagcugccgccggccgugaugcaguuguuuucguguggcugcugcucucuacuuggugcaccgcccccgcucgggcuauccaggucacuguuucuaauccauaucacgucguuauacucuuucaaccugugacacuucccuguacuuaucagaugaccucaaccccaacccagcccaucgugauuuggaaguacaagucuuucugccgcgauaggaucgccgaugccuucucgccagccuccguggauaaccagcuuaacgcacagcucgcagccgguaauccaggcuacaaccccuauguggagugccaagacagcgucaggacagucagagucguugcaacuaagcaggguaaugccguaacucugggagacuauuaucagggccgccggaucacuaucacaggcauguacgcagccgguaaggccgcaacaagcggggugcccuccauuuacgcacccaguacguaugcccaccucuccccagccaaaaccccccccccuccagccaugaucccuaugggaccugcauacaacgguuauccuggagguuaccccggcgauguagaucgcucgaguagcgcugguggucaaggcucauauguaccucugcugcgggacacagacucgagcguggccuccgaaguacgcagcggauaccgaauacaagcuagucagcaagaugauucuaugcgcguguuauacuauauggaaaaagaacuggccaacuucgauccaucaagacccggccccccauccggacgcgucgaacgcgcuaugagcgaggugacuucacugcacgaggacgauuggagauccagaccaagccgaggacccgcucugaccccaauccgugacgaggaauggggaggucacaguccuagaagcccacggggcugggaccaggaaccagcccgagaacaggcuggaggaggguggcgcgccagacgcccccgcgcuagaucuguagaugcccuggaugaucuuaccccgcccaguacagcugagucuggauccagaucgccgaccuccaauggaggccggucucgugccuauaugccaccacgcucacggucaagggaugaccuguacgaucaagacgauagcagagauuuuccuaggucucgcgauccucacuacgaugauuuccgcucccgugagcgacccccggcagacccccgcucccaccaucaccggacuagggauccuagagauaacggcagcagaucaggagacuuaccauaugauggaaggcugcucgaggaagcaguuaggaaaaagggaucagaagagcgucgaaggccccacaaagaggaggaggaagaagcguacuauccaccugccccaccaccauacagcgagacagauagccaggccucaagagaaagaaggcucaagaagaaccuugcacugagucgggaguccuuagugguguag

SEQ ID NO: 93518 - protein, 597 aa, Artificial Sequence
  derived and/or modified sequence
MGEKMAEEERFPNTTHEGFNVTLHTTLVVTTKLVLPTPGKPILPVQTGEQAQQEEQSSGMTIFFSLLVLAICIILVHLLIRYRLHFLPESVAVVSLGILMGAVIKIIEFKKLANWKEEEMFRPNMFFLLLLPPIIFESGYSLHKGNFFQNIGSITLFAVFGTAISAFVVGGGIYFLGQGFFFVCVCVFVCFILQADVISKLNMTDSFAFGSLISAVDPVATIAIFNALHVDPVLNMLVFGESILNDAVSIVLTNTAEGLTRKNMSDVSGWQTFLQALDYFLKMFFGSAALGTLTGLISALVLKHIDLRKTPSLEFGMMIIFAYLPYGLAEGISLSGIMAILFSGIVMSHYTHHNLSPVTQILMQQTLRTVAFLCETCVFAFLGLSIFSFPHKFEISFVIWCIVLVLFGRAVNIFPLSYLLNFFRDHKITPKMMFIMWFSGLRGAIPYALSLHLDLEPMEKRQLIGTTTIVIVLFTILLLGGSTMPLIRLMDIEDAKAHRRNKKDVNLSKTEKMGNTVESEHLSELTEEEYEAHYIRRQDLKGFVWLDAKYLNPFFTRRLTQEDLHHGRIQMKTLTNKWYEEVRQGPSGSEDDEQELL

SEQ ID NO: 93519 - DNA, 1794 bp, Artificial Sequence
  derived and/or modified sequence
atgggcgagaagatggccgaggaggagagattccccaacaccacccacgagggcttcaacgtgaccctgcacaccaccctggtggtgaccaccaagctggtgctgcccacccccggcaagcccatcctgcccgtgcagaccggcgagcaggcccagcaggaggagcagagcagcggcatgaccatcttcttcagcctgctggtgctggccatctgcatcatcctggtgcacctgctgatcagatacagactgcacttcctgcccgagagcgtggccgtggtgagcctgggcatcctgatgggcgccgtgatcaagatcatcgagttcaagaagctggccaactggaaggaggaggagatgttcagacccaacatgttcttcctgctgctgctgccccccatcatcttcgagagcggctacagcctgcacaagggcaacttcttccagaacatcggcagcatcaccctgttcgccgtgttcggcaccgccatcagcgccttcgtggtgggcggcggcatctacttcctgggccagggcttcttcttcgtgtgcgtgtgcgtgttcgtgtgcttcatcctgcaggccgacgtgatcagcaagctgaacatgaccgacagcttcgccttcggcagcctgatcagcgccgtggaccccgtggccaccatcgccatcttcaacgccctgcacgtggaccccgtgctgaacatgctggtgttcggcgagagcatcctgaacgacgccgtgagcatcgtgctgaccaacaccgccgagggcctgaccagaaagaacatgagcgacgtgagcggctggcagaccttcctgcaggccctggactacttcctgaagatgttcttcggcagcgccgccctgggcaccctgaccggcctgatcagcgccctggtgctgaagcacatcgacctgagaaagacccccagcctggagttcggcatgatgatcatcttcgcctacctgccctacggcctggccgagggcatcagcctgagcggcatcatggccatcctgttcagcggcatcgtgatgagccactacacccaccacaacctgagccccgtgacccagatcctgatgcagcagaccctgagaaccgtggccttcctgtgcgagacctgcgtgttcgccttcctgggcctgagcatcttcagcttcccccacaagttcgagatcagcttcgtgatctggtgcatcgtgctggtgctgttcggcagagccgtgaacatcttccccctgagctacctgctgaacttcttcagagaccacaagatcacccccaagatgatgttcatcatgtggttcagcggcctgagaggcgccatcccctacgccctgagcctgcacctggacctggagcccatggagaagagacagctgatcggcaccaccaccatcgtgatcgtgctgttcaccatcctgctgctgggcggcagcaccatgcccctgatcagactgatggacatcgaggacgccaaggcccacagaagaaacaagaaggacgtgaacctgagcaagaccgagaagatgggcaacaccgtggagagcgagcacctgagcgagctgaccgaggaggagtacgaggcccactacatcagaagacaggacctgaagggcttcgtgtggctggacgccaagtacctgaaccccttcttcaccagaagactgacccaggaggacctgcaccacggcagaatccagatgaagaccctgaccaacaagtggtacgaggaggtgagacagggccccagcggcagcgaggacgacgagcaggagctgctgtag

SEQ ID NO: 93520 - DNA, 1794 bp, Artificial Sequence
  derived and/or modified sequence
atgggggagaaaatggcagaggaagaaagattccctaacacaacccacgagggctttaatgtaacactccacaccactctcgtagtaacaacaaaactggtccttccgacccccggtaagcccattctgccagttcaaactggtgagcaggctcagcaggaagagcagagttcaggcatgaccatattttttagtctcctcgtgctggccatatgcatcatcctggtgcacctgctgatccggtatcgcctccactttctgcccgagtcagtggcggtagtcagtcttggcattctgatgggagccgtgattaagattattgaattcaagaaacttgctaattggaaggaagaggaaatgttccgcccaaacatgttcttcctcctacttctgccacccataatctttgaatccgggtatagcctccataaggggaatttttttcagaacattgggtccattaccttgttcgccgtgttcggaaccgccatttcagccttcgtagtggggggcggcatctactttctgggacagggttttttctttgtgtgtgtgtgtgttttcgtgtgctttatattgcaggccgatgtgatatcaaaactgaatatgactgattcattcgcttttggttctctgatctccgccgtggatcctgtggccacaattgccatctttaatgccctgcacgtcgatcctgttttgaatatgctggtgttcggagagtccattctcaacgatgccgtcagcatcgtgttgactaacacagcggaggggcttacaagaaaaaacatgtcggacgtgtccggctggcagaccttcttgcaagctttggactacttcttgaagatgttcttcggttctgctgcccttggcacgttgacgggcctcatcagtgccctcgttctgaaacacatagatctaaggaaaacaccaagtcttgaattcggcatgatgatcatcttcgcgtacctgccctacggcttagctgagggtataagtcttagtggtataatggctattctctttagtgggatagtgatgagccactatacccatcataacttgagtccagtgacgcagatacttatgcagcagactctccgtacggtcgcatttctttgtgagacatgtgtcttcgctttcctgggcctctccatcttcagctttcctcacaagttcgagatcagctttgtcatctggtgcattgtcctggtgctttttgggcgagcagtgaacattttcccgttatcttatcttctcaacttctttcgcgatcacaagataacccccaagatgatgtttattatgtggttctccgggcttagaggagccattccatacgccttgtccctgcacctggatctggaacccatggagaaacgtcagctgataggcacgactactattgttattgtacttttcactatcttactccttggcgggtctactatgcccttgattcggttaatggacatagaagacgcgaaagcccatagaaggaacaagaaggacgtgaacctgtccaaaaccgaaaagatgggaaatacggtagagtccgagcacctgagtgagctgacagaggaagaatacgaggctcactatatacgacgacaggacctcaaaggttttgtgtggcttgacgcaaagtacctcaatccattcttcactcgaagactgacccaggaagatctacatcacggacgaatacagatgaaaacactcacgaataaatggtatgaagaagttagacaaggcccaagtggctccgaggatgatgagcaggaactgttgtag

SEQ ID NO: 93521 - DNA, 1794 bp, Artificial Sequence
  derived and/or modified sequence
atgggagagaagatggccgaggaggagcgcttccccaacaccacccatgagggcttcaacgtgaccctgcacaccaccctggtggtgaccaccaagctggtgctgcccacccctgggaagcccatcctgcctgtgcagacaggagagcaggcccagcaggaggagcagagcagcggcatgaccatcttcttcagcctgctggtgctggccatctgcatcatcctggtgcacctgctgatccgctaccgcctgcacttcctgcctgagagcgtggccgtggtgtccctgggcatcctgatgggcgccgtcatcaagatcatcgagttcaagaagctggccaactggaaggaggaggagatgttccggcccaacatgttcttcctgctgctgctgccccccatcatctttgagagcggctacagcctgcacaagggcaacttcttccagaacatcggcagcatcaccctgtttgctgtgtttggaacagccatcagcgcctttgtggtgggcggcggcatctacttcctgggccagggcttcttctttgtgtgtgtgtgtgtgtttgtgtgcttcatcctgcaggctgatgtgatcagcaagctgaacatgacagacagctttgccttcggcagcctcatctctgctgtggaccctgtggccaccatcgccatcttcaatgccctgcacgtggaccctgtgctgaacatgctggtgtttggagagagcatcctgaatgatgctgtgtccatcgtgctgaccaacacagctgagggcctgaccaggaagaacatgtctgatgtgtctggctggcagaccttcctgcaggccctggactacttcctgaagatgttctttggatctgctgccctgggcaccctgaccggcctcatcagcgccctggtgctgaagcacatcgacctgaggaagacccccagcctggagtttggcatgatgatcatctttgcctacctgccctacggcctggccgagggcatcagcctgagcggcatcatggccatcctcttctctggaattgtgatgagccactacacccaccacaacctgagccctgtgacccagatcctgatgcagcagaccctgaggacagtggccttcctgtgtgagacctgtgtgtttgccttcctgggcctgagcatcttctccttcccccacaagtttgagatcagctttgtgatctggtgcatcgtgctggtgctgtttggccgggctgtgaacatcttccccctgagctacctgctgaacttcttccgggaccacaagatcacccccaagatgatgttcatcatgtggttcagcggcctgcggggggccatcccctatgccctgagcctgcacctggacctggagcccatggagaagaggcagctgattggcaccaccaccatcgtgattgtgctcttcaccatcctgctgctgggcggcagcaccatgcccctcatccggctgatggacattgaagatgccaaggcccacagaagaaacaagaaggatgtgaacctgagcaagacagagaagatgggcaacacagtggagagcgagcacctgtctgagctgacagaggaggagtatgaggcccactacatccggcggcaggacctgaagggctttgtgtggctggatgccaagtacctgaaccccttcttcacccggcggctgacccaggaggacctgcaccacggccgcatccagatgaagaccctgaccaacaagtggtatgaggaggtgcggcagggccccagcggctctgaagatgatgagcaggagctgctgtag

SEQ ID NO: 93522 - DNA, 1794 bp, Artificial Sequence
  derived and/or modified sequence
atgggcgagaagatggccgaggaggagcggttccccaacaccacccatgagggctttaatgtgactctccatacaacactcgtcgtgacaaccaaactcgtgctgcccactccaggtaagccaatccttcccgtgcagacaggtgaacaggcgcaacaggaggaacagtcaagtggaatgactatattcttctccttgttggtccttgctatctgtattatcctcgtacacttgctgattagataccgtcttcattttttaccagaatccgtagctgttgtatctctgggcatcctgatgggcgctgtaatcaagattatcgagttcaagaaactggcgaactggaaagaagaggaaatgtttcggcccaatatgttcttcctacttctgctccctccaatcatattcgagagcgggtacagcctccataaaggaaacttctttcaaaacattggatcaattaccctcttcgctgtcttcgggacagctatcagcgccttcgtggttggcggaggtatttactttctaggccagggattttttttcgtgtgcgtgtgtgtgttcgtgtgttttatcctgcaagccgacgtgatcagcaagctcaatatgacagacagcttcgcatttgggagcttaatctcagctgtagatccggttgccactatcgcaatcttcaacgcactccacgtggatccagtgctgaatatgttggtattcggcgaaagcatcctcaacgatgccgtgtctatcgttctgacgaacaccgccgagggcctgaccaggaaaaacatgtcagatgtgtccggctggcagaccttcctccaggccttagactatttcttaaagatgttctttggctcagccgcattagggactctgaccgggctgataagcgctttggttctgaagcacatcgacttgcggaagacaccttccttggagtttggtatgatgatcatctttgcctaccttccttatggcctcgccgaaggtatctcattgtcaggaattatggctatcttattcagtgggattgtcatgtcccattacacccaccacaatctgagccctgtcacccagattctcatgcagcagaccctgaggaccgtcgccttcttatgcgaaacctgcgtgtttgcttttctaggcttgagtattttttcctttcctcacaaattcgaaatatcatttgtcatctggtgcatcgtgttggtgctgttcggtagagctgtaaacatattccccctgtcttatctgttgaacttttttagggaccataagattacccccaaaatgatgtttataatgtggttctccggactgcgaggtgcgattccgtacgcgctgtcgctgcacctggacctagaacctatggaaaaacgccagctgatcggcactacaaccattgtgatcgtgctgttcacaatactactgttgggtgggtcaaccatgcccctaatcaggctgatggacattgaagatgcaaaagcccaccgcaggaataaaaaggacgtgaacctaagcaaaactgagaagatggggaacacggtcgaatctgaacatctcagcgagctaaccgaagaggagtacgaagctcattatatccggcggcaagatctgaagggattcgtgtggttggatgccaagtatctcaaccccttcttcacccggaggctgacacaggaggacctgcatcacggcaggattcaaatgaagactctgactaataaatggtacgaagaggtgcgccagggtccctcagggtccgaggatgatgaacaggaacttttatag

SEQ ID NO: 93523 - DNA, 1794 bp, Artificial Sequence
  derived and/or modified sequence
atgggagagaagatggcggaggaagagcggttccctaataccacgcatgaaggatttaatgtcacattacacaccacgctggtggtgacaactaagttggtgctgccaacacccggtaagcccattcttccagtgcagacgggagagcaggcccaacaagaagagcagagctctggtatgacaattttcttctcactgttagtgctcgctatttgcatcatactggtacacctgcttatccgttataggttacatttcctgccagaatcagtggctgtggtcagcctcggtattttgatgggtgcagtaatcaaaattatagaattcaagaaattggcaaactggaaggaagaagagatgtttagaccaaatatgttttttttactgctgcttccaccaattatcttcgaatctggctactctctacacaaaggtaacttttttcagaacattggcagcataactctgttcgcagtattcggaaccgccataagtgctttcgtcgttggagggggtatttatttcctcgggcagggcttcttcttcgtgtgtgtgtgtgtcttcgtatgtttcattcttcaggccgacgtaattagcaagctcaatatgaccgattcctttgccttcggtagtttgataagcgcggtggatcctgtcgccacaatcgccatattcaacgcacttcatgtggatcccgtgttaaacatgctggtctttggagagagcattctcaatgacgcagtatccatcgtgttgacaaatactgctgagggactcacccggaagaatatgagcgatgtgagtggatggcagaccttccttcaggcgctggattatttccttaaaatgttcttcggatcagctgctctcggcacactgactggcctaatctccgctctggtcctgaaacacattgacctccgtaaaacacccagcctagagtttgggatgatgatcatcttcgcttacctgccttacggcctagctgagggcatttcattgtccgggattatggcaattttgttctctggcatagtgatgagccactacactcaccataatcttagccccgttactcagatcttgatgcagcagacactgaggacagtggcattcctgtgtgagacatgcgtgtttgccttcctggggctatctatattctctttcccccataaatttgagatttcttttgtgatctggtgcatcgtcctggtactttttggccgtgctgtgaacatatttccattgtcctacctgctaaacttttttcgggatcacaaaatcacacccaagatgatgtttatcatgtggttctcaggcttgcgcggagctattccttacgccctaagtctgcatcttgacctagagcccatggaaaaaaggcagttaatcgggacaaccacaatagtgatcgtcctgttcacgatcctgctgcttggaggtagcactatgccactgatacgcctaatggatatagaggacgccaaagcgcataggcgtaacaaaaaagatgttaatttatctaaaaccgagaagatgggcaatacagtggagtcagagcacctctcagaattaaccgaagaagagtatgaagcccactatatccgacggcaggaccttaaggggtttgtgtggcttgatgccaaatatctgaaccccttcttcacccgcaggctgacccaggaagacctgcaccacggacggatccagatgaagacactcaccaataagtggtacgaagaagttagacaggggccatccgggtcagaagacgacgagcaggaattactgtag

SEQ ID NO: 93524 - DNA, 6303 bp, Artificial Sequence
  derived and/or modified sequence
ccgaaagccccgggagagactaagaagcaatcctcccacgcgctttctcccaccctcgggccactgagacggagggacagagggccgccctcgcgcggccgaggccccgcctcccgctcgcccgcccgcgcctccagcggaagccggaagcaaaagcgggtcctgctagccccgcggctccgaactcggtggtcctggaagctccgcaggatgggggagaagatggcggaagaggagaggttccccaatacaactcatgagggtttcaatgtcaccctccacaccaccctggttgtcacgacgaaactggtgctcccgacccctggcaagcccatcctccccgtgcagacaggggagcaggcccagcaagaggagcagtccagcggcatgaccattttcttcagcctccttgtcctagctatctgcatcatattggtgcatttactgatccgatacagattacatttcttgccagagagtgttgctgttgtttctttaggtattctcatgggagcagttataaaaattatagagtttaaaaaactggcgaattggaaggaagaagaaatgtttcgtccaaacatgtttttcctcctcctgcttccccctattatctttgagtctggatattcattacacaagggtaacttctttcaaaatattggttccatcaccctgtttgctgtttttgggacggcaatctccgcttttgtagtaggtggaggaatttattttctgggtcagggttttttttttgtgtgtgtctgtgtgtttgtgtgttttattttacaggctgatgtaatctctaaactcaacatgacagacagttttgcgtttggctccctaatatctgctgtcgatccagtggccactattgccattttcaatgcacttcatgtggaccccgtgctcaacatgctggtctttggagaaagtattctcaacgatgcagtctccattgttctgaccaacacagctgaaggtttaacaagaaaaaatatgtcagatgtcagtgggtggcaaacatttttacaagcccttgactacttcctcaaaatgttctttggctctgcagcgctcggcactctcactggcttaatttctgcattagtgctgaagcatattgacttgaggaaaacgccttccttggagtttggcatgatgatcatttttgcttatctgccttatgggcttgcagaaggaatctcactctcaggcatcatggccatccttttctcaggcatcgtgatgtcccactacacgcaccataacctctccccagtcacccagatcctcatgcagcagaccctccgcaccgtggccttcttatgtgaaacatgtgtgtttgcatttcttggcctgtccatttttagttttcctcacaagtttgaaatttcctttgtcatctggtgcatagtgcttgtactatttggcagagcggtaaacattttccctctttcctacctcctgaatttcttccgggatcataaaatcacaccgaagatgatgttcatcatgtggtttagtggcctgcggggagccatcccctatgccctgagcctacacctggacctggagcccatggagaagcggcagctcatcggcaccaccaccatcgtcatcgtgctcttcaccatcctgctgctgggcggcagcaccatgcccctcattcgcctcatggacatcgaggacgccaaggcacaccgcaggaacaagaaggacgtcaacctcagcaagactgagaagatgggcaacactgtggagtcggagcacctgtcggagctcacggaggaggagtacgaggcccactacatcaggcggcaggaccttaagggcttcgtgtggctggacgccaagtacctgaaccccttcttcactcggaggctgacgcaggaggacctgcaccacgggcgcatccagatgaaaactctcaccaacaagtggtacgaggaggtacgccagggcccctccggctccgaggacgacgagcaggagctgctctgacgccaggtgccaaggcttcaggcaggcaggcccaggatgggcgtttgctgcgcacagacactcagcaggggcctcgcagagatgcgtgcatccagcagccccttcaagacataagagggcggggcgaggtactggctgcagagtcgccttagtccagaacctgacaggcctctggagccaggcgacttcttgggaaactgtcatctcccgactcctccctgagccagcctccgctcagtgtggctcctcagcccacagaggggagggagcatggggccaggtgccagtcatctgtgaagctagggcgcctacccccccacccggaggacccctgcggccccctgcctagaggagcaccatctacagttgtgccattccccagccactgccttcatgctgcccccgccggactggcagagccaggggtcagccacctgcctttgagtcatcaagatgcctctgcagccacaattctgacctaagtggcagggcccagaaatcctgaaaacctcccgctgccttttgtgatacttcctgtgctccctcagagagaaacggagtgaccttttgtcctttacctgattggcacttcgcagtctatctccctgggtagcagacggctgctgcccttctctgggcatgttctgaatgtttacactggtaccttctggtatcttctttagagccccctgcaagctgcaactctaggcttttatcttgcggggtcagagcgccctctagagggaaaagctagaggcacagggtttctgccggcccacaactgctgtcttgatttgcattttacagcaaagtgctgagagcctctagtcgcctcctgccatctgatctccctccccaccattcccgtactcagttgttcttttgtctaatcggaggccactgtgctgaggccctgcagtgtctgctcactgctgccatcttcgctgctagtcagggttccatcctctttcccctctcccagttccctaccacgttggatcccattcgtcacccatgctagggtccccaaagcactggggcaggggccagagcagcagcacccagtgctccctcctctactctgacctggggccccagcatcctggagcacacgctccacgcacacacaccccagccctgtcccaggggcctggccccctcagccatctcagggtgaggagctgccagtcatgtccagatggaatgactcccatcctctcctcatctcccctttgacgagcctcaaactgctcagctcatcaaagagccattgccaacttccgtatgtggttctgggtcccagggagccttggaacctggcaccctggggtggtttaattcatcattaagaagcattcctgcttctcaagggacacagtggcctgcatgggccagcatggaccctgggctgatcatgtgcattcctgcttctctggggacacagtgggcccacatgggccagcatggaccctgggctagagcaagcacatctccatctcttccacctcaggcagtgtggctccagatgtcaggagggactgacctcaggaccttccaggttcctctgtgccaggaatgagaggccaggcccgatcctaccacctcgccttgaccctgaagtcagagcaggccagccaagcaggaagcacactgtttactttttgcatgaaaagtaaatgtgtacttgatagagctaaaatatgatcttttttaatttctcaaccccataatttgagccattgccttgcttaattttggtttccaccatttccttttagtggagaagagaggaagtcagagggtagggacctttgcctgcccctgggcgagtgcgggcagggatctgagaccagattgttctcgcacccctgccagaactcactctcccctgaagtttagggtcccatctcccagatgtaagttgttttgcaaactcagtttgccaggatttctttctttcctaatcttaaattcacagataaagcaatgaaaagagtcagatcccatttccgtctgccccctcgtcaccaggtgtgatagccccagccaggtcacacctggcctcacactttgagctgagacttgaaaacgatgctgtggcggaagagcatgtggggcttggtggaggggccccaggatttgttgggggcaaagggggtggcgggaccgttcccaggaggtaccagcacctgcctcgatctcctctgagcctcttctgccccctgtcggccaggtgaggtcagcagcctgggagagtgcccccaagagatgagggcaccccgtgttccttggcaatcttggctcaccttggtaacaaaaggccatagaagtctgtttttctgggtcagttttttttgcctgagaataacaaattgctgctgtctacctttagcacacccaataattctatttggggcagtgaatgcatagaagatataaaaatacgcagcttaactatatcttcctgcgtgtgtatttattttcttctgggtctaggccatggtacaggagaactgtggcgtgtaggaggaatacttcaggatgagtgaaggctggagccagggagcgctggaggaaaccagccctttagccagcagcccctccaccacaggcactgctgtgtggaacgagttcttggaatgaatcccatgctttctgcagcctgtagttgttatgacccctcggaacaaccaccccgtggcttgtgtggggtctcgcagggaaaagggctggcttctaggtccccgagataagtgtgcagggggatgggccagggccaggctaagggtggctcagttccatcatctggaggtcagacacactgtccagaggcagaactgaagccctctcggcccctaccctaagccagccacccctcttcacagtgggtgagctgggctgggctggctggcatgaggccaaggggtaggcctgagcgccagagtcgcccaggttagcccacaggattcctttgtgtgccatggaatgctgaaagatgggtgactggggacccttcttaaaacctttggcaaaggtgccatcggcagggcttggcctcatgaagtctcaggtccgtgttcccgcagggcgcacatgcttggagagtcctcagcagggtagccgaggccaggccacttctgctgaggatggggcaggctggggtgtgggtgtggcctggggtggctcagggctggaactgctgcctgattcctgtgtggggagaagctcagtggccgtttgctgccactgacaaggatttcacatgcagaagagaaaaggcccccctccaccccccgcattccctgccgagtgagagccagtgtttgctgcccttgctgggggcgggtaggaaaccctgagcttcctgatgcggagtcatgaagcagagtcctcgggaaggcatctccacagccccgggtcctctgtctaacgccctccatttcacgccctccatctcacagtcaagataaaggcctcgagaataaagagccagcccccttccatttagtctcctgccgtttcccaaacagttgtccaacagttagacattgaggggcttcactgttaccaggcatgtaacagaaggaggaagactaacacacaccccctgccccatcccatccccctctcccgagctattttcttgctgtggcctctggtgcccttgagttggtctccccggctgctctgcgggggcttcactggcttcggagtgagcgcgaagtgctggtgagcagtgggcctgtgattggatgggaagatgtgcatccgtggtcaaaagtcagctgccagccctgcggaaccagagcctcaggctgggatggggaggcctccctgcttccacctgcatggtgggcatggcctggcttacaccaaaggctttgacggtttctccaagtaaggatctgcaaatcttgaatcgtcctcaaaatgacgaagcttgaattgtcctcaagatggatgtgaatcttacattccttttcatcatttcctttgtaaaaatgacgagtgctgggtttttgttttaagaagcattatgaaggccagacttactcatttttctcccccaagtgagctgcaagaggcccctgttaggcccctgtttcctgagcagtgatgtgctgctcttcttggtggggctttgggctgggaggggaaggcgggtcagagatgggggacctgtggctgccatgcaggagcccctgcgtcatctcgttggactctttaagggagtcaggaatagatgtatgaacagtcgtgtcactggatgcctatttagaaataaagtgtatgctgctg

SEQ ID NO: 93525 - DNA, 2309 bp, Artificial Sequence
  derived and/or modified sequence
aagctccgcaggatgggggagaagatggcggaagaggagaggttccccaatacaactcatgagggtttcaatgtcaccctccacaccaccctggttgtcacgacgaaactggtgctcccgacccctggcaagcccatcctccccgtgcagacaggggagcaggcccagcaagaggagcagtccagcggcatgaccattttcttcagcctccttgtcctagctatctgcatcatattggtgcatttactgatccgatacagattacatttcttgccagagagtgttgctgttgtttctttaggtattctcatgggagcagttataaaaattatagagtttaaaaaactggcgaattggaagggtaacttctttcaaaatattggttccatcaccctgtttgctgtttttgggacggcaatctccgcttttgtagtaggtggaggaatttattttctgggtcagttttgcgtttggctccctaatatctgctgtcgatccagtggccactattgccattttcaatgcacttcatgtggaccccgtgctcaacatgctggtctttggagaaagtattctcaacgatgcagtctccattgttctgaccaacacagctgaaggtttaacaagaaaaaatatgtcagatgtcagtgggtggcaaacatttttacaagcccttgactacttcctcaaaatgttctttggctctgcagcgctcggcactctcactggcttaatttctgcattagtgctgaagcatattgacttgaggaaaacgccttccttggagtttggcatgatgatcatttttgcttatctgccttatgggcttgcagaaggaatctcactctcaggcatcatggccatccttttctcaggcatcgtgatgtcccactacacgcaccataacctctccccagtcacccagatcctcatgcagcagaccctccgcaccgtggccttcttatgtgaaacatgtgtgtttgcatttcttggcctgtccatttttagttttcctcacaagtttgaaatttcctttgtcatctggtgcatagtgcttgtactatttggcagagcggtaaacattttccctctttcctacctcctgaatttcttccgggatcataaaatcacaccgaagatgatgttcatcatgtggtttagtggcctgcggggagccatcccctatgccctgagcctacacctggacctggagcccatggagaagcggcagctcatcggcaccaccaccatcgtcatcgtgctcttcaccatcctgctgctgggcggcagcaccatgcccctcattcgcctcatggacatcgaggacgccaaggcacaccgcaggaacaagaaggacgtcaacctcagcaagactgagaagatgggcaacactgtggagtcggagcacctgtcggagctcacggaggaggagtacgaggcccactacatcaggcggcaggaccttaagggcttcgtgtggctggacgccaagtacctgaaccccttcttcactcggaggctgacgcaggaggacctgcaccacgggcgcatccagatgaaaactctcaccaacaagtggtacgaggaggtacgccagggcccctccggctccgaggacgacgagcaggagctgctctgacgccaggtgccaaggcttcaggcaggcaggcccaggatgggcgtttgctgcgcacagacactcagcaggggcctcgcagagatgcgtgcatccagcagccccttcaagacataagagggcggggcgaggtactggctgcagagtcgccttagtccagaacctgacaggcctctggagccaggcgacttcttgggaaactgtcatctcccgactcctccctgagccagcctccgctcagtgtggctcctcagcccacagaggggagggagcatggggccaggtgccagtcatctgtgaagctagggcgcctacccccccacccggaggacccctgcggccccctgcctagaggagcaccatctacagttgtgccattccccagccactgccttcatgctgcccccgccggactggcagagccaggggtcagccacctgcctttgagtcatcaagatgcctctgcagccacaattctgacctaagtggcagggcccagaaatcctgaaaacctcccgctgccttttgtgatacttcctgtgctccctcagagagaaacggagtgaccttttgtcctttacctgattggcacttcgcagtctatctccctgggtagcagacggctgctgcccttctctgggcatgttctgaatgtttacactggtaccttctg

SEQ ID NO: 93526 - protein, 583 aa, Artificial Sequence
  derived and/or modified sequence
MPKPINVRVTTMDAELEFAIQPNTTGKQLFDQVVKTVGLREVWFFGLQYVDSKGYSTWLKLNKKVTQQDVKKENPLQFKFRAKFFPEDVSEELIQEITQRLFFLQVKEAILNDEIYCPPETAVLLASYAVQAKYGDYNKEIHKPGYLANDRLLPQRVLEQHKLTKEQWEERIQNWHEEHRGMLREDSMMEYLKIAQDLEMYGVNYFEIKNKKGTELWLGVDALGLNIYEHDDKLTPKIGFPWSEIRNISFNDKKFVIKPIDKKAPDFVFYAPRLRINKRILALCMGNHELYMRRRKPDTIEVQQMKAQAREEKHQKQLERAQLENEKKKREIAEKEKERIEREKEELMERLKQIEEQTIKAQKELEEQTRKALELDQERKRAKEEAERLEKERRAAEEAKSAIAKQAADQMKNQEQLAAELAEFTAKIALLEEAKKKKEEEATEWQHKAFAAQEDLEKTKEELKTVMSAPPPPPPPPVIPPTENEHDEHDENNAEASAELSNEGVMNHRSEEERVTETQKNERVKKQLQALSSELAQARDETKKTQNDVLHAENVKAGRDKYKTLRQIRQGNTKQRIDEFEAM

SEQ ID NO: 93527 - protein, 604 aa, Artificial Sequence
  derived and/or modified sequence
MPKPINVRVTTMDAELEFAIQPNTTGKQLFDQVVKTVGLREVWFFGLQYVDSKGYSTWLKLNKKVTQQDVKKENPLQFKFRAKFFPEDVSEELIQEITQRLFFLQVKEAILNDEIYCPPETAVLLASYAVQAKYGDYNKEIHKPGYLANDRLLPQRVLEQHKLTKEQWEERIQNWHEEHRGMLREDSMMEYLKIAQDLEMYGVNYFEIKNKKGTELWLGVDALGLNIYEHDDKLTPKIGFPWSEIRNISFNDKKFVIKPIDKKAPDFVFYAPRLRINKRILALCMGNHELYMRRRKPDTIEVQQMKAQAREEKHQKQLERAQLENEKKKREIAEKEKERIEREKEELMERLKQIEEQTIKAQKELEEQTRKALELDQERKRAKEEAERLEKERRAAEEAKSAIAKQAADQMKNQEQLAAELAEFTAKIALLEEAKKKKEEEATEWQHKAFAAQEDLEKTKEELKTVMSAPPPPPPPPVIPPTENEHDEHDENNAEASAELSNEGVMNHRSEEERVTETQKNERVKKQLQALSSELAQARDETKKTQNDVLHAENVKAGRDKYKTLRQIRQGNTKQRIDEFEAMWGPKLYALFQMRSCQSSIKQM

SEQ ID NO: 93528 - DNA, 1815 bp, Artificial Sequence
  derived and/or modified sequence
atgcccaagcccatcaacgtgagagtgaccaccatggacgccgagctggagttcgccatccagcccaacaccaccggcaagcagctgttcgaccaggtggtgaagaccgtgggcctgagagaggtgtggttcttcggcctgcagtacgtggacagcaagggctacagcacctggctgaagctgaacaagaaggtgacccagcaggacgtgaagaaggagaaccccctgcagttcaagttcagagccaagttcttccccgaggacgtgagcgaggagctgatccaggagatcacccagagactgttcttcctgcaggtgaaggaggccatcctgaacgacgagatctactgcccccccgagaccgccgtgctgctggccagctacgccgtgcaggccaagtacggcgactacaacaaggagatccacaagcccggctacctggccaacgacagactgctgccccagagagtgctggagcagcacaagctgaccaaggagcagtgggaggagagaatccagaactggcacgaggagcacagaggcatgctgagagaggacagcatgatggagtacctgaagatcgcccaggacctggagatgtacggcgtgaactacttcgagatcaagaacaagaagggcaccgagctgtggctgggcgtggacgccctgggcctgaacatctacgagcacgacgacaagctgacccccaagatcggcttcccctggagcgagatcagaaacatcagcttcaacgacaagaagttcgtgatcaagcccatcgacaagaaggcccccgacttcgtgttctacgcccccagactgagaatcaacaagagaatcctggccctgtgcatgggcaaccacgagctgtacatgagaagaagaaagcccgacaccatcgaggtgcagcagatgaaggcccaggccagagaggagaagcaccagaagcagctggagagagcccagctggagaacgagaagaagaagagagagatcgccgagaaggagaaggagagaatcgagagagagaaggaggagctgatggagagactgaagcagatcgaggagcagaccatcaaggcccagaaggagctggaggagcagaccagaaaggccctggagctggaccaggagagaaagagagccaaggaggaggccgagagactggagaaggagagaagagccgccgaggaggccaagagcgccatcgccaagcaggccgccgaccagatgaagaaccaggagcagctggccgccgagctggccgagttcaccgccaagatcgccctgctggaggaggccaagaagaagaaggaggaggaggccaccgagtggcagcacaaggccttcgccgcccaggaggacctggagaagaccaaggaggagctgaagaccgtgatgagcgccccccccccccccccccccccccccgtgatcccccccaccgagaacgagcacgacgagcacgacgagaacaacgccgaggccagcgccgagctgagcaacgagggcgtgatgaaccacagaagcgaggaggagagagtgaccgagacccagaagaacgagagagtgaagaagcagctgcaggccctgagcagcgagctggcccaggccagagacgagaccaagaagacccagaacgacgtgctgcacgccgagaacgtgaaggccggcagagacaagtacaagaccctgagacagatcagacagggcaacaccaagcagagaatcgacgagttcgaggccatgtggggccccaagctgtacgccctgttccagatgagaagctgccagagcagcatcaagcagatgtag

SEQ ID NO: 93529 - DNA, 1815 bp, Artificial Sequence
  derived and/or modified sequence
atgcccaagcctataaacgtgcgcgtgacgactatggacgccgaactcgagttcgccattcagcctaacacaactggcaaacagctgttcgaccaggtggttaaaacagtgggtttgcgagaggtgtggtttttcggcctgcaatacgtcgactccaaaggatactctacatggctcaaacttaacaaaaaggtgactcaacaggatgtgaaaaaggagaacccattgcaatttaagttccgcgcaaagttctttcctgaagacgtatccgaagagctcattcaggagatcacgcagagactctttttcctgcaagttaaggaggccattctgaacgacgagatttactgcccgccagagacggctgtactgcttgcatcttacgctgtccaggcaaagtacggcgattataataaggagatccacaagccgggctacttagcaaacgaccgcctgttgcctcagagggtgctggaacagcataagctgacaaaggaacagtgggaggaacggatccagaactggcacgaggaacaccgcggaatgttgagagaagactccatgatggagtacctgaagatcgcccaggatctggaaatgtatggagtgaattacttcgagataaagaacaagaagggaacagagctgtggctgggcgtggacgccctgggtctcaatatttacgagcatgatgataagctcacccccaaaatcggtttcccatggagtgaaatacgaaacatttctttcaatgataagaaattcgtcatcaaacctattgataaaaaagctcctgacttcgtgttctatgccccccgtctgaggataaacaaaagaatcctggccctgtgcatgggaaatcacgagctgtatatgagaaggcgcaagcccgataccattgaagtccagcaaatgaaggcccaggctcgagaagaaaagcaccaaaaacaacttgaaagagcgcaactggagaatgagaaaaagaaacgcgagattgctgagaaagagaaggagcgaattgagcgcgaaaaagaggaactcatggaacggctcaaacagattgaagaacagactatcaaggcacagaaggagctcgaagagcagacacgaaaagccctggagctggatcaggagcggaagcgcgcgaaagaggaagccgaacgccttgaaaaagaaagaagggctgcagaggaagctaagtcagcgatcgccaaacaggcagccgaccagatgaaaaaccaggaacaactcgccgcggagctggccgaatttaccgccaagatcgctctcctggaagaggctaaaaaaaaaaaagaagaggaagccacagaatggcaacataaagccttcgccgcccaggaggacctcgaaaagacaaaggaggaactcaaaactgtaatgagcgcccctccacctccccctcccccgcccgtcatcccaccaaccgagaatgagcacgacgagcatgatgaaaacaacgcagaagcgtcggcagaactttcaaatgagggcgtcatgaatcatcggtcagaagaggaacgtgttacagagacccagaagaatgagcgggtgaagaagcagctgcaagccctctcatccgagctggcccaggctcgtgacgaaaccaaaaagacccagaacgatgttctgcatgccgagaatgtcaaggcaggtagggataaatacaagactctcaggcaaatcaggcagggcaataccaagcagagaattgatgaatttgaggcgatgtggggcccaaaactgtatgccttgtttcagatgaggtcttgtcagtctagcatcaaacagatgtag

SEQ ID NO: 93530 - DNA, 1815 bp, Artificial Sequence
  derived and/or modified sequence
atgcccaagccgatcaatgtcagagtgaccacgatggacgccgaactcgagttcgccattcagccaaacactactgggaagcagctgtttgaccaggtagtcaaaacagtaggcctccgcgaggtgtggtttttcggactgcaatacgtggactcaaaaggttactcaacatggctgaaactgaacaagaaagtaacacagcaggatgtgaagaaggagaaccctctgcagttcaaattcagggctaaatttttccccgaggacgtatctgaggaactcatacaagagataacacaacgactattctttttacaggtcaaggaggccatcctcaatgacgagatctactgtccacctgaaacggctgtcctcctggcaagttatgccgtgcaagccaagtatggagactacaataaggagattcacaagccaggatacttggccaacgataggttactaccccaacgggtactcgagcaacacaagcttacgaaagaacagtgggaggagagaatccagaactggcacgaggaacatcggggcatgctacgggaggactccatgatggagtaccttaaaatcgctcaagatttagaaatgtatggtgtcaattacttcgaaattaaaaataagaaaggcacagagttgtggctcggcgtggatgctctgggcctgaatatctacgagcatgacgataagttgacacctaaaattggctttccctggtccgaaatcagaaatatctctttcaacgacaagaagtttgttatcaagcccatagataagaaagctccagatttcgtgttttacgccccccgattgcgcatcaacaagcggatcctggctctgtgtatgggaaaccacgagttgtatatgcgccgcaggaagcccgacacaatagaggtgcagcaaatgaaggcccaggcgcgagaagagaagcaccagaagcagctggaacgcgcccagctggaaaatgaaaaaaaaaaaagggagatcgcagaaaaggagaaggagcggatagaacgagagaaggaggaactaatggagagactaaagcaaattgaagagcagacaatcaaagcacagaaagaactggaggagcaaactcgtaaagcactggaactcgaccaggaaaggaagagagcaaaagaagaggcagagaggctcgagaaggagcgaagggccgcggaggaggcaaagagtgcgattgctaaacaggcggccgaccagatgaagaaccaggagcagctcgcagcagaactcgctgaattcacagctaagatcgcattactcgaagaggctaaaaagaagaaggaggaggaagcaactgaatggcagcacaaggcgttcgccgcccaggaagacttggaaaaaacgaaagaggagctgaagactgtcatgagtgcacctcctccaccccccccaccgccagtgattcctcccacagaaaacgagcacgatgagcatgacgagaacaatgccgaggcctctgcagaactgagcaacgaaggagttatgaaccaccgcagcgaagaagagagggttaccgaaacacaaaagaacgaacgcgtgaagaaacagttgcaggccctgtcctccgagctcgctcaggcccgcgacgagacaaaaaagacgcaaaatgacgtcctgcacgcggaaaatgtcaaagccgggagagataaatacaagaccttacgtcagatccgtcaggggaatacgaagcagcgcatagacgaattcgaggccatgtggggccccaaactctacgccctgtttcagatgaggagttgccaaagttccattaaacaaatgtag

SEQ ID NO: 93531 - DNA, 1815 bp, Artificial Sequence
  derived and/or modified sequence
atgccaaaacccattaacgtgagggtgaccactatggacgctgaacttgagttcgccatccagccaaacacaaccggtaagcagctgttcgaccaggtcgtcaagacggtgggcctgcgggaagtctggttctttggcttacaatatgttgattctaagggatacagtacatggctaaaactcaataaaaaggttacccagcaggacgtgaaaaaggagaatccacttcagttcaagtttcgggcaaaattttttccagaggacgtgagtgaggagttgattcaggagatcactcagcggctgtttttcctgcaagtgaaggaagctatcctgaacgatgagatttactgccctcccgagaccgccgtgttgcttgcgagctatgccgtgcaggctaaatatggagattacaataaggaaatccacaagcccgggtacctggctaatgaccgcctgctgccccagcgcgtcttggaacagcataagctgactaaggaacagtgggaggagagaatccagaattggcatgaagaacacagggggatgttgcgagaagatagcatgatggaatatcttaagattgcacaggacttggagatgtacggggtgaattatttcgaaataaagaataagaaagggacagaactatggttaggtgttgatgcactggggctgaacatctacgagcacgacgataaactgacacccaagataggctttccttggagtgagataagaaacatcagcttcaacgataaaaaatttgtgattaagcccatcgataaaaaggcccctgattttgtgttttatgcgccccggcttcgtattaataagcgcattctggccctgtgcatgggcaaccatgagctctatatgcgaagacggaagcctgacacaatcgaagtgcagcaaatgaaggcccaggcaagagaggagaagcatcagaaacaactggaacgggcccagctggaaaatgagaaaaagaaacgggaaatcgcggagaaagagaaagaaaggattgaacgggagaaggaggaacttatggaacggctgaagcaaatcgaggagcaaaccataaaggctcagaaggagctagaggaacagactaggaaggccctcgagctggaccaggaacggaagagagcaaaagaggaagcggagaggctcgagaaggagagacgcgctgccgaggaggccaaatcggccatcgcgaagcaggccgccgaccagatgaagaaccaagagcagctcgccgcagagcttgctgagtttactgcaaaaattgcactactggaagaagccaaaaaaaagaaagaagaagaggccaccgagtggcagcacaaggcttttgctgcccaagaagatctggaaaagactaaagaagagttgaagacggtgatgagcgccccaccgcctccaccccctcctccagtgatccccccaacagaaaatgagcatgacgaacatgatgagaataatgctgaagccagcgcagagttatcaaacgagggcgtcatgaatcaccgttctgaggaggagagagtgaccgagactcagaaaaatgagcgcgtgaaaaaacagctccaagctctgtcatctgaattggctcaggctagagatgagacaaagaagacgcagaatgatgtgctgcatgccgagaacgtcaaagcaggtagagataagtataagaccctgcgccagatccgccaagggaatactaagcaaaggatcgatgagttcgaggctatgtggggcccaaaactgtacgcactgttccagatgcgctcttgtcagagcagtatcaaacaaatgtag

SEQ ID NO: 93532 - DNA, 1815 bp, Artificial Sequence
  derived and/or modified sequence
atgcccaagcccatcaacgtgcgggtgaccaccatggatgctgagctggagtttgccatccagcccaacaccaccgggaagcagctgtttgaccaggtggtgaagacagtgggcctgcgggaggtgtggttcttcggcctgcagtatgtggacagcaagggctacagcacctggctgaagctgaacaagaaggtgacccagcaggatgtgaagaaggagaaccccctgcagttcaagttccgggccaagttcttcccagaagatgtgtctgaggagctgatccaggagatcacccagaggctcttcttcctgcaggtgaaggaggccatcctgaatgatgagatctactgccccccagagacagctgtgctgctggccagctatgctgtgcaggccaagtacggggactacaacaaggagatccacaagccaggctacctggccaatgaccggctgctgccccagagggtgctggagcagcacaagctgaccaaggagcagtgggaggagcgcatccagaactggcatgaggagcaccggggcatgctgagagaagattccatgatggagtacctgaagatcgcccaggacctggagatgtatggagtgaactactttgagatcaagaacaagaagggcacagagctgtggctgggcgtggatgccctgggcctgaacatctatgaacatgatgacaagctgacccccaagattggcttcccctggagcgagatccggaacatctccttcaatgacaagaagtttgtgatcaagcccatcgacaagaaggccccagactttgtgttctacgccccccggctgcgcatcaacaagaggatcctggccctgtgcatgggcaaccacgagctgtacatgagaagaaggaagccagacaccatcgaggtgcagcagatgaaggcccaggcccgggaggagaagcaccagaagcagctggagcgggcccagctggagaatgagaagaagaagcgggagattgctgagaaggagaaggagcgcatcgagcgggagaaggaggagctgatggagcggctgaagcagatcgaggagcagaccatcaaggcccagaaggagctggaggagcagaccaggaaggccctggagctggaccaggagaggaagagggccaaggaggaggccgagcggctggagaaggagaggagagctgctgaggaggccaagagcgccatcgccaagcaggccgctgaccagatgaagaaccaggagcagctggccgctgagctggccgagttcaccgccaagatcgccctgctggaggaggccaagaagaagaaggaggaggaggccacagagtggcagcacaaggcctttgctgcccaggaggacctggagaagaccaaggaggagctgaagacagtgatgtctgcccctcctcctcctcctcctcctcctgtgatccccccaacagaaaatgaacatgatgaacatgatgaaaataatgctgaggccagcgctgagctgagcaatgaaggagtgatgaaccacaggtctgaggaggagcgggtgacagagacccagaagaatgaaagagtgaagaagcagctgcaggccctgagcagcgagctggcccaggccagagatgagaccaagaagacccagaatgatgtgctgcacgcagaaaatgtgaaggccggccgggacaagtacaagaccctgcggcagatccggcagggcaacaccaagcagagaattgatgaatttgaggccatgtggggccccaagctgtatgccctcttccagatgaggagctgccagagcagcatcaagcagatgtag

SEQ ID NO: 93533 - DNA, 1815 bp, Artificial Sequence
  derived and/or modified sequence
atgcccaagcccatcaacgtgcgggtgaccaccatggacgccgagctggaattcgccatccagcctaacaccactggaaagcagctgtttgaccaagttgttaaaacagtggggctcagggaggtgtggttcttcggcttacagtacgtggacagcaagggctattcaacttggcttaaacttaacaagaaagtgactcaacaggacgtgaagaaagagaaccctctgcaattcaagtttagggcaaagttcttccctgaggacgtcagtgaggaacttatacaggaaatcacccagcgtctcttttttctgcaggttaaggaagccattcttaacgacgaaatctactgcccccccgaaaccgcagtgctgttggcgtcctacgcggtgcaggccaagtatggagattacaacaaagagatccataaacctggctacctggccaatgatcgcctgctgccccagcgtgtcctggagcagcacaagctgactaaggagcagtgggaagagaggattcaaaactggcacgaagaacacaggggcatgctgagagaggattccatgatggaatatttaaaaatcgcgcaggatctggagatgtacggagtgaactatttcgagatcaaaaacaagaaaggcacagaactctggctcggcgtcgacgctctcgggctgaacatctatgaacatgacgacaagctgacgcctaaaatcggcttcccctggtcagagattagaaatatttcctttaatgataagaaattcgtgatcaagcccatcgacaagaaggcacccgatttcgtgttttacgccccacgactgcgcataaataagcgcatcttggccttgtgcatggggaaccacgagctttacatgcggcgccgcaagcctgacacaatcgaggtgcaacagatgaaagcacaggctcgggaggagaagcaccagaagcaactagagcgcgcgcagcttgagaacgagaaaaagaagagagagatcgccgagaaagagaaagagcgcattgaaagggagaaggaggagcttatggaaaggctcaagcagatcgaggaacagaccattaaagcccagaaagagctcgaagaacagacccgaaaggccctggagctggatcaagaacgaaagagggcaaaagaggaagctgaaaggttggaaaaggaacggcgagcggcggaagaagctaaatcagcgattgcaaaacaggccgcagatcagatgaaaaatcaggagcagctcgccgcagaactggctgaattcacggctaagatcgctctgctggaagaagctaagaagaaaaaagaggaggaagccactgaatggcagcataaggcatttgctgcccaggaggacctagaaaaaaccaaagaagagctcaaaacagtgatgtcagccccacctccaccgcctcccccccctgtgatcccacctacggaaaacgagcacgatgagcacgacgagaataatgccgaggcttcagccgagctgagcaatgagggcgtaatgaatcaccggagtgaagaggagcgcgtgacggaaacacagaagaacgaacgagtgaagaagcaactgcaggctctttctagtgaactggcccaggcacgggacgaaacgaagaaaacccagaacgatgtgctgcatgcagagaatgtcaaagccgggcgggacaagtataagacgttgcgtcaaattcggcaaggcaatactaagcagagaattgacgagttcgaagctatgtggggcccaaaactgtatgccttgtttcagatgagatcgtgccagagctcgattaagcagatgtag

SEQ ID NO: 93534 - DNA, 1815 bp, Artificial Sequence
  derived and/or modified sequence
atgcccaagcccatcaacgtgcgggtgaccaccatggacgccgagctagaattcgctattcagccaaacacgacaggcaaacagctgttcgaccaggttgtgaaaacagtgggtctcagggaagtgtggtttttcgggctccaatacgtggactccaaaggatattctacttggctaaaattaaacaagaaggtaacacagcaggatgtgaaaaaggagaatcccctccaattcaagtttcgtgcgaaattcttcccagaggacgtgtccgaggagctgatccaggaaatcacccaacgtttgtttttccttcaagtcaaagaggctatcttaaatgacgagatctactgtcctccggaaactgcagttctgctggccagttacgcagtccaggccaagtacggagactacaataaagaaatccataagccaggctacctagccaacgataggctgctcccccagagggtgctggagcaacataaactgacaaaggaacaatgggaggaacgtattcaaaactggcatgaagagcacagaggcatgctgagggaggatagcatgatggaatatttgaagattgctcaagatcttgaaatgtacggcgtgaattattttgaaattaaaaacaagaaaggcactgaactttggcttggggtggatgccttggggcttaacatctacgagcatgatgataagcttactcctaaaattggcttcccatggagcgaaatccgcaacatttcatttaacgataaaaaattcgtcataaagccaatcgataagaaagctccagatttcgtgttttacgcaccacgccttaggattaataaaaggatattggcactgtgcatggggaaccacgagctgtatatgcgcagacggaagccagataccattgaggtgcagcaaatgaaggctcaagctagagaagagaagcaccagaaacagttggagcgggctcaactggagaacgagaagaagaagagggagatcgccgaaaaagaaaaggagaggattgaaagggaaaaagaagaactcatggaaagactgaagcaaatcgaggagcagactataaaagctcagaaggaactggaggaacaaacccggaaggcccttgagctggatcaagagcgtaagcgcgccaaggaagaggccgagcggctggaaaaggagagaagggccgcagaggaggcaaagagcgccattgctaagcaggccgctgaccaaatgaaaaatcaagaacagctagccgccgaactggcagagttcaccgcgaaaatcgccctattggaggaagctaagaaaaagaaggaagaagaagccacagagtggcagcataaagcatttgcagcccaagaagatttggagaagaccaaagaggaactgaagactgttatgagtgcgccccctcccccgcccccgccaccagtcattcctcctacagaaaacgagcacgatgagcacgatgagaacaatgccgaagcctcagctgagctaagtaatgaaggagtcatgaaccaccggtccgaggaagagagagtgaccgaaactcaaaagaacgagcgcgtaaagaagcagctgcaggccctgtcctccgagctcgcccaggcccgtgacgagactaaaaaaacccagaatgatgtgctgcacgctgagaacgtgaaggctgggcgggataagtacaaaactcttcggcagattagacagggcaacactaaacagaggatagacgagttcgaggccatgtgggggcctaaactatatgctctgtttcagatgcggagttgtcaaagcagtataaagcagatgtag

SEQ ID NO: 93535 - DNA, 1815 bp, Artificial Sequence
  derived and/or modified sequence
atgcccaagcccatcaacgtgcgggtgaccaccatggacgccgagctcgaattcgccatacaaccaaatacgaccggcaagcagctgttcgaccaggtagtgaagactgtgggcctgcgcgaagtttggtttttcggcctgcagtacgttgattcgaaaggatatagcacttggttgaagctcaacaaaaaggtcactcagcaagacgtcaagaaagagaatcccctgcagtttaagttccgcgccaaattttttcctgaggatgtatctgaagagttgattcaggaaataactcagcgtctgttctttttgcaggtgaaagaggcaatactgaacgatgagatctactgtcccccagagactgcagtgctgctcgctagttatgctgtgcaagccaagtatggagactacaacaaggagattcataaaccaggttaccttgcaaacgaccgcctgctccctcagagagtcctcgaacaacacaagctcactaaagaacagtgggaggagcgcatccagaattggcacgaagagcataggggcatgctgcgggaggattctatgatggaatatctgaaaatcgcgcaggacctcgagatgtatggggtgaattactttgagatcaaaaataaaaagggcacggaactctggttgggagtcgacgctctgggccttaatatttatgaacacgacgataagcttacaccgaaaattggcttcccatggagtgagatcagaaacatcagcttcaatgacaaaaaattcgtgattaaaccaattgacaagaaggcgcctgacttcgttttctatgcccccagacttaggatcaataaacgcatactcgccttgtgcatggggaaccacgagttgtacatgaggcgacgcaagccagataccattgaagttcagcagatgaaagctcaggctagggaggagaagcatcagaagcagctcgaaagagctcagcttgagaatgaaaagaagaaacgcgagattgcagagaaggagaaggagaggatcgaacgggaaaaggaggaactcatggaaaggttgaagcagattgaggagcaaacaatcaaagcccagaaggagctcgaggagcaaaccagaaaagctctcgaactggaccaggagagaaaacgagctaaggaggaagcggagcgcttggaaaaagaaaggagagctgctgaagaggctaaatctgcaatcgctaagcaggctgctgatcagatgaagaaccaggagcagttagctgctgagctcgccgagttcactgccaaaattgccctgcttgaggaggctaagaaaaagaaagaagaggaggctacagaatggcaacacaaggcgttcgcagcccaggaggacttagaaaaaactaaggaggagctgaaaacagtcatgagtgccccacctcccccgccaccaccacctgttatcccccctactgaaaacgaacatgacgagcacgacgaaaataacgctgaagcttccgccgaactttcaaatgaaggcgtgatgaaccatcgttcagaagaggagagagttaccgaaactcagaaaaatgagcgcgtgaagaaacagctgcaggcgttatccagtgagctcgcgcaggcacgtgatgagacaaagaagactcagaatgacgtcctgcacgccgagaatgtcaaggcggggcgggataaatacaaaacactgagacagatcaggcaaggcaataccaaacaaagaatcgatgaatttgaggctatgtggggtcctaagttgtatgctctgttccaaatgcgctcatgccaatctagcatcaagcagatgtag

SEQ ID NO: 93536 - DNA, 1815 bp, Artificial Sequence
  derived and/or modified sequence
atgcctaagccaatcaatgttagggtcactaccatggacgccgagctggaatttgcaatacagcccaacacaaccggaaagcagctgttcgatcaggtcgtgaaaacggtggggctgcgggaagtgtggttctttgggctgcagtatgttgactccaagggatactcaacctggctgaaattaaataagaaggttactcagcaagacgtgaagaaggagaatcctctgcagttcaagtttcgtgctaagttttttccagaagacgtatctgaggagctcatccaggaaatcacccaaaggctcttttttcttcaagtgaaagaggctatcctcaacgacgagatctattgtccacccgagaccgctgttctacttgctagctacgccgtgcaggccaagtacggagactacaataaggagattcataagcccggttacctggcaaatgacagactgctcccacaaagagttctggagcagcataagctgactaaggaacagtgggaggagagaatacagaattggcatgaggagcacagaggaatgctgcgcgaggatagcatgatggagtatctgaagatagctcaagacctggaaatgtacggcgttaactacttcgaaatcaaaaataaaaaaggcacagaattgtggttgggtgtggatgccctcggtctcaacatatacgagcacgacgacaaactgacccctaagattggtttcccttggtccgaaattaggaacatcagtttcaacgacaaaaagttcgttattaagcccatcgataaaaaagctcctgatttcgtcttctatgctcctcgtttgcggatcaataagaggatcttagctctatgcatgggcaatcatgagctatatatgaggcgtaggaaacccgacactattgaagtccaacagatgaaggcccaagctagagaggagaaacatcagaaacaactcgagagagcccaactcgaaaatgaaaaaaagaaacgggagatcgctgagaaagagaaagaacgcatcgaacgtgaaaaggaagagctcatggagcgtttaaagcaaatagaagagcagacaatcaaggcacaaaaggagcttgaggaacagacgcgcaaagcactggagctggatcaagagcgtaaacgggctaaagaggaggccgaaagactcgagaaagagcggagagccgctgaagaggccaagtccgccatcgctaagcaagccgcagatcagatgaagaaccaagagcagctggccgctgagttagccgaattcaccgccaagatcgccttactggaggaagccaagaaaaaaaaggaagaggaagccactgagtggcagcataaggccttcgcggcacaggaagaccttgaaaagacaaaggaggaactgaagacagtgatgtcagctccacctcctccccctcctccgcctgtcattcccccaaccgaaaatgagcatgatgagcacgatgaaaacaacgccgaagccagtgcggagttgtcaaatgagggggtcatgaaccatcgcagcgaagaagaacgggtaactgaaacacagaaaaacgaacgcgttaaaaagcagcttcaagccctctcaagcgagcttgcccaggcccgtgacgagactaagaaaacccaaaatgatgtcctgcacgcagaaaacgtcaaagcgggtagggataagtacaaaacactgcgtcagatcaggcagggcaacaccaaacagcggattgatgagttcgaagcaatgtggggacccaaactgtacgcattgtttcagatgcgcagttgtcaatccagcattaaacagatgtag

SEQ ID NO: 93537 - DNA, 1815 bp, Artificial Sequence
  derived and/or modified sequence
atgcctaaaccaattaacgttcgggtcaccaccatggatgccgagttagagttcgccattcaaccaaatactactggcaagcaactgttcgatcaagtcgtaaagacggtggggcttagagaagtatggttctttggactccagtacgtggattctaaaggatattcgacttggctgaaactcaataagaaggtcacccagcaagacgtcaagaaagaaaacccccttcaatttaagtttagggctaaattttttcctgaagacgtcagtgaagagctcattcaggagattactcaaaggctgtttttcttacaagtgaaagaagcgattctcaatgacgagatttattgtcctcccgagaccgcagtccttcttgcgtcatatgcagttcaagctaaatatggagattacaataaggaaatccacaaacctgggtatctggccaacgacaggctgcttccacagcgcgttctggagcaacataaacttaccaaagaacagtgggaggaacgcatccaaaattggcatgaagagcatcggggaatgctgcgcgaggacagcatgatggaatacctgaagatcgcccaggacttggagatgtacggcgttaactattttgagattaagaacaagaagggaactgaactgtggcttggggttgacgccctcggcttaaacatctacgaacacgatgacaagctaactcctaaaatcggatttccgtggagcgaaatccgtaacattagcttcaatgataagaagtttgtaattaagcctatcgacaagaaggcccctgattttgtgttttatgctccacgcctccgcatcaacaaacgtattctggctttgtgcatgggcaaccatgagctttacatgcggaggcggaaaccggatactatagaagtgcagcagatgaaggcacaggccagggaagagaaacaccaaaaacagcttgagagggcccagctggagaacgaaaagaaaaagagggaaattgcagagaaggaaaaggagagaatcgaaagagaaaaagaagagttgatggaaagactcaagcagatcgaggagcagacaattaaagcccagaaggaactggaggaacagacccgtaaggctctcgagttggaccaagaacggaaacgcgctaaagaagaggctgagagactcgaaaaggagaggagggctgctgaggaggccaagtctgccattgccaaacaggcagccgaccagatgaaaaatcaggaacagctggctgctgagctggcagagttcactgcgaagatcgccctcctggaggaggctaagaagaaaaaggaggaagaggctaccgagtggcaacacaaggcgttcgcagctcaggaagaccttgaaaagaccaaagaggaactcaaaaccgtgatgtctgcacctccccctcctccgcctccacctgtcatccctcccacagagaatgagcacgacgagcatgatgaaaataatgccgaggcgtctgcagaactgtcgaatgagggagttatgaaccacaggtccgaggaggaacgggtaacagagacgcaaaaaaacgagcgagttaagaagcagctgcaagccctgtcgtcagagctcgcccaggctcgagacgaaactaagaaaactcaaaatgatgtgctgcatgccgaaaacgtgaaggccggaagagataagtacaagaccttgcgacagattcggcaaggcaacaccaagcagcggattgacgagttcgaggctatgtggggccctaaactttacgccttattccagatgagatcctgccagagcagcatcaaacagatgtag

SEQ ID NO: 93538 - DNA, 1815 bp, Artificial Sequence
  derived and/or modified sequence
atgccaaaacccataaatgttcgggtgacaaccatggacgcagaacttgagtttgctattcaaccaaacactaccggcaagcagttgttcgaccaggtggtcaagaccgttggcttgagggaagtgtggttcttcggtctgcagtatgttgacagcaagggctatagcacgtggctcaagttgaacaagaaggtgacacagcaggacgttaagaaggagaatcccttgcaattcaagtttagagccaaattcttcccagaagatgtgtcggaggaacttattcaggaaattacccaacgtcttttcttcctccaggttaaagaagctattctcaacgatgaaatctattgccccccagaaaccgctgtacttttggccagctacgctgtgcaggccaagtacggcgattataacaaagagatacataagcctggttatcttgcgaatgatcggctgttaccccaacgcgttttagaacaacacaaactcacgaaagaacagtgggaggagcgaattcagaactggcacgaagagcataggggcatgcttagagaagatagcatgatggagtatttgaagattgcacaagacctggagatgtatggcgtgaattactttgagattaaaaacaagaagggcactgaactgtggctcggcgtggatgcactagggttaaatatctacgaacatgatgataagttaactccaaagatcggctttccctggagcgaaatcagaaacatatctttcaatgacaagaagttcgtcatcaaacccatcgacaagaaagctcccgactttgtgttctacgctcccaggctaagaatcaataaacgtatccttgccctttgcatgggaaaccacgagctgtacatgagacgccgaaagcccgacactatcgaggttcagcagatgaaggctcaggccagggaggaaaagcaccaaaagcagctcgaaagagcccagttggagaatgaaaaaaagaaaagggaaatcgccgagaaagagaaggaacgtattgagcgtgaaaaggaagagctaatggaacgcctaaaacagattgaggaacaaacgattaaggcacaaaaggagctcgaggagcagaccaggaaggccctggaacttgatcaggagaggaaacgggctaaggaggaggcggagcggctggagaaagaaagaagggctgccgaggaagcaaaatctgccattgctaagcaggcagcagatcaaatgaaaaatcaggagcagctggccgctgaactggccgagtttacggcaaagatcgcacttctggaggaggccaaaaagaagaaggaggaagaggcaacagagtggcagcacaaagctttcgcagcccaggaagaccttgagaaaacaaaggaggaactgaaaactgtgatgagtgccccaccaccgcctcctccaccacccgtgatcccacccacagaaaatgaacacgacgaacacgatgaaaataatgccgaagcttctgcggagttatctaatgaaggcgtgatgaaccaccgctcagaggaagagcgggtgacggagacccaaaagaacgagcgggttaagaaacagctgcaagctctgtcatccgaactcgcccaagcacgagatgaaacaaagaagactcaaaacgacgtgctgcacgctgaaaatgtaaaagctggcagggataagtacaagaccttgcgacagatccggcaaggtaatactaagcagaggatagacgagttcgaagcaatgtgggggccaaagctttacgccttattccagatgaggagttgtcagagctctattaagcagatgtag

SEQ ID NO: 93539 - DNA, 2761 bp, Artificial Sequence
  derived and/or modified sequence
ttggcgctcagtccgcggcgcgaggacggccggccggcagggggaggcgggggggcgccgggcagccccgccttttcccgcggaggcgccgagcggccatattgcggagctgtctgcggtggcggcggcgcctctcgtctcccgcgggccagcgctcgcaccaccgcttctccctccctgtcgcagccgcgccgccgcgcagcgccccagccacacgccggcgggcagaagccgcccgctctccggaaagtgataacagaattcattgaagtggagaatttttaaagaaggtaacaaaaagagaaagaaaatgccgaaaccaatcaacgtaagagtaactacaatggatgctgagctggaatttgccattcagcccaatacaactggcaaacaactttttgaccaggtggtgaaaacagttggtttgcgtgaggtctggttttttgggctgcagtatgtagacagcaaaggttattctacatggcttaaactaaataaaaaggtaacacagcaggatgttaaaaaagagaatcctttacagttcaagtttagagctaaattctttcctgaagatgtttctgaggaattaattcaagaaataacccagagactcttcttcttgcaagttaaagaagccatcttaaatgatgagatatattgcccgccagaaactgcagttcttttggcttcctatgctgtccaagccaagtatggagattacaataaagagattcataagccaggctacctggctaatgatagactcctaccccagcgtgtattggaacaacacaaactaacaaaagaacagtgggaagaaagaatacagaactggcatgaagaacatagaggaatgttaagggaggattctatgatggaatacctgaagattgcacaagatctagaaatgtatggagtcaactattttgaaataaaaaataaaaaaggaactgaattgtggctaggtgttgatgctttgggtctgaatatttatgagcatgacgacaagttaacacctaaaattggttttccctggagtgaaatcagaaatatttcatttaatgacaaaaaatttgttataaagccaatcgacaaaaaggcacctgattttgtgttttatgcacctcgtctgagaatcaataagcggattttggccttatgtatgggaaaccatgaactatacatgcgaagaaggaagcctgatactattgaagtacaacagatgaaggctcaggctagggaggagaaacatcagaagcagttggaaagggcacaattagagaatgaaaagaagaaaagagaaatagcagaaaaggaaaaggaaagaatagaacgtgaaaaggaagagctaatggaacgtctaaaacaaattgaagagcagacaattaaagctcagaaagaactagaagaacagactcgaaaagctctagaactggatcaagaacgaaaacgagcaaaagaagaagcagaacgacttgaaaaggagcgtcgagctgctgaagaggcaaagtctgccatagcaaaacaagctgccgaccagatgaagaatcaggagcagctagcagcagaacttgctgaattcactgccaagattgcacttctagaggaagccaagaagaaaaaggaagaggaagctactgagtggcaacacaaagcttttgcagcccaggaagacttggaaaagaccaaagaagagttaaaaactgtgatgtctgccccccctccacctccaccaccaccagtcattcctccaacagaaaacgaacatgatgaacacgatgagaataatgctgaagctagtgctgaattatcaaatgaaggggtaatgaaccatagaagcgaggaagaacgtgtaaccgaaacacagaaaaatgagcgtgttaagaagcaacttcaggcattaagttcagaattagcccaagccagagatgaaaccaagaaaacacaaaatgatgttcttcatgctgagaatgttaaagcaggccgtgataagtacaagactctgcgacagattcgacaaggcaatacaaagcagcgtatcgatgagtttgaagcaatgtggggacccaaactgtatgcattgttccagatgcgctcttgccaaagcagcataaagcaaatgtaacccttaggaagaaggctccctccctcactaggcccctggctactgacttatgggaagctttaggataaggacatacctggtgttctgaatgtgtatatcccccaaagtctgcaatctcagctggaactggatggaccagtattccattacccagggccctggctcatggttctctcctcttctcagtttactgttggatttccctttcttgctattctctttctctccagacccctctcaattgcctttcctaaagacagaccttagcaagatgggccaggacttgggacttcgcacagcaccctgcagtcccaagccagcatctactgcaccccatcttcaggactctatcccccaaacatgctggaaggcatcagcttatgagaacccacttttttctgcatgactagcttgtaaggaagaatctatggacaggatttccaagaatttcccactttttcaaaaaatgtatgtgacttatatttggcttcaatccaagagcaaactcagtggtgaacagctccatttctgtgcacatgttggtggaatctgcagaaatcgatgcaacatttctttcctgtctgggctgtttgtataattgtatataaatgtagcaataaatatattctaacatca

SEQ ID NO: 93540 - DNA, 2511 bp, Artificial Sequence
  derived and/or modified sequence
ttggcgctcagtccgcggcgcgaggacggccggccggcagggggaggcgggggggcgccgggcagccccgccttttcccgcggaggcgccgagcggccatattgcggagctgtctgcggtggcggcggcgcctctcgtctcccgcgggccagcgctcgcaccaccgcttctccctccctgtcgcagccgcgccgccgcgcagcgccccagccacacgccggcgggcagaagccgcccgctctccggaaagtgataacagaattcattgaagtggagaatttttaaagaaggtaacaaaaagagaaagaaaatgccgaaaccaatcaacgtaagagtaactacaatggatgctgagctggaatttgccattcagcccaatacaactggcaaacaactttttgaccaggtggtgaaaacagttggtttgcgtgaggtctggttttttgggctgcagtatgtagacagcaaaggttattctacatggcttaaactaaataaaaaggtaacacagcaggatgttaaaaaagagaatcctttacagttcaagtttagagctaaattctttcctgaagatgtttctgaggaattaattcaagaaataacccagagactcttcttcttgcaagttaaagaagccatcttaaatgatgagatatattgcccgccagaaactgcagttcttttggcttcctatgctgtccaagccaagtatggagattacaataaagagattcataagccaggctacctggctaatgatagactcctaccccagcgtgtattggaacaacacaaactaacaaaagaacagtgggaagaaagaatacagaactggcatgaagaacatagaggaatgttaagggaggattctatgatggaatacctgaagattgcacaagatctagaaatgtatggagtcaactattttgaaataaaaaataaaaaaggaactgaattgtggctaggtgttgatgctttgggtctgaatatttatgagcatgacgacaagttaacacctaaaattggttttccctggagtgaaatcagaaatatttcatttaatgacaaaaaatttgttataaagccaatcgacaaaaaggcacctgattttgtgttttatgcacctcgtctgagaatcaataagcggattttggccttatgtatgggaaaccatgaactatacatgcgaagaaggaagcctgatactattgaagtacaacagatgaaggctcaggctagggaggagaaacatcagaagcagttggaaagggcacaattagagaatgaaaagaagaaaagagaaatagcagaaaaggaaaaggaaagaatagaacgtgaaaaggaagagctaatggaacgtctaaaacaaattgaagagcagacaattaaagctcagaaagaactagaagaacagactcgaaaagctctagaactggatcaagaacgaaaacgagcaaaagaagaagcagaacgacttgaaaaggagcgtcgagctgctgaagaggcaaagtctgccatagcaaaacaagctgccgaccagatgaagaatcaggagcagctagcagcagaacttgctgaattcactgccaagattgcacttctagaggaagccaagaagaaaaaggaagaggaagctactgagtggcaacacaaagcttttgcagcccaggaagacttggaaaagaccaaagaagagttaaaaactgtgatgtctgccccccctccacctccaccaccaccagtcattcctccaacagaaaacgaacatgatgaacacgatgagaataatgctgaagctagtgctgaattatcaaatgaaggggtaatgaaccatagaagcgaggaagaacgtgtaaccgaaacacagaaaaatgagcgtgttaagaagcaacttcaggcattaagttcagaattagcccaagccagagatgaaaccaagaaaacacaaaatgatgttcttcatgctgagaatgttaaagcaggccgtgataagtacaagactctgcgacagattcgacaaggcaatacaaagcagcgtatcgatgagtttgaagcaatgtggggacccaaactgtatgcattgttccagatgcgctcttgccaaagcagcataaagcaaatgtaacccttaggaagaaggctccctccctcactagggctacaaagaatgctagagtggagacaagagtccagactctgaaataacctcctttggacacagaagctaccactgttgcttatcagacgcagcgggccctgggtttttctggggccttaagcagtgaaccctggtcagctggcctgagtcccaacccaagcccatcaccacaagcctcaagacaggaagatctcagtgaaacctttcctctaatccaagtgacatcattgtcgcaggtgtttgtacatgaaagcagagtgatgaaggtgtgtgggtccacggaagaagtaaaaatacagcactagttcatatttttcctagtctctccctgttcccaggtaaagttatagcat

SEQ ID NO: 93541 - DNA, 2558 bp, Artificial Sequence
  derived and/or modified sequence
ttggcgctcagtccgcggcgcgaggacggccggccggcagggggaggcgggggggcgccgggcagccccgccttttcccgcggaggcgccgagcggccatattgcggagctgtctgcggtggcggcggcgcctctcgtctcccgcgggccagcgctcgcaccaccgcttctccctccctgtcgcagccgcgccgccgcgcagcgccccagccacacgccggcgggcagaagccgcccgctctccggaaagtgataacagaattcattgaagtggagaatttttaaagaaggtaacaaaaagagaaagaaaatgccgaaaccaatcaacgtaagagtaactacaatggatgctgagctggaatttgccattcagcccaatacaactggcaaacaactttttgaccaggtggtgaaaacagttggtttgcgtgaggtctggttttttgggctgcagtatgtagacagcaaaggttattctacatggcttaaactaaataaaaaggtaacacagcaggatgttaaaaaagagaatcctttacagttcaagtttagagctaaattctttcctgaagatgtttctgaggaattaattcaagaaataacccagagactcttcttcttgcaagttaaagaagccatcttaaatgatgagatatattgcccgccagaaactgcagttcttttggcttcctatgctgtccaagccaagtatggagattacaataaagagattcataagccaggctacctggctaatgatagactcctaccccagcgtgtattggaacaacacaaactaacaaaagaacagtgggaagaaagaatacagaactggcatgaagaacatagaggaatgttaagggaggattctatgatggaatacctgaagattgcacaagatctagaaatgtatggagtcaactattttgaaataaaaaataaaaaaggaactgaattgtggctaggtgttgatgctttgggtctgaatatttatgagcatgacgacaagttaacacctaaaattggttttccctggagtgaaatcagaaatatttcatttaatgacaaaaaatttgttataaagccaatcgacaaaaaggcacctgattttgtgttttatgcacctcgtctgagaatcaataagcggattttggccttatgtatgggaaaccatgaactatacatgcgaagaaggaagcctgatactattgaagtacaacagatgaaggctcaggctagggaggagaaacatcagaagcagttggaaagggcacaattagagaatgaaaagaagaaaagagaaatagcagaaaaggaaaaggaaagaatagaacgtgaaaaggaagagctaatggaacgtctaaaacaaattgaagagcagacaattaaagctcagaaagaactagaagaacagactcgaaaagctctagaactggatcaagaacgaaaacgagcaaaagaagaagcagaacgacttgaaaaggagcgtcgagctgctgaagaggcaaagtctgccatagcaaaacaagctgccgaccagatgaagaatcaggagcagctagcagcagaacttgctgaattcactgccaagattgcacttctagaggaagccaagaagaaaaaggaagaggaagctactgagtggcaacacaaagcttttgcagcccaggaagacttggaaaagaccaaagaagagttaaaaactgtgatgtctgccccccctccacctccaccaccaccagtcattcctccaacagaaaacgaacatgatgaacacgatgagaataatgctgaagctagtgctgaattatcaaatgaaggggtaatgaaccatagaagcgaggaagaacgtgtaaccgaaacacagaaaaatgagcgtgttaagaagcaacttcaggcattaagttcagaattagcccaagccagagatgaaaccaagaaaacacaaaatgatgttcttcatgctgagaatgttaaagcaggccgtgataagtacaagactctgcgacagattcgacaaggcaatacaaagcagcgtatcgatgagtttgaagcaatgtggggacccaaactgtatgcattgttccagatgcgctcttgccaaagcagcataaagcaaatgtaacccttaggaagaaggctccctccctcactaggccactgctgcaggacagtgaagctgacttaaaatgcccctgccctgggctacaaagaatgctagagtggagacaagagtccagactctgaaataacctcctttggacacagaagctaccactgttgcttatcagacgcagcgggccctgggtttttctggggccttaagcagtgaaccctggtcagctggcctgagtcccaacccaagcccatcaccacaagcctcaagacaggaagatctcagtgaaacctttcctctaatccaagtgacatcattgtcgcaggtgtttgtacatgaaagcagagtgatgaaggtgtgtgggtccacggaagaagtaaaaatacagcactagttcatatttttcctagtctctccctgttcccaggtaaagttatagcat

SEQ ID NO: 93542 - protein, 447 aa, Artificial Sequence
  derived and/or modified sequence
MLSWNLPFSPIQLANNFLTSVLEQHKLTKEQWEERIQNWHEEHRGMLREDSMMEYLKIAQDLEMYGVNYFEIKNKKGTELWLGVDALGLNIYEHDDKLTPKIGFPWSEIRNISFNDKKFVIKPIDKKAPDFVFYAPRLRINKRILALCMGNHELYMRRRKPDTIEVQQMKAQAREEKHQKQLERAQLENEKKKREIAEKEKERIEREKEELMERLKQIEEQTIKAQKELEEQTRKALELDQERKRAKEEAERLEKERRAAEEAKSAIAKQAADQMKNQEQLAAELAEFTAKIALLEEAKKKKEEEATEWQHKAFAAQEDLEKTKEELKTVMSAPPPPPPPPVIPPTENEHDEHDENNAEASAELSNEGVMNHRSEEERVTETQKNERVKKQLQALSSELAQARDETKKTQNDVLHAENVKAGRDKYKTLRQIRQGNTKQRIDEFEAM

SEQ ID NO: 93543 - DNA, 1344 bp, Artificial Sequence
  derived and/or modified sequence
atgctgagctggaacctgcccttcagccccatccagctggccaacaacttcctgaccagcgtgctggagcagcacaagctgaccaaggagcagtgggaggagagaatccagaactggcacgaggagcacagaggcatgctgagagaggacagcatgatggagtacctgaagatcgcccaggacctggagatgtacggcgtgaactacttcgagatcaagaacaagaagggcaccgagctgtggctgggcgtggacgccctgggcctgaacatctacgagcacgacgacaagctgacccccaagatcggcttcccctggagcgagatcagaaacatcagcttcaacgacaagaagttcgtgatcaagcccatcgacaagaaggcccccgacttcgtgttctacgcccccagactgagaatcaacaagagaatcctggccctgtgcatgggcaaccacgagctgtacatgagaagaagaaagcccgacaccatcgaggtgcagcagatgaaggcccaggccagagaggagaagcaccagaagcagctggagagagcccagctggagaacgagaagaagaagagagagatcgccgagaaggagaaggagagaatcgagagagagaaggaggagctgatggagagactgaagcagatcgaggagcagaccatcaaggcccagaaggagctggaggagcagaccagaaaggccctggagctggaccaggagagaaagagagccaaggaggaggccgagagactggagaaggagagaagagccgccgaggaggccaagagcgccatcgccaagcaggccgccgaccagatgaagaaccaggagcagctggccgccgagctggccgagttcaccgccaagatcgccctgctggaggaggccaagaagaagaaggaggaggaggccaccgagtggcagcacaaggccttcgccgcccaggaggacctggagaagaccaaggaggagctgaagaccgtgatgagcgccccccccccccccccccccccccccgtgatcccccccaccgagaacgagcacgacgagcacgacgagaacaacgccgaggccagcgccgagctgagcaacgagggcgtgatgaaccacagaagcgaggaggagagagtgaccgagacccagaagaacgagagagtgaagaagcagctgcaggccctgagcagcgagctggcccaggccagagacgagaccaagaagacccagaacgacgtgctgcacgccgagaacgtgaaggccggcagagacaagtacaagaccctgagacagatcagacagggcaacaccaagcagagaatcgacgagttcgaggccatgtag

SEQ ID NO: 93544 - DNA, 1344 bp, Artificial Sequence
  derived and/or modified sequence
atgcttagttggaacttgcccttttcacccatccagcttgccaataacttcctgacttctgtgctggaacagcacaagcttaccaaagaacagtgggaagagcgaatccagaattggcacgaagaacaccgggggatgctgcgggaagattcaatgatggagtacctgaaaattgcccaggacttggaaatgtacggcgtgaactattttgagatcaagaataagaagggaacagagctgtggctgggagtcgacgccttgggtcttaacatctatgaacacgacgataaacttacgcccaaaataggattcccgtggtcagaaatcagaaacatcagctttaacgataagaaattcgtgatcaaaccaatagataagaaggcacccgattttgtgttctacgcacctcgtctccgcataaacaaaaggatcctggctctgtgcatgggcaatcacgagctctatatgaggaggaggaaaccggacacaatcgaagtgcagcagatgaaagcccaagctcgggaagagaaacatcaaaaacaacttgaacgcgcacaactagagaacgaaaaaaagaaacgggagatcgcagagaaggagaaggaacggatcgaaagggaaaaagaagagctcatggagaggcttaaacagatcgaggagcagaccattaaggcacaaaaggagctggaggaacagacaaggaaagcccttgagctggaccaagaaaggaaacgtgccaaagaggaggctgagcgtcttgagaaggagcgacgagcggccgaggaggcgaaaagcgcaatcgccaagcaggccgccgatcagatgaagaatcaagaacagctagccgctgagctggccgagttcaccgctaaaatagccctgctagaagaggccaagaaaaaaaaagaagaggaagctactgagtggcagcataaggcgttcgccgctcaggaagacttagagaaaacaaaggaggagctgaagacggtaatgagtgcaccccccccccccccacctccacctgtcatccccccaacagagaatgaacacgatgaacacgatgaaaacaatgctgaagctagcgccgagctcagcaatgaaggcgtcatgaatcatagaagcgaagaggaaagagtgacagagactcagaagaatgagagggttaaaaaacagctacaagcacttagcagtgagctggctcaggctcgcgacgagacaaagaagacccagaatgacgtgctgcacgcagaaaacgtgaaggctgggagagacaagtataagactctgagacagatcagacagggcaataccaagcagagaatcgatgaatttgaagccatgtag

SEQ ID NO: 93545 - DNA, 1344 bp, Artificial Sequence
  derived and/or modified sequence
atgctgtcctggaacctgcccttcagccccatccagctggccaacaacttcctgacctctgtgctggagcagcacaagctgaccaaggagcagtgggaggagcgcatccagaactggcatgaggagcaccggggcatgctgagagaagattccatgatggagtacctgaagatcgcccaggacctggagatgtatggagtgaactactttgagatcaagaacaagaagggcacagagctgtggctgggcgtggatgccctgggcctgaacatctatgaacatgatgacaagctgacccccaagattggcttcccctggagcgagatccggaacatctccttcaatgacaagaagtttgtgatcaagcccatcgacaagaaggccccagactttgtgttctacgccccccggctgcgcatcaacaagaggatcctggccctgtgcatgggcaaccacgagctgtacatgagaagaaggaagccagacaccatcgaggtgcagcagatgaaggcccaggcccgggaggagaagcaccagaagcagctggagcgggcccagctggagaatgagaagaagaagcgggagattgctgagaaggagaaggagcgcatcgagcgggagaaggaggagctgatggagcggctgaagcagatcgaggagcagaccatcaaggcccagaaggagctggaggagcagaccaggaaggccctggagctggaccaggagaggaagagggccaaggaggaggccgagcggctggagaaggagaggagagctgctgaggaggccaagagcgccatcgccaagcaggccgctgaccagatgaagaaccaggagcagctggccgctgagctggccgagttcaccgccaagatcgccctgctggaggaggccaagaagaagaaggaggaggaggccacagagtggcagcacaaggcctttgctgcccaggaggacctggagaagaccaaggaggagctgaagacagtgatgtctgcccctcctcctcctcctcctcctcctgtgatccccccaacagaaaatgaacatgatgaacatgatgaaaataatgctgaggccagcgctgagctgagcaatgaaggagtgatgaaccacaggtctgaggaggagcgggtgacagagacccagaagaatgaaagagtgaagaagcagctgcaggccctgagcagcgagctggcccaggccagagatgagaccaagaagacccagaatgatgtgctgcacgcagaaaatgtgaaggccggccgggacaagtacaagaccctgcggcagatccggcagggcaacaccaagcagagaattgatgaatttgaggccatgtag

SEQ ID NO: 93546 - DNA, 1344 bp, Artificial Sequence
  derived and/or modified sequence
atgctgagctggaacctgcccttcagccccatccagctggccaacaacttcctgacaagcgttctggagcagcacaaactaactaaggaacagtgggaagaacggattcagaattggcatgaagaacatcggggtatgctgcgtgaagatagtatgatggagtatctgaagattgctcaagatttagagatgtatggagtaaattacttcgaaatcaaaaataagaagggtaccgaactgtggttgggagtcgacgctctgggcctaaatatttacgagcatgatgacaaactcacccctaaaatagggttcccctggagcgaaattcgcaacatttcttttaacgacaagaaatttgtcatcaagcccatcgacaagaaagccccagatttcgtgttttacgccccgaggctgagaattaacaagcggattttggccttgtgtatggggaaccacgaactttacatgagaagaaggaagccagacacaatagaggtccaacagatgaaagcacaggcaagagaggagaaacaccaaaagcagctggagagagcccagctggagaatgagaagaagaaaagggaaatagccgaaaaagaaaaagagagaattgagagagagaaagaggaacttatggagaggctcaagcagatcgaggagcagactatcaaagcccaaaaagagttggaagagcagactcggaaggccttggagcttgatcaggaaagaaaacgagccaaggaggaggcagaacgcttggagaaggagagaagggccgctgaggaagcgaaatcggccattgccaagcaggccgccgaccagatgaaaaaccaagaacagttggctgcggagcttgctgaattcacggctaagatagctctgctcgaagaagcaaaaaagaagaaggaggaggaggctaccgagtggcagcacaaggccttcgccgcacaagaagatctggaaaagaccaaggaagaactaaagaccgtgatgtcagctcctcccccccccccacccccaccagtgatcccacctacagagaacgagcacgatgagcatgatgagaacaacgcagaagcatccgccgagctgagtaatgagggcgtgatgaatcatagatctgaggaggagagagtcacagagactcagaaaaacgaacgagtgaaaaaacaactgcaggctctctctagtgaattagctcaggcgcgagacgagacgaagaaaacacagaatgacgtgttgcacgccgaaaatgtgaaggctggacgggacaagtataagacactgagacagattcggcaaggcaacacgaagcagcgcatcgatgaattcgaggccatgtag

SEQ ID NO: 93547 - DNA, 1344 bp, Artificial Sequence
  derived and/or modified sequence
atgctgtcatggaaccttcccttctcacccattcagctggcaaataattttctgacgtcggtgctggaacagcataagttaactaaggaacaatgggaggaaaggatccagaattggcacgaagagcataggggaatgctaagagaagattcgatgatggaatacctcaagatcgcccaagatttggagatgtacggtgtgaattacttcgagatcaaaaataaaaaggggacagagttgtggttgggtgtcgacgctctgggcctgaacatctacgaacatgacgacaagcttacacctaagatagggtttccttggtcagagatccgtaatatctcattcaatgataaaaaattcgtgatcaagcccatcgacaagaaggccccagatttcgttttttacgcacctaggctccggatcaacaaacgcatattagctctctgcatgggaaatcacgaactttacatgcgacgaagaaagccagatactatagaggtgcagcaaatgaaggcccaggccagagaggaaaagcaccagaaacagctcgaaagagcccagcttgagaacgagaaaaaaaaacgcgagattgctgagaaggagaaggaacgaattgagcgagaaaaggaggagctgatggaacgattgaagcaaatcgaggagcaaactataaaagcgcaaaaggagctagaagagcaaaccagaaaggcactggagctggaccaggaacgcaagcgcgcaaaggaagaggcagagcggctggagaaagagcggagagctgctgaagaggccaaatcagcaattgctaagcaggcagccgaccagatgaagaaccaggagcagctggcagccgaattggccgagttcactgccaaaattgcactgctggaagaagccaagaaaaaaaaggaagaggaagctaccgagtggcaacataaagcctttgcagctcaagaagacctcgagaaaaccaaagaggaactaaagaccgttatgagcgctccccctccccctccgccaccccctgttataccccctaccgaaaatgagcatgacgaacatgacgagaataacgctgaagcttccgctgagctgtccaatgaaggagttatgaaccacaggagcgaggaagaacgagtgaccgaaacacagaaaaacgaaagggtaaagaaacagctgcaggccttgtcatcagaactagcccaggccagagatgaaacaaaaaagacccaaaacgacgtgcttcatgccgaaaatgttaaagcaggccgtgacaaatataaaactttgcgtcagatcagacaagggaacaccaagcagaggatagacgagttcgaagccatgtag

SEQ ID NO: 93548 - DNA, 1725 bp, Artificial Sequence
  derived and/or modified sequence
aagaaggtaacaaaaagagaaagaaaatgccgaaaccaatcaacgtaagagtaactacaatggatgctgagctggaatttgccattcagcccaatacaactggcaaacaactttttgaccagtgtattggaacaacacaaactaacaaaagaacagtgggaagaaagaatacagaactggcatgaagaacatagaggaatgttaagggaggattctatgatggaatacctgaagattgcacaagatctagaaatgtatggagtcaactattttgaaataaaaaataaaaaaggaactgaattgtggctaggtgttgatgctttgggtctgaatatttatgagcatgacgacaagttaacacctaaaattggttttccctggagtgaaatcagaaatatttcatttaatgacaaaaaatttgttataaagccaatcgacaaaaaggcacctgattttgtgttttatgcacctcgtctgagaatcaataagcggattttggccttatgtatgggaaaccatgaactatacatgcgaagaaggaagcctgatactattgaagtacaacagatgaaggctcaggctagggaggagaaacatcagaagcagttggaaagggcacaattagagaatgaaaagaagaaaagagaaatagcagaaaaggaaaaggaaagaatagaacgtgaaaaggaagagctaatggaacgtctaaaacaaattgaagagcagacaattaaagctcagaaagaactagaagaacagactcgaaaagctctagaactggatcaagaacgaaaacgagcaaaagaagaagcagaacgacttgaaaaggagcgtcgagctgctgaagaggcaaagtctgccatagcaaaacaagctgccgaccagatgaagaatcaggagcagctagcagcagaacttgctgaattcactgccaagattgcacttctagaggaagccaagaagaaaaaggaagaggaagctactgagtggcaacacaaagcttttgcagcccaggaagacttggaaaagaccaaagaagagttaaaaactgtgatgtctgccccccctccacctccaccaccaccagtcattcctccaacagaaaacgaacatgatgaacacgatgagaataatgctgaagctagtgctgaattatcaaatgaaggggtaatgaaccatagaagcgaggaagaacgtgtaaccgaaacacagaaaaatgagcgtgttaagaagcaacttcaggcattaagttcagaattagcccaagccagagatgaaaccaagaaaacacaaaatgatgttcttcatgctgagaatgttaaagcaggccgtgataagtacaagactctgcgacagattcgacaaggcaatacaaagcagcgtatcgatgagtttgaagcaatgtgagagctgttattttgcatatatgttcttcataagctgaaccaccaacagagaaaagcaggcctttgcagatatgatggaatgcatcccaccttgccaaagcacttacaccagtttgactgtgctagctaaaagacaaatttaaggggagctcttcaacattaaggcagtatgatatcatgcttggttttcttttttcttttggtccagggaatggagaatggtgttccattgcctcttttcacattttttttctttttcttttttttttctgttgaagattaacactaattatcacgtctgacaaatgtgtatgtgtgg

SEQ ID NO: 93549 - protein, 257 aa, Artificial Sequence
  derived and/or modified sequence
MERLKQIEEQTIKAQKELEEQTRKALELDQERKRAKEEAERLEKERRAAEEAKSAIAKQAADQMKNQEQLAAELAEFTAKIALLEEAKKKKEEEATEWQHKAFAAQEDLEKTKEELKTVMSAPPPPPPPPVIPPTENEHDEHDENNAEASAELSNEGVMNHRSEEERVTETQKNERVKKQLQALSSELAQARDETKKTQNDVLHAENVKAGRDKYKTLRQIRQGNTKQRIDEFEAMWGPKLYALFQMRSCQSSIKQM

SEQ ID NO: 93550 - protein, 253 aa, Artificial Sequence
  derived and/or modified sequence
GGRIARAHEFEAAVSFCTSAWATERDPVSRKQRELEEQTRKALELDQERKRAKEEAERLEKERRAAEEAKSAIAKQAADQMKNQEQLAAELAEFTAKIALLEEAKKKKEEEATEWQHKAFAAQEDLEKTKEELKTVMSAPPPPPPPPVIPPTENEHDEHDENNAEASAELSNEGVMNHRSEEERVTETQKNERVKKQLQALSSELAQARDETKKTQNDVLHAENVKAGRDKYKTLRQIRQGNTKQRIDEFEAM

SEQ ID NO: 93551 - DNA, 774 bp, Artificial Sequence
  derived and/or modified sequence
atggagagactgaagcagatcgaggagcagaccatcaaggcccagaaggagctggaggagcagaccagaaaggccctggagctggaccaggagagaaagagagccaaggaggaggccgagagactggagaaggagagaagagccgccgaggaggccaagagcgccatcgccaagcaggccgccgaccagatgaagaaccaggagcagctggccgccgagctggccgagttcaccgccaagatcgccctgctggaggaggccaagaagaagaaggaggaggaggccaccgagtggcagcacaaggccttcgccgcccaggaggacctggagaagaccaaggaggagctgaagaccgtgatgagcgccccccccccccccccccccccccccgtgatcccccccaccgagaacgagcacgacgagcacgacgagaacaacgccgaggccagcgccgagctgagcaacgagggcgtgatgaaccacagaagcgaggaggagagagtgaccgagacccagaagaacgagagagtgaagaagcagctgcaggccctgagcagcgagctggcccaggccagagacgagaccaagaagacccagaacgacgtgctgcacgccgagaacgtgaaggccggcagagacaagtacaagaccctgagacagatcagacagggcaacaccaagcagagaatcgacgagttcgaggccatgtggggccccaagctgtacgccctgttccagatgagaagctgccagagcagcatcaagcagatgtag

SEQ ID NO: 93552 - DNA, 762 bp, Artificial Sequence
  derived and/or modified sequence
ggcggcagaatcgccagagcccacgagttcgaggccgccgtgagcttctgcaccagcgcctgggccaccgagagagaccccgtgagcagaaagcagagagagctggaggagcagaccagaaaggccctggagctggaccaggagagaaagagagccaaggaggaggccgagagactggagaaggagagaagagccgccgaggaggccaagagcgccatcgccaagcaggccgccgaccagatgaagaaccaggagcagctggccgccgagctggccgagttcaccgccaagatcgccctgctggaggaggccaagaagaagaaggaggaggaggccaccgagtggcagcacaaggccttcgccgcccaggaggacctggagaagaccaaggaggagctgaagaccgtgatgagcgccccccccccccccccccccccccccgtgatcccccccaccgagaacgagcacgacgagcacgacgagaacaacgccgaggccagcgccgagctgagcaacgagggcgtgatgaaccacagaagcgaggaggagagagtgaccgagacccagaagaacgagagagtgaagaagcagctgcaggccctgagcagcgagctggcccaggccagagacgagaccaagaagacccagaacgacgtgctgcacgccgagaacgtgaaggccggcagagacaagtacaagaccctgagacagatcagacagggcaacaccaagcagagaatcgacgagttcgaggccatgtag

SEQ ID NO: 93553 - DNA, 774 bp, Artificial Sequence
  derived and/or modified sequence
atggagcgtttgaagcagattgaggaacagacgataaaggcacagaaagaactcgaagagcaaactaggaaagccctcgagctcgatcaggagaggaaacgggcaaaagaggaagctgagaggttggagaaagagagacgcgccgccgaggaagctaaatccgctatcgcaaagcaggcggccgaccagatgaagaatcaggaacagctagccgcggagctcgccgagtttaccgccaagatcgctctgcttgaagaagccaagaagaaaaaagaagaggaggccactgagtggcagcacaaggctttcgccgcacaagaggatctggaaaagaccaaggaggagctgaagacagtgatgagtgcgccccctcctccccctccacccccagttatcccccccacagaaaacgaacatgatgagcacgatgagaataacgctgaggcttccgctgaactgtctaacgagggtgtgatgaatcacagatcagaggaagaaagagtcactgagactcaaaagaacgagcgcgtgaagaagcagctgcaggctctgtcatctgaactggctcaagccagagatgaaactaagaaaacacagaacgatgtgctgcacgccgagaatgtcaaagccggcagggacaagtataagaccttaagacagattcgccagggcaacactaaacagcggatagacgaatttgaggcaatgtggggccccaaattatatgcactcttccaaatgaggtcctgtcaaagtagcattaaacagatgtag

SEQ ID NO: 93554 - DNA, 762 bp, Artificial Sequence
  derived and/or modified sequence
ggcggccggattgcacgggcccatgagtttgaagctgccgtgtcgttttgtaccagcgcgtgggcaacagaacgtgatccagtaagcaggaagcagcgcgagctagaagaacagaccaggaaagccctggagttagaccaggaacgcaagcgggccaaagaagaggcggaacgcctcgagaaggagcggcgtgccgccgaggaggctaagtctgccattgccaagcaggccgccgaccagatgaaaaatcaggaacaattagctgccgagcttgcggaattcactgctaagatagcattgttggaggaggcaaaaaagaaaaaagaggaagaggcaacagagtggcagcacaaggctttcgctgcccaggaggatttagaaaagacgaaagaagaattgaagacagtgatgtccgctccacccccaccacctccgcctccagtcataccgccaacagagaacgagcacgacgagcatgacgaaaacaatgctgaagcgtccgccgaactctccaatgagggggtgatgaatcaccgcagtgaggaggagagggtgactgaaacccagaagaacgaacgggttaagaaacagctccaggctttatcttccgagctggctcaggcgcgtgatgagacaaaaaaaacacagaacgacgtgctgcacgccgaaaacgttaaagctgggagagacaaatacaaaacactgagacagattaggcagggtaacaccaaacagagaattgatgagttcgaagccatgtag

SEQ ID NO: 93555 - DNA, 774 bp, Artificial Sequence
  derived and/or modified sequence
atggagcggctgaagcagatcgaggagcagaccatcaaggcccagaaggagctggaggagcagaccaggaaggccctggagctggaccaggagaggaagagggccaaggaggaggccgagcggctggagaaggagcggcgggctgctgaggaggccaagagcgccatcgccaagcaggccgctgaccagatgaagaaccaggagcagctggccgctgagctggccgagttcaccgccaagatcgccctgctggaggaggccaagaagaagaaggaggaggaggccacagagtggcagcacaaggcctttgctgcccaggaggacctggagaagaccaaggaggagctgaagacagtgatgtctgcccctcctcctcctcctcctcctcctgtgattcctcccacagaaaatgaacatgatgaacatgatgagaacaatgctgaggccagcgctgagctgagcaatgaaggagtgatgaaccacaggtctgaggaggagcgggtgacagagacccagaagaatgaaagagtgaagaagcagctgcaggccctgagcagcgagctggcccaggccagagatgagaccaagaagacccagaatgatgtgctgcatgctgaaaatgtgaaggccggccgggacaagtacaagaccctgcggcagatccggcagggcaacaccaagcagagaattgatgaatttgaggccatgtggggccccaagctgtatgccctcttccagatgaggagctgccagagcagcatcaagcagatgtag

SEQ ID NO: 93556 - DNA, 762 bp, Artificial Sequence
  derived and/or modified sequence
gggggccgcatcgcccgggcccacgagtttgaggccgctgtgtccttctgcaccagcgcctgggccacagagcgggaccctgtgtccaggaagcagcgggagctggaggagcagaccaggaaggccctggagctggaccaggagaggaagagggccaaggaggaggccgagcggctggagaaggagaggagagctgctgaggaggccaagagcgccatcgccaagcaggccgctgaccagatgaagaaccaggagcagctggccgctgagctggccgagttcaccgccaagatcgccctgctggaggaggccaagaagaagaaggaggaggaggccacagagtggcagcacaaggcctttgctgcccaggaggacctggagaagaccaaggaggagctgaagacagtgatgtctgcccctcctcctcctcctcctcctcctgtgatccccccaacagaaaatgaacatgatgaacatgatgaaaataatgctgaggccagcgctgagctgagcaatgaaggagtgatgaaccacaggtctgaggaggagcgggtgacagagacccagaagaatgaaagagtgaagaagcagctgcaggccctgagcagcgagctggcccaggccagagatgagaccaagaagacccagaatgatgtgctgcacgcagaaaatgtgaaggccggccgggacaagtacaagaccctgcggcagatccggcagggcaacaccaagcagagaattgatgaatttgaggccatgtag

SEQ ID NO: 93557 - DNA, 774 bp, Artificial Sequence
  derived and/or modified sequence
atggagcggctgaagcagatcgaggagcagaccatcaaggcccagaaagaactggaagagcagacccgcaaagcgctggagttggatcaggagagaaagagagccaaggaagaagctgaaaggcttgagaaggagagacgggcagccgaggaggccaagtcagccatcgcgaaacaggcagccgaccagatgaaaaaccaggagcagctcgccgctgagctggccgaattcacggccaaaattgctctactggaagaagctaaaaagaaaaaggaggaagaagccactgagtggcagcacaaagcatttgccgcccaggaggatcttgagaaaacgaaggaagaactgaagactgtgatgtctgctccccccccaccaccaccccctcctgtaataccaccgacagagaacgagcatgacgagcacgacgaaaataacgccgaagcatcggccgaactgagcaatgagggggtgatgaaccacagatccgaggaagagagggtgacagagacgcagaaaaatgagagggtgaaaaagcagttgcaggccctttcttctgaactagcccaggctagagatgagaccaaaaaaacccagaacgacgtattacatgctgagaatgtgaaggcgggtcgtgacaagtataaaacacttcgtcagatccgacagggaaatacaaaacagagaattgacgagttcgaggcaatgtggggcccgaagctctacgcactgttccagatgcggtcgtgccaatcctcaatcaagcagatgtag

SEQ ID NO: 93558 - DNA, 762 bp, Artificial Sequence
  derived and/or modified sequence
ggcggccggatcgcccgggcccacgagttcgaggccgccgtgagcttctgtacgtccgcttgggctacagagagagatcctgtgtcgcgaaagcagagagagctagaggaacagacacgcaaagcgctcgagctggaccaagaacggaaacgtgccaaggaggaggccgagcgactggagaaagagaggcgggctgcggaggaggccaaatccgccatcgccaaacaggcagcagaccagatgaagaaccaggagcagctggcggccgagttggctgaatttaccgcaaagatcgccctccttgaggaggcaaagaaaaagaaggaagaggaagccacagagtggcaacacaaggctttcgccgcccaggaggacttggaaaagaccaaagaggagcttaagaccgtaatgagcgcgccacccccgccccctcctcccccagtcataccacccaccgaaaatgaacatgacgaacatgatgaaaacaacgcggaggctagtgccgagctgagtaatgaaggagtgatgaatcataggagcgaggaagagagggttacagagacacaaaaaaacgagagggtcaagaagcagctgcaggctttatcctcggagcttgcacaagctcgcgacgagaccaagaaaactcagaatgacgtactccacgctgagaacgtgaaggcaggcagagataagtacaagaccctgagacagatacggcagggaaatacaaagcagcgaatcgacgaatttgaggcaatgtag

SEQ ID NO: 93559 - DNA, 774 bp, Artificial Sequence
  derived and/or modified sequence
atggaacgcctcaaacagattgaagaacaaaccattaaggctcagaaggaacttgaggagcagacacgtaaggccctcgaactggatcaggaacgtaagcgggctaaagaggaggcagagcggcttgaaaaggaacggagggctgcagaggaggccaagtccgctatcgccaagcaggctgccgatcagatgaaaaaccaggaacaactcgccgcagaactggccgaatttaccgcaaaaatcgcactgctggaagaagctaagaaaaaaaaggaagaggaggcaaccgagtggcagcacaaagcttttgctgcacaggaagacttagaaaagaccaaggaggaactgaaaacggtgatgtcagctcctcctccacctccacccccacccgtgatcccacctacagagaacgagcacgatgaacatgacgagaataatgctgaagcctctgccgaactgtccaacgaaggagtgatgaatcaccgctccgaggaggaacgagttaccgagactcaaaaaaacgagcgcgttaagaaacaacttcaggctctcagctccgagctcgcccaggccagggatgaaaccaaaaagacgcagaatgacgtgctgcacgccgaaaatgtgaaagccggtcgggataagtataaaaccctccgccaaatcaggcagggaaacacaaagcagcgtatagatgaatttgaggcgatgtggggaccgaagctgtacgctctttttcaaatgaggtcatgccaatcttccattaaacagatgtag

SEQ ID NO: 93560 - DNA, 762 bp, Artificial Sequence
  derived and/or modified sequence
ggaggcaggattgctcgtgcccacgagtttgaagccgcagtttcattctgcacgtcggcgtgggctacagagcgcgacccagtcagcaggaagcaaagagagctggaggagcagacaagaaaagccttggagctagaccaggagaggaaaagagccaaagaggaggccgagaggctggaaaaggagaggcgagcagccgaggaagcaaaaagtgccatcgccaagcaagctgcagaccaaatgaagaaccaggaacagctagcagccgagctcgccgagtttaccgcaaagatcgcccttcttgaagaggccaagaaaaaaaaggaagaagaggctacagagtggcagcataaggcttttgctgcacaggaggacctcgaaaaaacaaaggaggagttgaaaacagtgatgtctgcgcctccacctccaccacccccacctgttatccctcctactgagaacgaacacgacgagcatgacgaaaacaacgcagaggcctccgccgagttatcaaacgagggagtgatgaaccaccgctccgaagaggagagagtcactgagacccaaaaaaacgaacgcgttaagaagcagctgcaggccctcagttccgaactggcccaagcacgggatgagactaaaaagacccaaaacgatgtacttcatgccgagaatgtgaaggcaggcagagacaagtataagacactgcgtcagataagacagggtaacaccaaacaacggatcgacgaattcgaggcaatgtag

SEQ ID NO: 93561 - DNA, 1814 bp, Artificial Sequence
  derived and/or modified sequence
ttggcgctcagtccgcggcgcgaggacggccggccggcagggggaggcgggggggcgccgggcagccccgccttttcccgcggaggcgccgagcggccatattgcggagctgtctgcggtggcggcggcgcctctcgtctcccgcgggccagcgctcgcaccaccgcttctccctccctgtcgcagccgcgccgccgcgcagcgccccagccacacgccggcgggcagaagccgcccgctctccggaaagtgataacagaattcattgaagtggagaatttttaaagaaggtaacaaaaagagaaagaaaatgccgaaaccaggcacaattagagaatgaaaagaagaaaagagaaatagcagaaaaggaaaaggaaagaatagaacgtgaaaaggaagagctaatggaacgtctaaaacaaattgaagagcagacaattaaagctcagaaagaactagaagaacagactcgaaaagctctagaactggatcaagaacgaaaacgagcaaaagaagaagcagaacgacttgaaaaggagcgtcgagctgctgaagaggcaaagtctgccatagcaaaacaagctgccgaccagatgaagaatcaggagcagctagcagcagaacttgctgaattcactgccaagattgcacttctagaggaagccaagaagaaaaaggaagaggaagctactgagtggcaacacaaagcttttgcagcccaggaagacttggaaaagaccaaagaagagttaaaaactgtgatgtctgccccccctccacctccaccaccaccagtcattcctccaacagaaaacgaacatgatgaacacgatgagaataatgctgaagctagtgctgaattatcaaatgaaggggtaatgaaccatagaagcgaggaagaacgtgtaaccgaaacacagaaaaatgagcgtgttaagaagcaacttcaggcattaagttcagaattagcccaagccagagatgaaaccaagaaaacacaaaatgatgttcttcatgctgagaatgttaaagcaggccgtgataagtacaagactctgcgacagattcgacaaggcaatacaaagcagcgtatcgatgagtttgaagcaatgtggggacccaaactgtatgcattgttccagatgcgctcttgccaaagcagcataaagcaaatgtaacccttaggaagaaggctccctccctcactaggcccctggctactgacttatgggaagctttaggataaggacatacctggtgttctgaatgtgtatatcccccaaagtctgcaatctcagctggaactggatggaccagtattccattacccagggccctggctcatggttctctcctcttctcagtttactgttggatttccctttcttgctattctctttctctccagacccctctcaattgcctttcctaaagacagaccttagcaagatgggccaggacttgggacttcgcacagcaccctgcagtcccaagccagcatctactgcaccccatcttcaggactctatcccccaaacatgctggaaggcatcagcttatgagaacccacttttttctgcatgactagcttgtaaggaagaatctatggacaggatttccaagaatttcccactttttcaaaaaatgtatgtgacttatatttggcttcaatccaagagcaaactcagtggtgaacagctccatttctgtgcacatgttggtggaatctgcagaaatcgatgcaacatttctttcctgtctgggctgtttgtataattgtatataaatgtagcaataaatatattctaacatca

SEQ ID NO: 93562 - DNA, 793 bp, Artificial Sequence
  derived and/or modified sequence
ggcgggaggattgctcgagcccatgagttcgaggctgcagtgagcttctgcacttcagcctgggcaacagagcgagaccctgtctcaagaaaacaaagagaactagaagaacagactcgaaaagctctagaactggatcaagaacgaaaacgagcaaaagaagaagcagaacgacttgaaaaggagcgtcgagctgctgaagaggcaaagtctgccatagcaaaacaagctgccgaccagatgaagaatcaggagcagctagcagcagaacttgctgaattcactgccaagattgcacttctagaggaagccaagaagaaaaaggaagaggaagctactgagtggcaacacaaagcttttgcagcccaggaagacttggaaaagaccaaagaagagttaaaaactgtgatgtctgccccccctccacctccaccaccaccagtcattcctccaacagaaaacgaacatgatgaacacgatgagaataatgctgaagctagtgctgaattatcaaatgaaggggtaatgaaccatagaagcgaggaagaacgtgtaaccgaaacacagaaaaatgagcgtgttaagaagcaacttcaggcattaagttcagaattagcccaagccagagatgaaaccaagaaaacacaaaatgatgttcttcatgctgagaatgttaaagcaggccgtgataagtacaagactctgcgacagattcgacaaggcaatacaaagcagcgtatcgatgagtttgaagcaatgtgagagctgttattttgcatatatgttcttcata

SEQ ID NO: 93563 - protein, 200 aa, Artificial Sequence
  derived and/or modified sequence
MPKPINVRVTTMDAELEFAIQPNTTGKQLFDQVTQQDVKKENPLQFKFRAKFFPEDVSEELIQEITQRLFFLQVKEAILNDEIYCPPETAVLLASYAVQAKYGDYNKEIHKPGYLANDRLLPQRVLEQHKLTKEQDETKKTQNDVLHAENVKAGRDKYKTLRQIRQGNTKQRIDEFEAMWGPKLYALFQMRSCQSSIKQM

SEQ ID NO: 93564 - DNA, 603 bp, Artificial Sequence
  derived and/or modified sequence
atgcccaagcccatcaacgtgagagtgaccaccatggacgccgagctggagttcgccatccagcccaacaccaccggcaagcagctgttcgaccaggtgacccagcaggacgtgaagaaggagaaccccctgcagttcaagttcagagccaagttcttccccgaggacgtgagcgaggagctgatccaggagatcacccagagactgttcttcctgcaggtgaaggaggccatcctgaacgacgagatctactgcccccccgagaccgccgtgctgctggccagctacgccgtgcaggccaagtacggcgactacaacaaggagatccacaagcccggctacctggccaacgacagactgctgccccagagagtgctggagcagcacaagctgaccaaggagcaggacgagaccaagaagacccagaacgacgtgctgcacgccgagaacgtgaaggccggcagagacaagtacaagaccctgagacagatcagacagggcaacaccaagcagagaatcgacgagttcgaggccatgtggggccccaagctgtacgccctgttccagatgagaagctgccagagcagcatcaagcagatgtag

SEQ ID NO: 93565 - DNA, 603 bp, Artificial Sequence
  derived and/or modified sequence
atgcccaagcccatcaatgtgagagttacaacaatggacgctgagcttgaatttgccatccaacccaatactacaggtaagcagctgttcgatcaggtgactcagcaggatgttaagaaggagaacccattgcagtttaagtttcgcgccaagttcttcccagaagacgtgagtgaggagctcattcaggaaattacacaacgactcttcttcctacaggtgaaggaagcaatactgaatgatgagatttattgcccaccggagaccgccgtcctattggcttcttatgccgtgcaggcaaaatatggtgactacaacaaagagatccataagccgggctatctggctaacgatcggcttttacctcagagagtcctggagcaacacaaacttactaaggagcaggatgaaacgaaaaagactcagaacgacgtactgcatgcagagaatgtgaaagccggacgggataagtataagaccctgaggcaaatcaggcagggaaacaccaaacagaggatcgatgaatttgaggctatgtggggaccaaaactatacgccctgttccagatgagatcttgtcagtccagcataaagcagatgtag

SEQ ID NO: 93566 - DNA, 603 bp, Artificial Sequence
  derived and/or modified sequence
atgcccaagcccatcaacgtgcgggtgaccaccatggatgctgagctggagtttgccatccagcccaacaccaccgggaagcagctgtttgaccaggtgacccagcaggatgtgaagaaggagaaccccctgcagttcaagttccgggccaagttcttcccagaagatgtgtctgaggagctgatccaggagatcacccagaggctcttcttcctgcaggtgaaggaggccatcctgaatgatgagatctactgccccccagagacagctgtgctgctggccagctatgctgtgcaggccaagtacggggactacaacaaggagatccacaagccaggctacctggccaatgaccggctgctgccccagagggtgctggagcagcacaagctgaccaaggagcaggatgagaccaagaagacccagaatgatgtgctgcacgcagaaaatgtgaaggccggccgggacaagtacaagaccctgcggcagatccggcagggcaacaccaagcagagaattgatgaatttgaggccatgtggggccccaagctgtatgccctcttccagatgaggagctgccagagcagcatcaagcagatgtag

SEQ ID NO: 93567 - DNA, 603 bp, Artificial Sequence
  derived and/or modified sequence
atgcccaagcccatcaacgtgcgggtgaccaccatggacgccgagctagagtttgccatccaacccaatacaaccggcaagcagctgttcgaccaggtcacacagcaggacgtgaagaaggaaaacccactgcagttcaagtttagagctaagtttttcccagaagacgtgtctgaagagctcatccaggagatcacccagaggcttttttttttgcaggtcaaagaggcgatcttgaacgacgagatctactgccctcctgagacggcagtgctgttggcctcttatgccgtgcaggccaaatacggtgattataataaggagatacataagcccggctatctagcgaacgaccgattgctcccccaacgagttcttgagcagcataagctgaccaaggaacaggatgaaacgaaaaaaacccaaaatgacgtgctgcatgctgaaaacgtgaaagcgggtcgcgacaaatacaagactttgcggcaaatccgccaggggaacaccaaacagaggatcgatgagttcgaggctatgtggggccctaagctgtacgctttgtttcagatgcgaagttgccagtcaagcatcaaacagatgtag

SEQ ID NO: 93568 - DNA, 603 bp, Artificial Sequence
  derived and/or modified sequence
atgcctaagcccataaatgtacgagtgaccaccatggatgcggagctggaattcgcaatacagcccaatacaacaggcaaacagctctttgatcaggtgactcagcaggacgtaaagaaggagaatcccctgcaattcaaatttcgtgcaaaattctttcctgaagacgtgtctgaggagctcatccaagagatcactcagcgcctctttttcttgcaggtaaaggaggcaattttgaatgatgaaatctactgccctcccgagaccgctgtgctgctggctagttacgcagtgcaggccaaatacggtgattacaataaagaaatccataaaccaggttacctggccaatgatcggctgcttccccagcgggttcttgagcaacataaattgacaaaagagcaggatgagactaagaaaacacaaaatgatgtactccacgcagaaaatgttaaggcgggaagggacaaatataaaactctgcgccagatccggcagggaaatactaaacagagaattgacgaattcgaggccatgtggggccctaagctctacgcactgttccagatgaggtcatgtcagagctccattaaacaaatgtag

SEQ ID NO: 93569 - DNA, 1549 bp, Artificial Sequence
  derived and/or modified sequence
ttggcgctcagtccgcggcgcgaggacggccggccggcagggggaggcgggggggcgccgggcagccccgccttttcccgcggaggcgccgagcggccatattgcggagctgtctgcggtggcggcggcgcctctcgtctcccgcgggccagcgctcgcaccaccgcttctccctccctgtcgcagccgcgccgccgcgcagcgccccagccacacgccggcgggcagaagccgcccgctctccggaaagtgataacagaattcattgaagtggagaatttttaaagaaggtaacaaaaagagaaagaaaatgccgaaaccaatcaacgtaagagtaactacaatggatgctgagctggaatttgccattcagcccaatacaactggcaaacaactttttgaccaggtaacacagcaggatgttaaaaaagagaatcctttacagttcaagtttagagctaaattctttcctgaagatgtttctgaggaattaattcaagaaataacccagagactcttcttcttgcaagttaaagaagccatcttaaatgatgagatatattgcccgccagaaactgcagttcttttggcttcctatgctgtccaagccaagtatggagattacaataaagagattcataagccaggctacctggctaatgatagactcctaccccagcgtgtattggaacaacacaaactaacaaaagaacaagatgaaaccaagaaaacacaaaatgatgttcttcatgctgagaatgttaaagcaggccgtgataagtacaagactctgcgacagattcgacaaggcaatacaaagcagcgtatcgatgagtttgaagcaatgtggggacccaaactgtatgcattgttccagatgcgctcttgccaaagcagcataaagcaaatgtaacccttaggaagaaggctccctccctcactaggcccctggctactgacttatgggaagctttaggataaggacatacctggtgttctgaatgtgtatatcccccaaagtctgcaatctcagctggaactggatggaccagtattccattacccagggccctggctcatggttctctcctcttctcagtttactgttggatttccctttcttgctattctctttctctccagacccctctcaattgcctttcctaaagacagaccttagcaagatgggccaggacttgggacttcgcacagcaccctgcagtcccaagccagcatctactgcaccccatcttcaggactctatcccccaaacatgctggaaggcatcagcttatgagaacccacttttttctgcatgactagcttgtaaggaagaatctatggacaggatttccaagaatttcccactttttcaaaaaatgtatgtgacttatatttggcttcaatccaagagcaaactcagtggtgaacagctccatttctgtgcacatgttggtggaatctgcagaaatcgatgcaacatttctttcctgtctgggctgtttgtataattgtatataaatgtagcaataaatatattctaacatca

SEQ ID NO: 93570 - protein, 629 aa, Artificial Sequence
  derived and/or modified sequence
MGKIENNERVILNVGGTRHETYRSTLKTLPGTRLALLASSEPPGDCLTTAGDKLQPSPPPLSPPPRAPPLSPGPGGCFEGGAGNCSSRGGRASDHPGGGREFFFDRHPGVFAYVLNYYRTGKLHCPADVCGPLFEEELAFWGIDETDVEPCCWMTYRQHRDAEEALDIFETPDLIGGDPGDDEDLAAKRLGIEDAAGLGGPDGKSGRWRRLQPRMWALFEDPYSSRAARFIAFASLFFILVSITTFCLETHEAFNIVKNKTEPVINGTSVVLQYEIETDPALTYVEGVCVVWFTFEFLVRIVFSPNKLEFIKNLLNIIDFVAILPFYLEVGLSGLSSKAAKDVLGFLRVVRFVRILRIFKLTRHFVGLRVLGHTLRASTNEFLLLIIFLALGVLIFATMIYYAERVGAQPNDPSASEHTQFKNIPIGFWWAVVTMTTLGYGDMYPQTWSGMLVGALCALAGVLTIAMPVPVIVNNFGMYYSLAMAKQKLPRKRKKHIPPAPQASSPTFCKTELNMACNSTQSDTCLGKDNRLLEHNRSVLSGDDSTGSEPPLSPPERLPIRRSSTRDKNRRGETCFLLTTGDYTCASDGGIRKVLYRIYHGLLTAEKGTVEFSHTKDYTGNRLLLLNVP

SEQ ID NO: 93571 - DNA, 1890 bp, Artificial Sequence
  derived and/or modified sequence
atggggaaaattgaaaataacgagcgggtgattctgaatgtgggaggcaccagacatgagacgtaccggtccactctgaagacgctccctggcactaggcttgcccttttggcttcctctgaaccccctggcgactgcctcacaaccgctggggacaagctgcagccaagtcctccgccactcagtccgcccccgcgtgctcccccgctctctccaggccctgggggatgtttcgaaggtggggcaggtaattgttcgagccgcggaggaagagcatcggatcaccccgggggcggccgtgagttctttttcgatcggcatccgggggtctttgcctacgtgctcaattattataggactgggaagttgcattgcccagccgacgtgtgcggtccgttgttcgaggaggagctggcattctggggtatcgatgagactgatgtggagccctgctgttggatgacataccgtcagcaccgcgacgcagaagaggctctggatatcttcgaaactccagatctgattggaggtgaccccggggatgacgaggatctagccgccaagcggctcggaatagaggacgctgctggcctcggtggccccgacggcaagagcgggagatggagaaggctgcagcctcgcatgtgggccctgttcgaggacccctattctagccgggccgcccgcttcatcgcgtttgcttctctattctttattctcgtctccatcacgacattctgcctagagactcatgaagcctttaacatcgtcaaaaataaaaccgagcctgtcattaatggtaccagcgtggttcttcagtatgagatcgagacagaccccgctctgacatacgtcgagggggtgtgtgtcgtgtggtttactttcgagtttctagtgcgaattgtgttttcacctaataaactggaattcataaagaacctgttgaatatcatagatttcgtggctatcttgcccttttatctggaggttggcttgagtggactgtcaagtaaggctgccaaggatgtgttgggattcctgcgggtggtgcgtttcgtgcggatcttgcggatcttcaagctgacccgccactttgtgggtctgagagtgctaggccatacactccgagcttcaaccaacgagttcttacttctgatcattttcctggctttgggagtgctcatatttgcaactatgatttattacgcagaaagggtgggcgcacagcccaatgacccttccgccagtgaacatacccagtttaaaaacatacccatagggttctggtgggccgtggtcaccatgacaacattaggatatggggacatgtacccgcagacatggagtggaatgcttgtcggcgctctgtgtgctctggcgggcgtgcttacaatcgcaatgcctgtgcccgtcatcgtgaacaacttcgggatgtactacagtctagctatggctaaacagaagctcccacgaaagagaaagaaacacatcccccctgccccccaggcttcaagtccaactttctgcaagaccgaattgaatatggcgtgtaacagcacacagagcgacacctgtctaggaaaagataatcggttgcttgagcacaatagaagcgtgttatccggcgacgactcaacaggatcagaaccccccctgtctccccccgagcggctccccatcagacggtcatcaacacgggataagaacagaagaggcgagacctgctttctgctgaccactggtgattatacttgcgcgtccgacggaggcatcaggaaggtgctttataggatttaccacggcttgctaacggcagaaaagggcacagtagagttctcacataccaaggattacactggcaatagactgttactgttgaacgtgccttag

SEQ ID NO: 93572 - DNA, 1890 bp, Artificial Sequence
  derived and/or modified sequence
atgggcaagatcgaaaacaacgagcgagtgatcctgaacgtcgggggaacaaggcatgagacataccggagcactctaaaaaccctccccggaactaggcttgccttactcgcttcgtctgagccacccggggattgccttacgacagccggcgataaactacagccaagtccccctccccttagccctcctccacgcgctccacccttatcacccgggccaggaggctgctttgaaggcggggccggaaactgtagttctaggggaggcagggcgagcgatcacccgggaggcgggagagagttcttctttgatcgacaccctggcgtctttgcctatgttctgaattactacagaacaggcaaattgcactgtcctgcagacgtctgtgggcctctgtttgaagaggaattggccttctggggtatcgacgaaacagatgtggagccctgttgctggatgacatatagacagcaccgtgacgcggaggaagctttagacatcttcgaaacgccagacctgattggcggtgacccgggcgacgatgaagacctggcagcgaagcgcttgggaatcgaagacgccgctgggctcggaggccccgatggcaaatcaggacgctggcggagactgcagccccgaatgtgggcgttgtttgaggatccctactcttctcgggcagcacgattcattgcgtttgcatcgcttttttttattctggtgagtatcaccacattttgtcttgagactcatgaggcttttaacatagtgaaaaacaagaccgagccggtgatcaacggaaccagcgtcgtgctccaatatgagatcgagactgatcccgccctgacatacgtggagggtgtgtgcgtggtgtggtttacattcgaattcttagtaaggattgttttctcccctaataagctggagtttatcaaaaatctgctgaatatcattgattttgtcgcaatactacccttttatctggaagtcgggctgtcaggcctgagctcaaaggcagcaaaagacgtgcttggctttttgcgtgtagtgcgtttcgtcagaattctcaggatcttcaagctgacaagacacttcgtcggcctgcgcgtcctggggcacacccttcgcgcgtcaacaaacgagtttcttctcctgattattttcctcgcattgggagttctgatcttcgcgactatgatatactatgccgagagagtcggagcccagcccaacgacccttcggcatccgaacatacccaattcaaaaacatccctataggattttggtgggccgtggttacaatgacgactcttggctatggcgacatgtatccacagacctggagtggaatgctagtcggggctttgtgcgcgctagccggagtgctgacaattgccatgccggtaccagtcatcgtgaataactttgggatgtactactctctcgcaatggccaagcagaagttaccgagaaaacgcaaaaagcatatcccacccgctccgcaggcctcatcgccgaccttctgtaagactgagttgaatatggcgtgtaattctacccaaagcgatacctgtttaggcaaggacaataggctgctggaacataaccgcagcgtgctcagcggggacgactccacaggtagcgaacctccgctctccccgccagagcgactgcccattaggagatctagcactagggacaaaaaccggcgtggggagacatgtttcctgcttaccaccggggactacacgtgtgcttcggacggtggcatccggaaggtgctataccgcatatatcatggactcctgaccgccgaaaaaggcactgtggaattcagccatacaaaggactatacagggaaccggctattgttactgaatgtaccatag

SEQ ID NO: 93573 - DNA, 1890 bp, Artificial Sequence
  derived and/or modified sequence
atgggcaagattgaaaataatgaaagagtcatcctgaatgtgggcggcaccaggcatgagacctaccgcagcaccctgaagaccctgcccggcacccggctggccctgctggccagcagcgagcccccaggggactgcctgaccacagctggggacaagctgcagcccagccccccacccctgagccccccaccccgggccccacccctgagccctggccctgggggctgctttgagggcggggccggcaactgcagcagcagaggaggccgggccagtgaccaccctgggggcggccgggagttcttctttgacagacaccctggggtgtttgcctacgtgctgaactactacagaacaggcaagctgcactgcccagcagatgtgtgtggccccctgtttgaggaggagctggccttctggggcattgatgaaacagatgtggagccctgctgctggatgacctaccggcagcacagagatgctgaggaggccctggacatctttgagaccccagacctgattggaggagaccctggagatgatgaggacctggccgccaagaggctgggcattgaagatgctgctggcctgggcggcccagatggcaagagcggccgctggaggcggctgcagcccaggatgtgggccctgtttgaggacccctacagcagcagagctgcccgcttcatcgcctttgccagcctcttcttcatcctggtgtccatcaccaccttctgcctggagacccatgaggccttcaacatcgtgaagaacaagacagagcctgtgatcaatggcacctctgtggtgctgcagtatgaaattgaaacagatcctgccctgacctacgtggagggcgtgtgtgtggtgtggttcacctttgagttcctggtgagaattgtgttcagccccaacaagctggagttcatcaagaacctgctgaacatcatcgactttgtggccatcctgcccttctacctggaggtgggcctgagcggcctgagcagcaaggccgccaaggatgtgctgggcttcctgcgggtggtgcgctttgtgcgcatcctgcgcatcttcaagctgaccaggcactttgtgggcctgcgggtgctgggccacaccctgcgggccagcaccaatgagttcctgctgctgatcatcttcctggccctgggcgtgctgatctttgccaccatgatctactatgcagagcgggtgggcgcccagcccaatgaccccagcgccagcgagcacacccagttcaagaacatccccatcggcttctggtgggccgtggtgaccatgaccaccctgggctacggggacatgtacccccagacctggagcggcatgctggtgggcgccctgtgtgccctggccggcgtgctgaccatcgccatgcctgtgcctgtgattgtgaacaactttggcatgtactacagcctggccatggccaagcagaagctgcccaggaagaggaagaagcacatccccccagccccccaggccagcagccccaccttctgcaagacagagctgaacatggcctgcaacagcacccagagcgacacctgcctgggcaaggacaaccggctgctggagcacaacagatctgtgctgtctggagatgacagcacaggcagcgagccccccctgagccccccagagcggctgcccatcagaagaagcagcacccgggacaagaacagaagaggagagacctgcttcctgctgaccaccggggactacacctgtgccagtgatggcggcatcaggaaggtgctgtaccgcatctaccacggcctgctgacagctgagaagggcaccgtggagttcagccacaccaaggactacacaggcaaccggctgctgctgctgaatgtgccctag

SEQ ID NO: 93574 - DNA, 1890 bp, Artificial Sequence
  derived and/or modified sequence
atgggcaagatcgagaacaacgagcgggtgatcctgaacgtgggcggaacgcggcacgaaacatatcgttcaaccctgaagacactccccggcacaagattggctcttctggcttccagcgaaccaccaggtgactgtttaacaactgctggcgataagctgcagccaagccctcctcctcttagcccccctccgcgcgcaccgcctctcagtcctggcccgggaggctgttttgagggcggggcggggaactgctcttcacgcgggggcagagcctcagaccacccaggcgggggcagggaattcttcttcgatcgtcatccaggggtttttgcttacgttctcaattactaccgcaccggtaagctccactgtccagcagacgtttgtgggcccctctttgaggaggaactggccttctggggcatcgacgaaactgacgtggagccttgctgttggatgacctacagacagcaccgggatgcagaggaggctcttgacatcttcgagactccagatctgattggaggcgatcccggcgacgacgaagaccttgctgcaaagcgcctagggatcgaggacgcagccgggctaggcggacccgatggcaagtccggtcggtggagaaggctgcagcctcgtatgtgggctctgtttgaagacccttatagctctcgagccgcgcggtttatcgcatttgcatctctctttttcattctcgtaagtatcacaacgttttgtttggagacccatgaggctttcaatatcgtcaaaaacaagaccgaaccagtgatcaacggaacctccgtagtcctccagtatgaaatcgaaacagaccctgccctgacttatgtcgaaggcgtctgcgtggtttggtttacatttgagttcttggtacgtatcgtgttttcacccaacaagctggagttcattaagaacctgctcaacatcatagatttcgttgccatactgcctttttacctggaggtggggttatccggactcagctcaaaggccgcaaaagacgtgctgggattcctgcgtgtagtgagatttgtgagaattctgcgcatctttaagctgactcgacacttcgtgggactccgggtgttaggacacactttgcgcgcttccaccaacgaattcctgttgcttattatctttttagctctgggagtactgatctttgctacaatgatttattacgccgagcgagtcggcgcccaacctaatgaccccagcgcatcggagcatacgcaattcaaaaatatcccgatcggattctggtgggcagtggtgacaatgactactctgggctacggtgatatgtacccgcaaacctggagcggcatgctcgtcggtgcactttgtgctttggccggagtcctgacaatagccatgcctgtccccgtaattgttaataacttcggtatgtactatagccttgctatggccaagcagaagctgccaaggaagaggaagaagcatattcccccagctccgcaggctagctctccaacattttgcaagactgaacttaatatggcgtgtaactcaactcagtctgatacctgcctaggcaaagacaacaggttactcgaacataaccgatccgtcctgagcggagacgacagcactggcagcgaaccaccactgtccccacccgaacgcttgccgataaggcggtcctctaccagagataagaaccggcggggtgaaacctgtttcttgcttaccacaggggactacacatgcgcttccgacggaggaataaggaaggtactataccggatttaccatggtcttctgactgcagagaaaggcaccgtggagttttcacacaccaaagactacacaggcaatcggctgcttcttttaaatgtgccttag

SEQ ID NO: 93575 - DNA, 1890 bp, Artificial Sequence
  derived and/or modified sequence
atgggcaagatcgagaacaacgagcgggtgatcctgaacgtgggcgggaccagacacgaaacttacaggagtacactcaaaactctccccggcactaggttggcactcctggctagctcagagcctccgggagactgtctcacaaccgctggcgataaactacagcctagcccccccccactcagccctccaccccgcgcccctcccctgagccctgggccaggcgggtgcttcgagggaggggctggaaactgctcaagccggggtgggcgcgcctccgatcaccctggcggcggtcgggaatttttcttcgatcggcacccgggcgtgtttgcctatgttctgaactactaccgaacgggcaaactccactgcccagccgacgtctgtgggccgctcttcgaagaggagctggcattttggggcatcgacgaaactgacgtggagccatgctgctggatgacttaccggcagcaccgggacgccgaagaagctctggacatcttcgagacaccagacctgattgggggagaccctggagatgacgaagatctggctgcaaagagacttgggatagaggacgctgccgggctcggtggaccagacggcaaatctggacgatggaggcgactccagccccggatgtgggctcttttcgaggatccctacagttcccgggctgccagatttattgccttcgcatccctcttcttcattctggtctccataacaacattctgtctcgagactcacgaggcttttaatatcgtgaagaataagaccgaaccagtgatcaatgggacctctgtggttctgcaatacgagatagagactgatccggcactgacatacgttgagggagtctgtgtggtgtggttcaccttcgagtttctcgtgagaatcgtcttttcccctaataagctggagttcattaaaaaccttttaaacataattgatttcgtggctatccttcctttctacctggaggtcggcctgtcggggctctcctccaaagcagccaaggacgtgttaggttttctgcgagtcgtaaggttcgtacgaattcttcgaatcttcaaattgactcgccatttcgtagggctgcgagttctgggtcatacactgagagctagcacaaatgagttcctgctactgattatattcttggccttgggcgtcctgatattcgccaccatgatctactacgccgagagggtaggggcccagcccaacgatccgagtgccagtgagcacacccagtttaagaacatccccatcggattttggtgggccgtcgtcacgatgactacgctgggctatggcgacatgtatcctcaaacctggtctggaatgcttgtgggggccctgtgtgcactggcgggcgtgttgacgattgccatgcctgtacctgtcattgtgaacaatttcggaatgtattactccctcgctatggccaagcagaaattgccacggaagcggaaaaaacacattcccccagcgccacaggcttcctcccccactttttgcaaaacagagttgaatatggcttgcaatagcacgcaatcagatacttgcttgggaaaagacaaccggcttttggaacacaatcgatcagtgttgagcggcgacgattctactggctccgaaccgcccttatctcctcctgagcgcttacccatccggaggtcatctactagggataagaaccggagaggcgagacctgctttttgctgactactggtgattacacttgcgcttcagacgggggtattcggaaggtgctgtaccgcatttatcatggactactgacagccgaaaagggcacggtggagttcagtcacaccaaggactatacagggaacaggctgctgctgcttaatgtgccctag

SEQ ID NO: 93576 - DNA, 3415 bp, Artificial Sequence
  derived and/or modified sequence
gtgcttcggatggcggcgggaggttgatggcgagtggtgctgaagggacagctccagcagtggctgatttgggggagaaacaaaatctgcagatggaatccgagcagggcgacttcaccttcaagtggtgagctctcctgacctgcggccagtctccactccattcacggccagccgatctgcccgctcccggaggggtcgggcagtgccggctggacccgccccgagctccatggtttgcccaaccctgcgcgatggtgactctgggcgcggaggttggcgactggcaaatccgcagatcacagaatgaaggcggggagcgcggccggcggccggcgggggctttctcccccaccccagcgcccagggaagcggctcaaccacctgaatccggaaaacgccaacaagtagtttctcgtcggagaagggcggctcacctgggcgccaagactcagtcccgctgcccagagaacctcgtccactcggaaaccaaagcagaaccacttttctctcggtctcgttaagtcatgtctgagtcacagagatgggcaagatcgagaacaacgagagggtgatcctcaatgtcgggggcacccggcacgaaacctaccgcagcaccctcaagaccctgcctggaacacgcctggcccttcttgcctcctccgagcccccaggcgactgcttgaccacggcgggcgacaagctgcagccgtcgccgcctccactgtcgccgccgccgagagcgcccccgctgtcccccgggccaggcggctgcttcgagggcggcgcgggcaactgcagttcccgcggcggcagggccagcgaccatcccggtggcggccgcgagttcttcttcgaccggcacccgggcgtcttcgcctatgtgctcaattactaccgcaccggcaagctgcactgccccgcagacgtgtgcgggccgctcttcgaggaggagctggccttctggggcatcgacgagaccgacgtggagccctgctgctggatgacctaccggcagcaccgcgacgccgaggaggcgctggacatcttcgagacccccgacctcattggcggcgaccccggcgacgacgaggacctggcggccaagaggctgggcatcgaggacgcggcggggctcgggggccccgacggcaaatctggccgctggaggaggctgcagccccgcatgtgggccctcttcgaagacccctactcgtccagagccgccaggtttattgcttttgcttctttattcttcatcctggtttcaattacaactttttgcctggaaacacatgaagctttcaatattgttaaaaacaagacagaaccagtcatcaatggcacaagtgttgttctacagtatgaaattgaaacggatcctgccttgacgtatgtagaaggagtgtgtgtggtgtggtttacttttgaatttttagtccgtattgttttttcacccaataaacttgaattcatcaaaaatctcttgaatatcattgactttgtggccatcctacctttctacttagaggtgggactcagtgggctgtcatccaaagctgctaaagatgtgcttggcttcctcagggtggtaaggtttgtgaggatcctgagaattttcaagctcacccgccattttgtaggtctgagggtgcttggacatactcttcgagctagtactaatgaatttttgctgctgataattttcctggctctaggagttttgatatttgctaccatgatctactatgccgagagagtgggagctcaacctaacgacccttcagctagtgagcacacacagttcaaaaacattcccattgggttctggtgggctgtagtgaccatgactaccctgggttatggggatatgtacccccaaacatggtcaggcatgctggtgggagccctgtgtgctctggctggagtgctgacaatagccatgccagtgcctgtcattgtcaataattttggaatgtactactccttggcaatggcaaagcagaaacttccaaggaaaagaaagaagcacatccctcctgctcctcaggcaagctcacctactttttgcaagacagaattaaatatggcctgcaatagtacacagagtgacacatgtctgggcaaagacaatcgacttctggaacataacagatcagtgttatcaggtgacgacagtacaggaagtgagccgccactatcacccccagaaaggctccccatcagacgctctagtaccagagacaaaaacagaagaggggaaacatgtttcctactgacgacaggtgattacacgtgtgcttctgatggagggatcaggaaagtgttgtacagaatttatcatggattattgactgctgagaaagggacagtggaatttagccataccaaggactatactggaaacagacttctgctgctgaatgtgccctgatgtgaccaggttgcacttggaagagatcctcgcgtcttcatgaggcacttaaagcttataaaagaactgcggctggaactcatctggtgctccccatgagagtgctctgcttgtagactggccagtgtccatgaaacaactgtaaataccaacatgtgtgcatgggtcaacagtcttggccatttctcatcaaaagaagccaaattcatgatcaacatctctgaagtttcaagtaaggcccacacttctttgaattactcttcatgggcccacattaggttgtgctgtgaattacttaaggcagtgatactgatgtagtatagttttgtcttaatttcccttatttctacttctttggttgaatctatgaacttgattgtataattttcttataaattactgatgtaatcagcttgtcaattatgttgtgaaattgttagtattcatttatcaaaaatgacctatgtttagtcacatatttgtttagttctgggaaattgttatagcttaaatggaactcaccaacattattcatagtttaagtcttttatcattattacctcaattataaatattacaaaaacataattctggcaatgagagtatttttttattcaatgatcaaggagcaatgtcagtatatagtagaatatcaattaaattatatcctaaaatgtatattttgcataaaagagatattctttaatcaattacttttttgtgagttttgtggcaaatgaagcttgtacgtgtctttaaaactgttgtagatgaaactgtataagatttttacatcttgcttaatcaatattttcagagtctattagttcccctgggattctgaatataacatatagcctattataaatccctgtatcgtggaccttttgtgaacatttcaaggcgcatgcacaaccttgatgataaccagtggaaatgtaactaactgaaatgaagaataaaaggcaaatgagctgggga

SEQ ID NO: 93577 - DNA, 2931 bp, Artificial Sequence
  derived and/or modified sequence
agtcatgtctgagtcacagagatgggcaagatcgagaacaacgagagggtgatcctcaatgtcgggggcacccggcacgaaacctaccgcagcaccctcaagaccctgcctggaacacgcctggcccttcttgcctcctccgagcccccaggcgactgcttgaccacggcgggcgacaagctgcagccgtcgccgcctccactgtcgccgccgccgagagcgcccccgctgtcccccgggccaggcggctgcttcgagggcggcgcgggcaactgcagttcccgcggcggcagggccagcgaccatcccggtggcggccgcgagttcttcttcgaccggcacccgggcgtcttcgcctatgtgctcaattactaccgcaccggcaagctgcactgccccgcagacgtgtgcgggccgctcttcgaggaggagctggccttctggggcatcgacgagaccgacgtggagccctgctgctggatgacctaccggcagcaccgcgacgccgaggaggcgctggacatcttcgagacccccgacctcattggcggcgaccccggcgacgacgaggacctggcggccaagaggctgggcatcgaggacgcggcggggctcgggggccccgacggcaaatctggccgctggaggaggctgcagccccgcatgtgggccctcttcgaagacccctactcgtccagagccgccaggtttattgcttttgcttctttattcttcatcctggtttcaattacaactttttgcctggaaacacatgaagctttcaatattgttaaaaacaagacagaaccagtcatcaatggcacaagtgttgttctacagtatgaaattgaaacggatcctgccttgacgtatgtagaaggagtgtgtgtggtgtggtttacttttgaatttttagtccgtattgttttttcacccaataaacttgaattcatcaaaaatctcttgaatatcattgactttgtggccatcctacctttctacttagaggtgggactcagtgggctgtcatccaaagctgctaaagatgtgcttggcttcctcagggtggtaaggtttgtgaggatcctgagaattttcaagctcacccgccattttgtaggtctgagggtgcttggacatactcttcgagctagtactaatgaatttttgctgctgataattttcctggctctaggagttttgatatttgctaccatgatctactatgccgagagagtgggagctcaacctaacgacccttcagctagtgagcacacacagttcaaaaacattcccattgggttctggtgggctgtagtgaccatgactaccctgggttatggggatatgtacccccaaacatggtcaggcatgctggtgggagccctgtgtgctctggctggagtgctgacaatagccatgccagtgcctgtcattgtcaataattttggaatgtactactccttggcaatggcaaagcagaaacttccaaggaaaagaaagaagcacatccctcctgctcctcaggcaagctcacctactttttgcaagacagaattaaatatggcctgcaatagtacacagagtgacacatgtctgggcaaagacaatcgacttctggaacataacagatcagtgttatcaggtgacgacagtacaggaagtgagccgccactatcacccccagaaaggctccccatcagacgctctagtaccagagacaaaaacagaagaggggaaacatgtttcctactgacgacaggtgattacacgtgtgcttctgatggagggatcaggaaagtgttgtacagaatttatcatggattattgactgctgagaaagggacagtggaatttagccataccaaggactatactggaaacagacttctgctgctgaatgtgccctgatgtgaccaggttgcacttggaagagatcctcgcgtcttcatgaggcacttaaagcttataaaagaactgcggctggaactcatctggtgctccccatgagagtgctctgcttgtagactggccagtgtccatgaaacaactgtaaataccaacatgtgtgcatgggtcaacagtcttggccatttctcatcaaaagaagccaaattcatgatcaacatctctgaagtttcaagtaaggcccacacttctttgaattactcttcatgggcccacattaggttgtgctgtgaattacttaaggcagtgatactgatgtagtatagttttgtcttaatttcccttatttctacttctttggttgaatctatgaacttgattgtataattttcttataaattactgatgtaatcagcttgtcaattatgttgtgaaattgttagtattcatttatcaaaaatgacctatgtttagtcacatatttgtttagttctgggaaattgttatagcttaaatggaactcaccaacattattcatagtttaagtcttttatcattattacctcaattataaatattacaaaaacataattctggcaatgagagtatttttttattcaatgatcaaggagcaatgtcagtatatagtagaatatcaattaaattatatcctaaaatgtatattttgcataaaagagatattctttaatcaattacttttttgtgagttttgtggcaaatgaagcttgtacgtgtctttaaaactgttgtagatgaaactgtataagatttttacatcttgcttaatcaatattttcagagtctattagttcccctgggattctgaatataacatatagcctattataaatccctgtatcgtggaccttttgtgaacatttcaaggcgcatgcacaaccttgatgataaccagtggaaatgtaactaactgaaatgaagaataaaaggcaaatgagctggggataaacttgaatgttatctgattaaattactcaaattatt

SEQ ID NO: 93578 - DNA, 1890 bp, Artificial Sequence
  derived and/or modified sequence
atggggaaaatagagaataacgaaagggtgattttgaacgtgggcggtacaaggcatgagacatataggtccacccttaaaacactacccggaactaggctcgcattgctggccagctcagaacccccaggcgactgccttactacagctggcgataaactgcaaccatcccctccacccctgtcgccccctcctcgtgcccctccactgagtccagggccaggcggatgcttcgagggcggagccggtaactgctctagtagagggggtcgcgcatctgaccacccgggaggtggtcgggagttttttttcgaccggcatcccggagtgttcgcctacgtgctgaactactataggacaggtaagctccattgcccagcagacgtctgtggtcccctctttgaggaggagctcgccttctggggtatcgacgaaaccgacgtcgagccatgctgctggatgacctaccgccaacaccgcgatgccgaggaagcccttgatatcttcgagactcctgacctcataggcggagacccaggcgatgatgaagacttggctgctaaaaggctgggtatcgaggatgctgcaggtctgggagggccagatgggaaaagtgggagatggagaaggctgcaacctcgtatgtgggccctttttgaggatccatactctagcagagctgctaggtttatcgccttcgcctctttattctttatcctcgtgtccatcacaaccttttgcctcgagacgcacgaagcttttaacatagtaaagaataagacagagccagtcatcaatggcaccagcgtggtgttgcagtacgagatcgaaactgatccagccttgacttatgtcgaaggtgtctgcgtggtgtggtttaccttcgagtttttagtgcgcatcgtctttagtcccaacaaactggaattcatcaagaacctgctgaacattatcgatttcgtggccatcctgccattctatttggaagttggcctgtccggcctcagctcaaaggcagctaaagacgtgctgggtttcctgagggtggttcgattcgtgaggatccttaggattttcaagctcaccagacattttgtcggattgcgagtcctggggcataccttgcgcgcttccacaaatgaattcctcctcttgattatcttcctggccttgggcgttctcatcttcgccaccatgatctactacgcagaacgtgtcggcgcacagcccaacgatccctcagcctcggaacatacccagttcaagaatatccctatcgggttctggtgggccgtggtaacaatgaccaccttaggatacggcgatatgtacccacagacctggagcggcatgctggtgggcgctttatgtgccctagccggagttctaacaatcgctatgcccgttccagtgattgtgaacaacttcggaatgtactactctctggccatggccaagcagaagctgcctagaaaacggaagaaacacattccgcctgcacctcaggcgagttctccaactttctgtaagacagagctcaatatggcctgtaactccacccaatccgatacgtgtctggggaaggacaaccgccttctggagcacaacagatctgtactaagcggcgatgacagcaccggttccgaaccccctctctctccacctgaaaggctgccaatcaggcggtcctctacaagagataagaacaggaggggtgaaacatgcttcctgctgaccacaggcgattatacatgtgcctccgacggaggcatccgaaaggtgttatataggatctaccacgggctgctaaccgccgagaaaggtacagtcgagttctcacataccaaggactacactggtaatcggctcctgcttctaaatgttccatag

SEQ ID NO: 93579 - DNA, 1890 bp, Artificial Sequence
  derived and/or modified sequence
atgggcaagattgagaacaatgagcgcgtaattttgaatgttgggggaaccagacacgagacgtacaggtctactctcaaaacactccctggaacacgtctggcgctgctcgcttcaagcgaaccaccaggcgattgcctcacgaccgccggtgataagctgcaaccaagtcctcctccattgtcaccgccacctagggctccacctctgagtcccggtcctggcggatgcttcgagggcggagctggaaattgtagttcccgcggaggccgtgcttctgaccatcccggtggcggaagagagtttttcttcgaccggcaccctggggtcttcgcatatgtcctgaactattatagaacgggaaagttgcattgcccagctgacgtgtgtggcccactgtttgaggaggagttggcgttctggggcatagacgaaaccgatgtggagccatgctgttggatgacctaccggcagcatcgcgatgcggaagaggccctagacattttcgaaacaccagaccttattgggggtgacccaggtgatgacgaagatctggccgctaaaagattaggcattgaggacgctgccggtctgggcggacccgacgggaagtctggcagatggagacgattacagccacgtatgtgggcactctttgaggacccctatagcagtcgtgccgctcggtttatcgctttcgcatccctgttttttatactggtgtccatcaccacattttgtcttgagactcacgaagccttcaacatcgtcaaaaataagacggaacccgtgatcaacggcaccagcgtggtgctccagtacgagattgaaacggatcccgcacttacatacgtcgagggcgtctgcgtcgtatggttcaccttcgagttcctggtacgtatagtcttcagtccaaataagctcgagttcatcaagaacttactcaacattatcgatttcgtggcaattctccctttctatctggaggtggggctctcgggcctctcctccaaagccgcaaaagatgttctggggttcctgcgggttgtgagattcgtgaggattctgagaatcttcaagctgacacggcacttcgtgggactccgggtcctgggccacacccttagagcttcaaccaatgagttcctattgcttattatcttccttgccctgggagtgttaatttttgctaccatgatatattatgcagaacgggtcggcgcacagcccaatgacccatcagcttctgaacatacacaattcaaaaatatacctattggattctggtgggcagtggtcacaatgaccacactcggttatggtgacatgtatccccagacttggtcagggatgttggtgggagccctgtgcgccctggccggagttcttaccattgccatgccggtcccagtgatcgtaaacaattttgggatgtactatagtctcgcgatggctaagcagaagctccctagaaagcgaaaaaaacatattcccccagccccacaggccagctcacctaccttctgcaagaccgaattgaacatggcttgtaactcaacacaatctgatacctgtctgggcaaggacaaccgcctgttggagcacaatcgctctgtcctcagtggtgatgacagcactggatccgaacccccactatcccccccagagcggctgcctatcaggaggtctagcactcgagacaaaaaccgaaggggcgaaacttgtttcctcctgaccacaggcgattacacttgtgcctcggacgggggtatcagaaaggtcctgtaccgcatataccacgggttgctgaccgcagaaaagggtacagtcgagtttagtcacactaaggattataccggcaacagactgctgctgctcaacgtaccctag

SEQ ID NO: 93580 - DNA, 1890 bp, Artificial Sequence
  derived and/or modified sequence
atgggcaagatcgagaacaacgagagagtgatcctgaacgtgggcggcaccagacacgagacctacagaagcaccctgaagaccctgcccggcaccagactggccctgctggccagcagcgagccccccggcgactgcctgaccaccgccggcgacaagctgcagcccagccccccccccctgagccccccccccagagccccccccctgagccccggccccggcggctgcttcgagggcggcgccggcaactgcagcagcagaggcggcagagccagcgaccaccccggcggcggcagagagttcttcttcgacagacaccccggcgtgttcgcctacgtgctgaactactacagaaccggcaagctgcactgccccgccgacgtgtgcggccccctgttcgaggaggagctggccttctggggcatcgacgagaccgacgtggagccctgctgctggatgacctacagacagcacagagacgccgaggaggccctggacatcttcgagacccccgacctgatcggcggcgaccccggcgacgacgaggacctggccgccaagagactgggcatcgaggacgccgccggcctgggcggccccgacggcaagagcggcagatggagaagactgcagcccagaatgtgggccctgttcgaggacccctacagcagcagagccgccagattcatcgccttcgccagcctgttcttcatcctggtgagcatcaccaccttctgcctggagacccacgaggccttcaacatcgtgaagaacaagaccgagcccgtgatcaacggcaccagcgtggtgctgcagtacgagatcgagaccgaccccgccctgacctacgtggagggcgtgtgcgtggtgtggttcaccttcgagttcctggtgagaatcgtgttcagccccaacaagctggagttcatcaagaacctgctgaacatcatcgacttcgtggccatcctgcccttctacctggaggtgggcctgagcggcctgagcagcaaggccgccaaggacgtgctgggcttcctgagagtggtgagattcgtgagaatcctgagaatcttcaagctgaccagacacttcgtgggcctgagagtgctgggccacaccctgagagccagcaccaacgagttcctgctgctgatcatcttcctggccctgggcgtgctgatcttcgccaccatgatctactacgccgagagagtgggcgcccagcccaacgaccccagcgccagcgagcacacccagttcaagaacatccccatcggcttctggtgggccgtggtgaccatgaccaccctgggctacggcgacatgtacccccagacctggagcggcatgctggtgggcgccctgtgcgccctggccggcgtgctgaccatcgccatgcccgtgcccgtgatcgtgaacaacttcggcatgtactacagcctggccatggccaagcagaagctgcccagaaagagaaagaagcacatcccccccgccccccaggccagcagccccaccttctgcaagaccgagctgaacatggcctgcaacagcacccagagcgacacctgcctgggcaaggacaacagactgctggagcacaacagaagcgtgctgagcggcgacgacagcaccggcagcgagccccccctgagcccccccgagagactgcccatcagaagaagcagcaccagagacaagaacagaagaggcgagacctgcttcctgctgaccaccggcgactacacctgcgccagcgacggcggcatcagaaaggtgctgtacagaatctaccacggcctgctgaccgccgagaagggcaccgtggagttcagccacaccaaggactacaccggcaacagactgctgctgctgaacgtgccctag

SEQ ID NO: 93581 - protein, 589 aa, Artificial Sequence
  derived and/or modified sequence
MAAEKQVPGGGGGGGSGGGGGSGGGGSGGGRGAGGEENKENERPSAGSKANKEFGDSLSLEILQIIKESQQQHGLRHGDFQRYRYLLLVLMDAERAWSYAMQLKQEANTEPRKRFHLLSRLRKAVKHAEELERLCESNRVDAKTKLEAQAYTAYLSGMLRFEHQEWKAAIEAFNKCKTIYEKLASAFTEEQAVLYNQRVEEISPNIRYCAYNIGDQSAINELMQMRLRSGGTEGLLAEKLEALITQTRAKQAATMSEVEWRGRTVPVKIDKVRIFLLGLADNEAAIVQAESEETKERLFESMLSECRDAIQVVREELKPDQKQRDYILEGEPGKVSNLQYLHSYLTYIKLSTAIKRNENMAKGLQRALLQQQPEDDSKRSPRPQDLIRLYDIILQNLVELLQLPGLEEDKAFQKEIGLKTLVFKAYRCFFIAQSYVLVKKWSEALVLYDRVLKYANEVNSDAGAFKNSLKDLPDVQELITQVRSEKCSLQAAAILDANDAHQTETSSSQVKDNKPLVERFETFCLDPSLVTKQANLVHFPPGFQPIPCKPLFFDLALNHVAFPPLEDKLEQKTKSGLTGYIKGIFGFRS

SEQ ID NO: 93582 - protein, 288 aa, Artificial Sequence
  derived and/or modified sequence
MLSECRDAIQVVREELKPDQKQRDYILEGEPGKVSNLQYLHSYLTYIKLSTAIKRNENMAKGLQRALLQQQPEDDSKRSPRPQDLIRLYDIILQNLVELLQLPGLEEDKAFQKEIGLKTLVFKAYRCFFIAQSYVLVKKWSEALVLYDRVLKYANEVNSDAGAFKNSLKDLPDVQELITQVRSEKCSLQAAAILDANDAHQTETSSSQVKDNKPLVERFETFCLDPSLVTKQANLVHFPPGFQPIPCKPLFFDLALNHVAFPPLEDKLEQKTKSGLTGYIKGIFGFRS

SEQ ID NO: 93583 - DNA, 984 bp, Artificial Sequence
  derived and/or modified sequence
atgcagatgcggctgcgcagcggtgggactgaaggactgctggctgaaaagcttgaagcccttatcacacaaacaagagccaagcaagctgcgacgatgtctgaggtggagtggcgcggccgtacagtacctgttaagatcgataaggttcggatctttcttctaggactcgcagacaatgaggcggctatagtgcaggccgagtccgaagagacaaaggagcgcctcttcgagagtatgttgtctgaatgtagggacgctattcaagttgtccgagaagagctaaaacccgaccagaaacaacgagactatatcctcgagggagagcccgggaaagtctcaaatctacagtacctgcactcttacttaacctacatcaaattgtccaccgccatcaagcggaacgaaaatatggcgaaggggctccaacgggcgctgttacagcagcaacccgaggatgattccaaaagatcaccaagaccacaggacctcatcagactgtacgacatcatacttcagaaccttgttgagctgctgcaacttcctggtctcgaggaggacaaggcatttcagaaggagatcggattgaagacattggtgttcaaagcctatcgctgttttttcattgctcagagctatgtgctggtcaagaaatggtccgaagctctggtgctgtacgatcgggtccttaaatacgccaacgaggtgaactcggatgccggagcctttaaaaattcgctgaaagacctgccagacgtgcaagagctgataactcaggtgagatcagaaaaatgttctcttcaggcggccgcaattctggatgcaaatgacgcccatcagacagaaacaagctctagccaggtcaaggacaacaaacctttagtcgagaggttcgagtctactccaggcacagacggagccctgaagcgatttgtgatgctgctgcaatatcacggatttgaaatgaacagcagcctcctgtag

SEQ ID NO: 93584 - DNA, 1770 bp, Artificial Sequence
  derived and/or modified sequence
atggctgcggagaaacaggtgcccggaggaggcggcggcggcggctccggcggcggcggtgggtctggaggaggaggatccggtggaggaaggggggctggaggcgaggagaataaagagaacgaaaggccttctgctgggagtaaagccaacaaggagtttggagactcactttcactcgagatcctccagatcattaaggagagtcagcagcaacatgggctgaggcatggggattttcagcgctacagatacctgctcctggtcctgatggacgctgagcgtgcctggtcctacgctatgcagctgaagcaggaagccaacaccgaaccgagaaagagattccacctcttgtcacgactccgaaaagctgtgaagcatgcagaagagctcgaacgactgtgtgagtcgaacagagtcgacgctaagacaaagcttgaagcgcaagcttatactgcatacctttccggaatgttgcggttcgaacatcaggaatggaaggctgctatcgaggcctttaacaaatgtaaaaccatttacgaaaaacttgcttccgccttcaccgaagagcaggccgtgctttataaccagagagtcgaggagataagccccaacatacggtactgtgcttacaatatcggtgatcagtccgccattaatgagctcatgcaaatgcggcttcgctccggcggcactgaaggattgctcgccgagaaactcgaggcactgattactcagactcgcgccaaacaggctgctactatgtctgaagtggagtggcgaggaaggacggttcctgttaaaatcgataaggtgcgaatcttcctcctgggtctggctgataacgaggccgcaatcgtgcaggccgagtcagaagaaactaaggaacggttgtttgaatccatgctctccgagtgcagagacgcaatccaggtggtacgggaggagcttaagcctgatcagaaacagcgcgactatatcctggagggggaaccaggcaaggtttctaatctccagtacttgcattcttatttgacatacataaagctcagcaccgccatcaaacgaaacgagaacatggcaaaaggtctccaacgtgccctcctgcagcagcagcccgaggatgacagcaaacggtctccacgaccccaggacttaatcagattgtatgacataatccttcaaaacctggtagaactgctccagctgcctgggctggaagaggacaaagccttccagaaggaaatcggactcaagaccttggtttttaaagcatatcggtgcttcttcattgctcagtcttacgttttggtgaaaaagtggtctgaggccctcgtattatacgaccgagttctgaaatatgccaacgaggtgaattccgacgctggagcttttaagaatagtctaaaagacctcccagatgtacaggagctcattacccaggtgcgaagtgaaaaatgtagcttacaagcagctgcgattctagacgctaatgacgcacatcagaccgagacaagctcgagccaggtcaaggacaataaacctttggtagaaagattcgagaccttctgcctggacccttccctggtgactaaacaggccaatttggtacactttccccccggctttcagcctataccgtgcaaaccactcttcttcgacctggcattgaaccatgttgcctttccccccctggaggacaaactggagcagaagaccaagtccggcctcaccggctatatcaaaggcatctttgggtttcgctcctag

SEQ ID NO: 93585 - DNA, 984 bp, Artificial Sequence
  derived and/or modified sequence
atgcagatgaggctgcggagcggcggcacagagggcctgctggccgagaagctggaggccctgatcacccagacccgggccaagcaggccgccaccatgtctgaggtggagtggaggggccgcacagtgcctgtgaagattgacaaggtgcgcatcttcctgctgggcctggccgacaatgaggccgccatcgtgcaggccgagagcgaggagaccaaggagcggctgtttgagagcatgctgtctgaatgtagagatgccatccaggtggtgcgggaggagctgaagccagaccagaagcagagggactacatcctggagggggagcccgggaaggtgagcaacctgcagtacctgcacagctacctgacctacatcaagctgagcacagccatcaagagaaatgaaaacatggccaagggcctgcagagggccctgctgcagcagcagccagaagatgacagcaagaggagcccccggccccaggacctgatccggctgtatgacatcatcctgcagaacctggtggagctgctgcagctgcccggcctggaggaggacaaggccttccagaaggagatcggcctgaagaccctggtgttcaaggcctaccgctgcttcttcatcgcccagagctatgtgctggtgaagaagtggagcgaggccctggtgctgtatgacagagtgctgaagtatgccaatgaggtgaacagtgatgctggggccttcaagaacagcctgaaggacctgcctgatgtgcaggagctgatcacccaggtgcgctctgagaagtgcagcctgcaggccgccgccatcctggatgccaatgatgcccaccagacagagaccagcagcagccaggtgaaggacaacaagcccctggtggagagatttgagagcaccccaggcacagatggagccctgaagagatttgtgatgctgctgcagtaccacggctttgagatgaacagcagcctgctgtag

SEQ ID NO: 93586 - DNA, 1770 bp, Artificial Sequence
  derived and/or modified sequence
atggctgctgagaagcaggtgcctgggggcggcggcggcggcggcagcggcggcggcggcggcagcggcggcggcggcagcggcggcggcagaggagctggaggagaggagaacaaggaaaatgaaagaccttctgctggcagcaaggccaacaaggagtttggagacagcctgagcctggagatcctgcagatcatcaaggagagccagcagcagcacggcctgcggcatggagacttccagcgctaccgctacctgctgctggtgctgatggatgctgagcgggcctggagctatgccatgcagctgaagcaggaggccaacacagagcccaggaagcgcttccacctgctgagccggctgaggaaggctgtgaagcacgccgaggagctggagcggctgtgtgagagcaacagagtggatgccaagaccaagctggaggcccaggcctacacagcctacctgagcggcatgctgcgctttgagcaccaggagtggaaggccgccatcgaggccttcaacaagtgcaagaccatctatgagaagctggccagcgccttcacagaggagcaggccgtgctgtacaaccagagggtggaggagatcagccccaacatccgctactgtgcctacaacattggagaccagagcgccatcaatgagctgatgcagatgaggctgcggagcggcggcacagagggcctgctggccgagaagctggaggccctgatcacccagacccgggccaagcaggccgccaccatgtctgaggtggagtggaggggccgcacagtgcctgtgaagattgacaaggtgcgcatcttcctgctgggcctggccgacaatgaggccgccatcgtgcaggccgagagcgaggagaccaaggagcggctgtttgagagcatgctgtctgaatgtagagatgccatccaggtggtgcgggaggagctgaagccagaccagaagcagagggactacatcctggagggggagcccgggaaggtgagcaacctgcagtacctgcacagctacctgacctacatcaagctgagcacagccatcaagagaaatgaaaacatggccaagggcctgcagagggccctgctgcagcagcagccagaagatgacagcaagaggagcccccggccccaggacctgatccggctgtatgacatcatcctgcagaacctggtggagctgctgcagctgcccggcctggaggaggacaaggccttccagaaggagatcggcctgaagaccctggtgttcaaggcctaccgctgcttcttcatcgcccagagctatgtgctggtgaagaagtggagcgaggccctggtgctgtatgacagagtgctgaagtatgccaatgaggtgaacagtgatgctggggccttcaagaacagcctgaaggacctgcctgatgtgcaggagctgatcacccaggtgcgctctgagaagtgcagcctgcaggccgccgccatcctggatgccaatgatgcccaccagacagagaccagcagcagccaggtgaaggacaacaagcccctggtggagagatttgagaccttctgcctggaccccagcctggtgaccaagcaggccaacctggtgcacttccccccaggcttccagcccatcccctgcaagcccctcttctttgacctggccctgaaccacgtggccttcccccccctggaggacaagctggagcagaagaccaagagcggcctgaccggctacatcaagggcatcttcggcttccgctcctag

SEQ ID NO: 93587 - DNA, 984 bp, Artificial Sequence
  derived and/or modified sequence
atgcagatgcggctgcggagcggcggcaccgagggcctgctggccgagaaactggaagcccttattactcaaacacgagccaagcaggccgcaaccatgtccgaagtagagtggcgtggcagaacagtccctgttaaaattgataaggtgagaatattcctgctgggattggccgataacgaggccgcgattgttcaggctgaaagcgaggagaccaaggagcgattatttgaatctatgctttccgaatgcagagacgccattcaggtggttcgcgaagagctgaaacccgatcagaaacaacgtgactacatcctggagggcgagcctgggaaggtgtctaacctccagtacctgcacagctacttaacctacatcaagcttagcaccgcaatcaagagaaatgaaaacatggccaagggcctgcagcgtgccctcttgcagcagcagccagaagatgactccaagaggagtccacgaccgcaggacctcatccgcctctatgatattatccttcagaaccttgtggaactgctgcaactacccggattagaggaagacaaagcctttcagaaagagataggactgaaaactctagtgtttaaagcttaccggtgcttcttcatagcccagagttacgtactcgtgaagaaatggagcgaagctctggtactttatgatcgcgtgcttaagtacgccaatgaagttaattccgatgccggagctttcaaaaactctcttaaagatctgcccgacgtccaggagctcattactcaagtccggtccgaaaaatgcagcctccaggccgccgccatactcgacgccaatgacgcacatcagaccgagaccagtagctcccaggttaaagacaacaagcctctggtggagcgtttcgagtctacgccaggtactgatggcgcccttaagcgtttcgtgatgctcctccaataccacggatttgagatgaactcctccttgctgtag

SEQ ID NO: 93588 - DNA, 1770 bp, Artificial Sequence
  derived and/or modified sequence
atggccgccgagaagcaggtgcccggcggcggcggcggcggcggctctggtgggggaggaggcagcggcgggggcggcagcggtggcggaaggggtgcagggggcgaggaaaataaagaaaatgagagaccctctgcagggtccaaggccaacaaggagttcggagattctctgagcctcgagatactgcaaataatcaaggagagccagcagcagcacggcctcaggcacggcgacttccaacgctatcgttacctactgctcgtgctcatggacgccgaaagggcttggtcatatgccatgcagctcaagcaggaggccaataccgaacccaggaagcgcttccatctgctatccagattacgcaaggccgtcaagcacgcagaagaacttgagcggctatgtgagtcaaacagggtggatgctaagaccaaactggaggcccaggcctataccgcttatttgtccggcatgcttcgcttcgagcatcaggagtggaaagcagctatagaagcttttaacaagtgtaaaactatttacgaaaagcttgcctcagctttcacagaggagcaggctgttctctacaaccagcgcgtggaagagataagtccaaatataagatactgtgcatacaacatcggagaccagagtgccatcaacgagcttatgcagatgcgcctgaggtccggaggaactgagggcctcctggcagagaagctcgaagcattgataacccagaccagagcgaagcaggctgctacaatgtccgaagtggaatggagaggtcgaaccgtgcccgtgaaaattgacaaggtccgtattttcttattaggcttagccgacaacgaggctgctatcgtacaggccgaaagtgaagagaccaaggaacgactctttgaatcaatgctgtctgagtgtcgggacgcaatccaagttgtgcgggaagagctgaaacccgaccaaaaacagcgggattacatacttgaaggtgagcctggaaaagttagcaacctgcagtatctccattcctatctgacgtacatcaagctgagtaccgctatcaagaggaacgagaatatggccaaggggttacagagagcgttactgcagcaacagccagaagatgattccaagcgaagcccacgacctcaagatttaatccgactctatgacatcatcttacagaacttggtggagctgctgcaactccccgggctcgaagaggacaaagctttccagaaagagattggcttgaaaactttggtgtttaaagcttatagatgttttttcatcgcgcaaagttacgtcctggtaaaaaaatggtccgaggccctggtgctttacgatcgagtgctgaagtatgccaacgaagtgaacagcgacgcgggcgcattcaagaacagcctgaaggatctgcctgacgtccaagagctgatcacccaggtgcgaagcgagaaatgttctctccaggcagccgccatactggatgctaacgacgctcaccagactgaaacctcttcctcccaggtcaaagacaacaaacctttagtggaaaggttcgagactttctgtctcgacccttccctggtgactaagcaggctaacctcgttcactttccaccaggctttcagcccattccatgcaagcccctgtttttcgacctggctttaaatcacgtggcattcccccctttagaggataaattagagcagaaaacgaagtctggactcaccgggtacattaaaggcatcttcggcttccgcagttag

SEQ ID NO: 93589 - DNA, 984 bp, Artificial Sequence
  derived and/or modified sequence
atgcagatgaggttaaggagcgggggaactgagggactgttggcggagaagctggaggcccttatcactcaaacacgggctaagcaggcggcaaccatgagcgaggtggagtggcgtgggaggactgtccccgtgaaaatcgataaggtaaggatcttccttctgggcctcgctgacaatgaagccgctattgtccaggccgagagtgaggagactaaggagagactgtttgagtcaatgctgtcggaatgtcgagacgctatacaggtagtgagagaggagttgaaacccgaccagaaacagcgagactacatcctggaaggagaacccggaaaggtgtccaacctgcagtatctccacagttaccttacctacattaaactgtccaccgcgatcaagcggaacgagaatatggcaaagggcctccagcgcgcactccttcagcagcagcctgaggacgatagcaagcgaagccccaggccccaggatctgatcaggctgtacgatatcatactgcaaaatctagtcgagctactgcagttacccggtttagaagaagataaggcttttcagaaagagattggccttaaaacactggtcttcaaggcttacagatgtttcttcatcgcacagagttatgtactggtgaaaaagtggagcgaagcacttgttctttacgacagagtgctaaagtacgccaatgaggtgaactctgatgccggagcttttaaaaactccctaaaagatctgcctgacgtgcaggagctcattacccaggtgcgcagcgagaagtgttctttacaggcagcagcaattttggatgcaaatgatgcccaccagaccgagacttcttccagccaagtcaaagacaataaaccacttgtggaacgcttcgaaagtacgcctgggactgacggtgcccttaagagattcgtgatgcttttgcagtatcatggcttcgagatgaatagctccttattatag

SEQ ID NO: 93590 - DNA, 1770 bp, Artificial Sequence
  derived and/or modified sequence
atggcagccgaaaagcaggtacctggcggaggcggaggaggcggaagtgggggtgggggaggctccggaggtggaggctcgggcggaggacgtggagcgggaggcgaagagaacaaagagaacgaacgaccatccgccggtagcaaggcgaacaaggagttcggtgactccctgtctcttgagattttacaaatcattaaagagtcacagcagcaacacggactgagacacggtgatttccagagatatcgctatctcctcttagtgttgatggatgcggagcgtgcgtggtcctacgcaatgcagctgaaacaggaggccaatacagagcctcggaaaaggtttcatctgctgtcccgacttagaaaggccgttaagcacgctgaggaattggaaagactatgtgaaagcaaccgtgtggacgccaagacgaagttggaagcccaagcttatacagcctacctctcagggatgctgaggttcgaacaccaggagtggaaggccgcaatcgaggcctttaacaaatgcaaaactatttacgaaaagctcgcctctgcatttactgaggaacaagccgtgctgtacaaccagcgtgtcgaagagatctccccgaacatacggtattgcgcttacaacatcggagatcagtccgccattaacgaactcatgcagatgcgcttacgtagcggcggaacggagggcttgctggcagagaagctggaggccctgatcacccagacccgggctaagcaagcagctactatgagcgaggtggagtggagggggagaaccgtccccgttaaaattgacaaggtgagaatttttctcctgggcctggctgacaacgaagccgcaatagtgcaggcagagtcagaggagactaaagaaagattgtttgaaagcatgctcagcgaatgccgagatgctatccaggtggtgcgcgaggagctgaagccagatcagaagcagcgtgattacatcctggaaggcgaacctggtaaggtgagcaacttacagtatctccactcttatctcacctacatcaagcttagcacagcaatcaagagaaacgagaacatggccaagggcctccagagggccctgctgcaacaacagcccgaagatgactcgaaacgttctcctcgtcctcaggatctcatccgactctacgacattatcttacaaaatctggtcgagttactgcagttgcccggtcttgaggaggataaggcattccaaaaagagatcgggctcaagaccctcgtttttaaggcatatcgctgctttttcatcgcacaatcctacgtgctggtcaaaaagtggtcagaggctttggtgctttacgatcgggttctgaaatatgccaacgaggtaaacagcgatgccggagctttcaagaattctctgaaggacctacccgacgttcaggagcttattactcaggtacgaagcgagaagtgtagtctgcaggcggctgccattctcgatgccaatgatgcccatcagacggaaacatccagctcacaggtgaaggataacaagcccttggtcgaacgtttcgaaactttctgcctcgacccaagtctcgtcaccaagcaggccaacctggtgcatttccctcccggttttcagcctatcccgtgtaaaccattgttcttcgacctggctcttaaccacgtagcgttccccccactcgaggataaacttgaacagaaaaccaaatcagggctgactggatatattaaaggtatattcggtttccggtcatag

SEQ ID NO: 93591 - DNA, 1236 bp, Artificial Sequence
  derived and/or modified sequence
atccgctattgtgcatataatattggggaccagtcagccatcaatgaactcatgcagatgagattgaggtctgggggcactgagggtctcttggctgaaaaattggaggctttgatcactcagactcgagccaaacaggcagctaccatgagtgaagtggagtggagagggagaacggttccagtgaagattgacaaagtgcgcattttcttattaggactggctgataacgaagcagctattgtccaggctgaaagcgaagaaactaaggagcgcctgtttgaatcaatgctcagcgagtgtcgggacgccatccaggtggttcgggaggagctcaagccagatcagaaacagagagattatatccttgaaggagagccagggaaggtgtctaatcttcaatacttgcatagctacctgacttacatcaagctatcaacggcaatcaagcgtaatgagaacatggccaaaggtctgcagagggctctgctgcagcagcagccagaggatgacagcaagcgctcaccccggccccaggacctgatccgactctatgacatcatcttacagaatctggtggaattgctccagcttcctggtttagaggaagacaaagccttccagaaagagataggcctcaagactctggtgttcaaagcttacaggtgttttttcattgctcagtcctatgtgctggtgaagaagtggagcgaagcccttgtcctgtatgacagagtcctgaaatatgcaaatgaagtaaattctgatgctggcgccttcaagaacagcctaaaggacctgcctgatgtgcaagagctcatcactcaagtgcggtcagagaagtgctccctgcaggccgcagccatccttgatgcaaacgacgctcatcaaacagagacctcctcctcccaagtcaaggacaataagcctctggttgaacggtttgagtccacaccaggcacagatggggccttgaaacgctttgtcatgcttcttcagtaccatggatttgaaatgaactcatccttgctgtgagcatccaggagcccttgagaagtttatctatgactatgaaactggcaacgtcaccccagaattacggtcagccttattccccttcacctcccagtgaacgctaagaagtttcagacaagcagagagctctatttttagaagaaatatgttacactcagaaatgatgaaaccaaatcttatattaaaaggcaaagatgacgg

SEQ ID NO: 93592 - DNA, 2386 bp, Artificial Sequence
  derived and/or modified sequence
gcggcgcaggggcaagatggctgctgagaagcaggtcccaggcggcggcggcggcggcggcagtggcggcggcggtggcagtggcggcggcggtagcggcggtggacgtggtgccggaggggaagaaaataaagaaaacgaacgcccttcggccggatcgaaggcaaacaaagaatttggggatagcctgagtttggagattcttcagattattaaggaatcccagcagcagcatggtttacggcatggagattttcagaggtacagatacttgcttctggttctgatggatgctgaaagagcctggagctacgccatgcagctgaaacaggaagccaacactgaaccccgaaaacggtttcacttgttatctcgcctacgcaaagccgtgaagcatgcagaggaattggaacgcttgtgtgagagcaatcgcgtggatgccaagaccaaattagaggctcaggcttacacagcttacctctcaggaatgctacgttttgaacatcaagaatggaaagctgccattgaggcttttaacaaatgcaaaactatctatgagaagctagccagtgctttcacagaggagcaggctgtgctgtataaccaacgtgtggaagagatttcacccaacatccgctattgtgcatataatattggggaccagtcagccatcaatgaactcatgcagatgagattgaggtctgggggcactgagggtctcttggctgaaaaattggaggctttgatcactcagactcgagccaaacaggcagctaccatgagtgaagtggagtggagagggagaacggttccagtgaagattgacaaagtgcgcattttcttattaggactggctgataacgaagcagctattgtccaggctgaaagcgaagaaactaaggagcgcctgtttgaatcaatgctcagcgagtgtcgggacgccatccaggtggttcgggaggagctcaagccagatcagaaacagagagattatatccttgaaggagagccagggaaggtgtctaatcttcaatacttgcatagctacctgacttacatcaagctatcaacggcaatcaagcgtaatgagaacatggccaaaggtctgcagagggctctgctgcagcagcagccagaggatgacagcaagcgctcaccccggccccaggacctgatccgactctatgacatcatcttacagaatctggtggaattgctccagcttcctggtttagaggaagacaaagccttccagaaagagataggcctcaagactctggtgttcaaagcttacaggtgttttttcattgctcagtcctatgtgctggtgaagaagtggagcgaagcccttgtcctgtatgacagagtcctgaaatatgcaaatgaagtaaattctgatgctggcgccttcaagaacagcctaaaggacctgcctgatgtgcaagagctcatcactcaagtgcggtcagagaagtgctccctgcaggccgcagccatccttgatgcaaacgacgctcatcaaacagagacctcctcctcccaagtcaaggacaataagcctctggttgaacggtttgagacattctgcctggacccttcccttgtcaccaagcaagccaaccttgtgcacttcccaccaggcttccagcccattccctgcaagcctttgttctttgacctggccctcaaccatgtggctttcccaccccttgaggacaagttggaacagaagaccaagagtggcctcactggatacatcaagggcatctttggattcaggagctaaccaggctcttcctcgggggcgggggagattctgactcttaatctgtattgtgagaaaatcccagcaagttccatgatattaaatccaggtctgcattggcccggggcaagagtttaacatcttcggccctgcattcctacatcttgtgtctgtacacgttcttaagcagcgtgtcaggagagcaccctgttgtcttctggtaaatgtgtgcagggtcatcctgtctcctgtacctcctgggaaaggggccgctgctgtctggtgccctgtgagctgtgattgattgcctttggtcagtaatgcgttcaggagtccacaccaggcacagatggggccttgaaacgctttgtcatgcttcttcagtaccatggatttgaaatgaactcatccttgctgtgagcatccaggagcccttgagaagtttatctatgactatgaaactggcaacgtcaccccagaattacggtcagccttattccccttcacctcccagtgaacgctaagaagtttcagacaagcagagagctctatttttagaagaaatatgttacactcagaaatgatgaaaccaaatcttatattaaaaggcaaagatgacgg

SEQ ID NO: 93593 - DNA, 1706 bp, Artificial Sequence
  derived and/or modified sequence
ccttcattgctttttaggatgtttgtaaaattcccagtgggaacttagagctttgtgggagcagtggggaggttttttggtttcagcaccttgatgcagaggcttagttaaagggagcagaggtgatacgtggcagtcaagaggttttaaacttgaactgtaccctaccgacaggaaaagaggcaaatcctgtgtagctggctgaaagcgaagaaactaaggagcgcctgtttgaatcaatgctcagcgagtgtcgggacgccatccaggtggttcgggaggagctcaagccagatcagaaacagagagattatatccttgaaggagagccagggaaggtgtctaatcttcaatacttgcatagctacctgacttacatcaagctatcaacggcaatcaagcgtaatgagaacatggccaaaggtctgcagagggctctgctgcagcagcagccagaggatgacagcaagcgctcaccccggccccaggacctgatccgactctatgacatcatcttacagaatctggtggaattgctccagcttcctggtttagaggaagacaaagccttccagaaagagataggcctcaagactctggtgttcaaagcttacaggtgttttttcattgctcagtcctatgtgctggtgaagaagtggagcgaagcccttgtcctgtatgacagagtcctgaaatatgcaaatgaagtaaattctgatgctggcgccttcaagaacagcctaaaggacctgcctgatgtgcaagagctcatcactcaagtgcggtcagagaagtgctccctgcaggccgcagccatccttgatgcaaacgacgctcatcaaacagagacctcctcctcccaagtcaaggacaataagcctctggttgaacggtttgagacattctgcctggacccttcccttgtcaccaagcaagccaaccttgtgcacttcccaccaggcttccagcccattccctgcaagcctttgttctttgacctggccctcaaccatgtggctttcccaccccttgaggacaagttggaacagaagaccaagagtggcctcactggatacatcaagggcatctttggattcaggagctaaccaggctcttcctcgggggcgggggagattctgactcttaatctgtattgtgagaaaatcccagcaagttccatgatattaaatccaggtctgcattggcccggggcaagagtttaacatcttcggccctgcattcctacatcttgtgtctgtacacgttcttaagcagcgtgtcaggagagcaccctgttgtcttctggtaaatgtgtgcagggtcatcctgtctcctgtacctcctgggaaaggggccgctgctgtctggtgccctgtgagctgtgattgattgcctttggtcagtaatgcgttcaggagtccacaccaggcacagatggggccttgaaacgctttgtcatgcttcttcagtaccatggatttgaaatgaactcatccttgctgtgagcatccaggagcccttgagaagtttatctatgactatgaaactggcaacgtcaccccagaattacggtcagccttattccccttcacctcccagtgaacgctaagaagtttcagacaagcagagagctctatttttagaagaaatatgttacactcagaaatgatgaaaccaaatcttatattaaaaggcaaagatgacgg

SEQ ID NO: 93594 - DNA, 984 bp, Artificial Sequence
  derived and/or modified sequence
atgcagatgagactgagaagcggcggcaccgagggcctgctggccgagaagctggaggccctgatcacccagaccagagccaagcaggccgccaccatgagcgaggtggagtggagaggcagaaccgtgcccgtgaagatcgacaaggtgagaatcttcctgctgggcctggccgacaacgaggccgccatcgtgcaggccgagagcgaggagaccaaggagagactgttcgagagcatgctgagcgagtgcagagacgccatccaggtggtgagagaggagctgaagcccgaccagaagcagagagactacatcctggagggcgagcccggcaaggtgagcaacctgcagtacctgcacagctacctgacctacatcaagctgagcaccgccatcaagagaaacgagaacatggccaagggcctgcagagagccctgctgcagcagcagcccgaggacgacagcaagagaagccccagaccccaggacctgatcagactgtacgacatcatcctgcagaacctggtggagctgctgcagctgcccggcctggaggaggacaaggccttccagaaggagatcggcctgaagaccctggtgttcaaggcctacagatgcttcttcatcgcccagagctacgtgctggtgaagaagtggagcgaggccctggtgctgtacgacagagtgctgaagtacgccaacgaggtgaacagcgacgccggcgccttcaagaacagcctgaaggacctgcccgacgtgcaggagctgatcacccaggtgagaagcgagaagtgcagcctgcaggccgccgccatcctggacgccaacgacgcccaccagaccgagaccagcagcagccaggtgaaggacaacaagcccctggtggagagattcgagagcacccccggcaccgacggcgccctgaagagattcgtgatgctgctgcagtaccacggcttcgagatgaacagcagcctgctgtag

SEQ ID NO: 93595 - DNA, 1770 bp, Artificial Sequence
  derived and/or modified sequence
atggccgccgagaagcaggtgcccggcggcggcggcggcggcggcagcggcggcggcggcggcagcggcggcggcggcagcggcggcggcagaggcgccggcggcgaggagaacaaggagaacgagagacccagcgccggcagcaaggccaacaaggagttcggcgacagcctgagcctggagatcctgcagatcatcaaggagagccagcagcagcacggcctgagacacggcgacttccagagatacagatacctgctgctggtgctgatggacgccgagagagcctggagctacgccatgcagctgaagcaggaggccaacaccgagcccagaaagagattccacctgctgagcagactgagaaaggccgtgaagcacgccgaggagctggagagactgtgcgagagcaacagagtggacgccaagaccaagctggaggcccaggcctacaccgcctacctgagcggcatgctgagattcgagcaccaggagtggaaggccgccatcgaggccttcaacaagtgcaagaccatctacgagaagctggccagcgccttcaccgaggagcaggccgtgctgtacaaccagagagtggaggagatcagccccaacatcagatactgcgcctacaacatcggcgaccagagcgccatcaacgagctgatgcagatgagactgagaagcggcggcaccgagggcctgctggccgagaagctggaggccctgatcacccagaccagagccaagcaggccgccaccatgagcgaggtggagtggagaggcagaaccgtgcccgtgaagatcgacaaggtgagaatcttcctgctgggcctggccgacaacgaggccgccatcgtgcaggccgagagcgaggagaccaaggagagactgttcgagagcatgctgagcgagtgcagagacgccatccaggtggtgagagaggagctgaagcccgaccagaagcagagagactacatcctggagggcgagcccggcaaggtgagcaacctgcagtacctgcacagctacctgacctacatcaagctgagcaccgccatcaagagaaacgagaacatggccaagggcctgcagagagccctgctgcagcagcagcccgaggacgacagcaagagaagccccagaccccaggacctgatcagactgtacgacatcatcctgcagaacctggtggagctgctgcagctgcccggcctggaggaggacaaggccttccagaaggagatcggcctgaagaccctggtgttcaaggcctacagatgcttcttcatcgcccagagctacgtgctggtgaagaagtggagcgaggccctggtgctgtacgacagagtgctgaagtacgccaacgaggtgaacagcgacgccggcgccttcaagaacagcctgaaggacctgcccgacgtgcaggagctgatcacccaggtgagaagcgagaagtgcagcctgcaggccgccgccatcctggacgccaacgacgcccaccagaccgagaccagcagcagccaggtgaaggacaacaagcccctggtggagagattcgagaccttctgcctggaccccagcctggtgaccaagcaggccaacctggtgcacttcccccccggcttccagcccatcccctgcaagcccctgttcttcgacctggccctgaaccacgtggccttcccccccctggaggacaagctggagcagaagaccaagagcggcctgaccggctacatcaagggcatcttcggcttcagaagctag

SEQ ID NO: 93596 - DNA, 867 bp, Artificial Sequence
  derived and/or modified sequence
atgctttccgagtgcagggacgccattcaggtagtccgggaggagttgaaacccgatcaaaagcagcgagactatatactcgagggggagcccggcaaagtgtctaacctgcagtatctgcactcctacctgacctacatcaaactctccacagccattaaacgcaacgaaaacatggctaagggactgcagcgggcgttgctgcagcaacagccagaagatgactccaaacgttcaccgaggccacaggatctgattagattgtacgatattattttgcaaaacctagtggagctgctgcagctgcctggattagaagaggataaggccttccagaaggaaatagggcttaaaacgctcgtcttcaaagcttatcggtgcttcttcatcgctcaatcttacgtacttgtcaagaaatggtccgaagccctcgtcctgtacgatcgagtgctcaagtatgctaatgaggtgaattcagacgctggagctttcaagaacagcctgaaggatctacctgatgtgcaggagctaattacccaagtaaggtccgagaagtgttctctccaggcagccgctatccttgacgctaatgacgcccatcagacagagacttcctcgagtcaggtcaaggataacaaaccgctggtggaacgcttcgaaactttctgcctagacccctctctggtgaccaaacaggctaatctcgtccatttccctccaggctttcagccaatcccatgtaagcctctcttcttcgacctggctcttaaccatgtggcttttccacccctggaggataaactggagcagaagacgaagtcaggactgacggggtacataaaaggcatttttggctttcgctcttag

SEQ ID NO: 93597 - DNA, 867 bp, Artificial Sequence
  derived and/or modified sequence
atgctgtctgagtgcagagatgccatccaggtggtgcgggaggagctgaagccagaccagaagcagagggactacatcctggagggggagcccgggaaggtgagcaacctgcagtacctgcacagctacctgacctacatcaagctgagcacagccatcaagagaaatgaaaacatggccaagggcctgcagagggccctgctgcagcagcagccagaagatgacagcaagaggagcccccggccccaggacctgatccggctgtatgacatcatcctgcagaacctggtggagctgctgcagctgcccggcctggaggaggacaaggccttccagaaggagatcggcctgaagaccctggtgttcaaggcctaccgctgcttcttcatcgcccagagctatgtgctggtgaagaagtggagcgaggccctggtgctgtatgacagagtgctgaagtatgccaatgaggtgaacagtgatgctggggccttcaagaacagcctgaaggacctgcctgatgtgcaggagctgatcacccaggtgcgctctgagaagtgcagcctgcaggccgccgccatcctggatgccaatgatgcccaccagacagagaccagcagcagccaggtgaaggacaacaagcccctggtggagagatttgagaccttctgcctggaccccagcctggtgaccaagcaggccaacctggtgcacttccccccaggcttccagcccatcccctgcaagcccctcttctttgacctggccctgaaccacgtggccttcccccccctggaggacaagctggagcagaagaccaagagcggcctgaccggctacatcaagggcatcttcggcttccgctcctag

SEQ ID NO: 93598 - DNA, 867 bp, Artificial Sequence
  derived and/or modified sequence
atgctgagcgagtgccgggacgccatccaggtggtgcgggaggagctgaaacctgaccagaagcaacgcgactatattttggagggagagcctggaaaagtgtccaacctgcaataccttcattcctatttaacctatattaagctgtcaaccgccattaaaaggaatgagaacatggcaaaaggacttcagagggcactgctccaacaacagcctgaagacgactccaagagatcgccacgtccccaggacttaattcggctatacgatatcatattgcaaaatctcgtggagttattgcaacttcccggcctcgaggaggataaagccttccagaaggagattggactgaagacactcgtattcaaagcctaccgctgctttttcattgctcagtcatacgtgcttgtaaaaaagtggtccgaggcgttagttctatatgaccgagttttaaaatacgccaatgaagtgaacagtgatgccggggcctttaagaattccttgaaagatcttcccgatgtgcaggaactaattacacaggtaaggtcagagaaatgttcccttcaggccgccgcgatactggatgctaatgacgcacaccaaaccgaaacaagctcttctcaagtgaaagacaataagcccctagtggagcgattcgagacattctgtctcgaccctagcctggtgactaagcaggcaaacctggttcactttccaccagggttccagccaatcccatgcaaaccgcttttcttcgaccttgccctcaatcatgtagcctttcccccattggaggataaactcgagcagaaaacaaaatcaggcctcacagggtatataaaaggaatttttgggtttcggagctag

SEQ ID NO: 93599 - DNA, 867 bp, Artificial Sequence
  derived and/or modified sequence
atgctatctgagtgtcgagacgccattcaggtagtccgggaagagttgaagcctgaccagaagcagagggactatatcctcgaaggcgaacctggcaaagtgtcgaatctgcaatacctgcacagttacctcacttatatcaaactgagtacagcaatcaagcgtaacgagaatatggccaagggactgcagcgggcattactccaacagcagccagaggatgacagcaagcgctcccctcgcccacaggacctgattagattgtatgacattatactgcagaacttggtcgagctacttcagctcccaggattggaggaggacaaagcgttccagaaggaaatcggtcttaagacattggtattcaaagcatacaggtgcttttttattgcacagtcctacgtgttggttaagaaatggtccgaggccctggtcctttatgatagagtgctgaagtatgccaacgaagtgaattccgatgctggagccttcaaaaactcacttaaagacttacctgacgtccaagagttaattacccaggtcaggtcggaaaagtgcagtcttcaggcggcagccatcctggacgctaacgacgcccatcaaacagagacgagttccagccaggtgaaagacaacaaacccctagtggagcggtttgagaccttttgtctggatccctctctagtgaccaagcaagctaatttagtgcactttccacctgggtttcagcctattccatgcaaacctcttttttttgatctagcacttaaccatgtggcgtttccacctctcgaagataagctggagcagaaaactaaatccggcctcaccggatatattaaggggatatttggatttcgatcatag

SEQ ID NO: 93600 - DNA, 867 bp, Artificial Sequence
  derived and/or modified sequence
atgctgagcgagtgcagagacgccatccaggtggtgagagaggagctgaagcccgaccagaagcagagagactacatcctggagggcgagcccggcaaggtgagcaacctgcagtacctgcacagctacctgacctacatcaagctgagcaccgccatcaagagaaacgagaacatggccaagggcctgcagagagccctgctgcagcagcagcccgaggacgacagcaagagaagccccagaccccaggacctgatcagactgtacgacatcatcctgcagaacctggtggagctgctgcagctgcccggcctggaggaggacaaggccttccagaaggagatcggcctgaagaccctggtgttcaaggcctacagatgcttcttcatcgcccagagctacgtgctggtgaagaagtggagcgaggccctggtgctgtacgacagagtgctgaagtacgccaacgaggtgaacagcgacgccggcgccttcaagaacagcctgaaggacctgcccgacgtgcaggagctgatcacccaggtgagaagcgagaagtgcagcctgcaggccgccgccatcctggacgccaacgacgcccaccagaccgagaccagcagcagccaggtgaaggacaacaagcccctggtggagagattcgagaccttctgcctggaccccagcctggtgaccaagcaggccaacctggtgcacttcccccccggcttccagcccatcccctgcaagcccctgttcttcgacctggccctgaaccacgtggccttcccccccctggaggacaagctggagcagaagaccaagagcggcctgaccggctacatcaagggcatcttcggcttcagaagctag

SEQ ID NO: 93601 - DNA, 2991 bp, Artificial Sequence
  derived and/or modified sequence
atggatgaggacacccactacgacaaggtggaggacgtggtcggctcacatattgaggatgccgtcaccttctgggctcagagtatcaacaggaataaggacatcatgaaaattgggtgctccttatccgaggtttgtccccaagcatcttccgtcctgggaaatctcgatcccaacaaaatatacggtggtctcttcagtgaggatcagtgttggtaccggtgtaaggtgctcaagattattagtgtggaaaagtgcttggtgaggtatatagattatggtaacaccgagatattgaaccggagcgacattgtcgagatcccactggagttgcagttctcttccgtggccaagaaatataaactgtggggattgcacattccatctgatcaggaagtgacacagttcgaccagggtactacattcctgggctctcttatcttcgaaaaggagattaaaatgaggattaaggccacttcagaagatggaaccgttatcgctcaggctgaatacgggtccgttgacatcggtgaggaggtactcaagaaaggattcgccgaaaaatgcagactcgcaagccgaaccgacatttgtgaggagaagaaactcgacccgggtcagctcgtgctgagaaacctgaaatctcctattcccctgtgggggcaccggtcaaatcagtccacattctcccgaccaaaagggcacctgagtgaaaagatgactctagacttgaaagacgagaatgacgctggcaatctcatcacatttcctaaggagagtctggcagtaggggactttaatcttggttcaaatgtgagtttagaaaagatcaaacaggaccagaagttgatagaggaaaatgagaagctgaaaacagaaaaggatgccctgctagagtcatataaggcactcgaactgaaagtggagcagatagcccaggaactgcagcaggagaaggctgccgcagtcgacttgactaatcacttggagtacacattaaagacatatatcgacacacgcatgaaaaacttagcagctaagatggagatcctgaaggagatgaggcacgtggacattagtgtgagatttggcaaagacctgtcggacgccatacaagttctcgacgaggggtgtttcaccacccccgcctcactaaacggactcgagataatctgggctgagtacagccttgcccaagagaacattaagacgtgcgagtatgtgtcagaaggcaatattttaatcgcacagaggaatgagatgcagcagaaactttacatgtctgtagaggatttcattctggaggtggatgagtcatccctgaataagcggctcaagactctgcaggacttgtctgttagtctggaggctgtgtatggacaggcaaaggaaggagcaaacagtgacgaaattctcaaaaaattttatgactggaaatgcgacaagagagaggaattcacttccgtgcggtcagagacagatgccagcctccatcgacttgtagcatggtttcagcgcactcttaaagtcttcgacctatctgtggaaggctccttgatctctgaagatgctatggataacattgacgaaatcttggagaagacagagagcagtgtgtgtaaagaactggaaatcgcattggtggatcaaggagatgccgacaaggagattattagcaatacttattcgcaggtattgcagaaaatacactctgaagaaagactaattgccaccgtgcaggccaagtacaaggattctattgaattcaagaagcaactgattgagtacctgaacaagtccccgtccgtggatcacttgttgtctatcaaaaagacgctgaaaagtctgaaggcacttctccgctggaagttggtggaaaagtcgaatttagaggagagcgacgaccctgatggttcgcagatcgaaaaaatcaaggaagaaatcacacagctaaggaacaatgtcttccaggaaatatatcatgaaagggaggagtacgaaatgctaacatctttggcccagaagtggtttccagaactgccgttactccatccggaaataggcctgttgaagtatatgaactccggaggtttgctaaccatgagtctggagcgggatctcctcgatgctgagcctatgaaggaactgagcagcaaaagaccactggttaggagcgaggtgaacgggcagattattctccttaagggatactcagtagatgtggacaccgaggctaaagtgatcgagagagccgctacatatcatagagcttggcgagaagccgagggggacagcgggctcctgcccctgatattcttgtttctgtgtaagtccgacccaatggcttatctcatggtgccttactaccctagagccaatctgaacgccgttcaggctaacatgccattgaactcagaagaaaccctgaaagttatgaagggggtcgcacaaggactgcacactcttcataaagccgacattatccacggttcccttcatcaaaacaatgtgtttgcgctgaaccgtgagcaaggcatcgtgggagattttgacttcaccaagagcgtttcccagcgcgcaagtgtgaacatgatggttggcgatcttagtctgatgtcccctgagctcaaaatggggaaacctgcgagcccaggctccgatttgtacgcatatggatgcctgttgctctggctaagcgttcagaatcaggaattcgaaattaacaaagacggcatcccaaaagtggaccagtttcatctggatgataaggtgaaatctctgctctgctcgctcatttgctatcggtccagtatgactgccgagcaggtgctgaatgcagaatgcttcttaatgcccaaagaacagtctgttcctaatccagaaaaagatactgaatataccctgtacaaaaaagaggaagaaattaaaacagaaaacttggacaagtgcatggaaaagacacggaatggggaggccaatttcgattgctag

SEQ ID NO: 93602 - DNA, 2991 bp, Artificial Sequence
  derived and/or modified sequence
atggacgaggacacacactatgataaagttgaagatgttgtgggatctcatattgaggacgccgtgacgttttgggcgcagagcattaacaggaacaaggacattatgaaaattgggtgctcactgtccgaagtctgcccccaggcctccagcgtcctcggaaacttggacccgaataaaatttacggcggtcttttttccgaggatcagtgttggtatagatgcaaggttctgaaaataatctctgtcgagaaatgtttagtgcgctacattgactacgggaataccgaaatcctaaatcgcagtgacatcgtcgaaatcccccttgaactccagttctcctccgtggccaaaaaatacaaactgtgggggcttcatattcccagcgaccaggaagtcacccagtttgaccaaggcactaccttcttgggctcattaatctttgagaaggagattaaaatgaggataaaggccacgagcgaggatggcaccgttatcgcgcaagccgagtacggaagtgtggatatcggcgaagaggtccttaagaaaggcttcgcggagaagtgtaggctcgctagtaggacagacatatgtgaagagaaaaagctggatcccggacagcttgtactcaggaacttaaagtcaccaatccctctatggggtcaccgaagtaaccagtccacattcagccggcctaagggacacctctcagagaagatgactctggacctcaaggacgagaatgatgccggcaatctcatcacattcccaaaagagtctctagccgtgggggattttaaccttggcagcaatgtgtcattggagaagattaagcaagaccagaagcttattgaagagaacgaaaagctgaagacagagaaggatgccttgcttgaatcctacaaagccctggagcttaaggtggaacaaatcgcacaggagttacagcaagagaaggccgctgccgttgaccttactaaccacctagaatacacccttaagacctacattgacactagaatgaagaatttggccgccaagatggagatcctgaaagagatgaggcatgttgacatatctgttaggttcggcaaagaccttagcgatgctatacaagtgttagacgagggctgttttactacacctgcatccctcaatggacttgaaataatatgggcggagtactcactcgcgcaagagaacatcaaaacatgcgaatacgtgagtgaggggaacatccttatagcgcaaagaaatgaaatgcagcaaaaattgtacatgtccgtggaagatttcattctggaagtggatgaaagcagtctcaataagcgcctgaagactttgcaagatctgtccgtgagcctggaggctgtgtacggccaggcaaaggagggagccaatagtgatgaaatcttaaagaagttttacgactggaagtgcgataagcgcgaggaattcacctctgttaggtcggagactgacgcttccctgcataggcttgttgcttggttccagagaacgttgaaagtgttcgatctctccgttgagggaagcctgatatccgaggacgccatggataacattgacgagatcctcgaaaagacagagagctccgtctgcaaagaattggagatcgctttggtggaccagggcgacgccgacaaggagataatctccaatacctattctcaggtgttgcaaaaaatccattcggaggagcggctgatcgccactgtgcaagccaaatataaggattcgattgagttcaagaaacaacttattgagtacctgaacaagagcccgtcagtcgaccatctgttgagcataaaaaagaccctaaagtccttaaaagccttgctgagatggaagctggtggaaaaatctaatctcgaggagtccgatgatccagacgggtcgcagattgagaagatcaaagaggagatcacacagctgcgaaataacgtctttcaggagatttaccacgaaagagaggaatatgaaatgctcacgtcgctggcacagaaatggtttcctgaattacctcttttgcaccccgagataggtctgctgaaatatatgaattccggaggcctgctcaccatgtcacttgagcgggacctgctggatgctgaacccatgaaggagctgtcctctaagagacctctcgtcagatccgaggtcaatggccaaatcatcctgctgaagggctactccgttgacgtggacacagaggccaaagtgattgagagagcagcaacataccaccgcgcttggagggaagcggagggtgatagcgggttgctgcctctaatattcttatttctgtgtaagagcgacccaatggcgtacctcatggtcccttattatcccagagccaatttaaacgcagttcaggccaacatgccactgaactctgaagagaccctcaaagtaatgaagggagtcgcgcaaggcttgcacactctgcataaggcagatatcatccatgggtcattgcatcaaaataatgtgtttgcacttaatcgtgagcagggcatagttggcgattttgacttcacgaaatccgtgagccagcgcgcatctgttaatatgatggtcggcgacttatctctgatgtccccggagctgaagatgggcaagcctgcaagccccggaagcgacttgtacgcctatggttgcctccttctttggctaagcgtgcagaatcaggagttcgagataaacaaggacggtattccaaaggtagatcaatttcaccttgacgacaaagtcaaaagtcttttatgctccttgatttgctatcgatcatccatgacggctgaacaagttctgaatgctgaatgttttctgatgcctaaagagcagtcggtacccaaccccgagaaagacacggaatacacattatacaaaaaagaggaggagattaagacagagaacttggacaaatgtatggagaagacgaggaatggcgaggctaactttgactgttag

SEQ ID NO: 93603 - DNA, 2991 bp, Artificial Sequence
  derived and/or modified sequence
atggatgaggacacccactatgacaaggtggaggatgtggtgggcagccacattgaagatgctgtgaccttctgggcccagagcatcaacagaaacaaggacatcatgaagattggctgcagcctgtctgaggtgtgcccccaggccagctctgtgctgggcaacctggaccccaacaagatctacggcggcctcttcagcgaggaccagtgctggtaccgctgcaaggtgctgaagatcatctctgtggagaagtgcctggtgcgctacattgattatggcaacacagagatcctgaacagaagtgacatcgtggagatccccctggagctgcagttcagctctgtggccaagaagtacaagctgtggggcctgcacatccccagcgaccaggaggtgacccagtttgaccagggcaccaccttcctgggcagcctcatctttgagaaggagatcaagatgaggatcaaggccaccagtgaagatggcaccgtcatcgcccaggccgagtatggctctgtggacatcggggaggaggtgctgaagaagggctttgctgagaagtgccgcctggccagcaggacagacatctgtgaggagaagaagctggaccccggccagctggtgctgaggaacctgaagagccccatccccctgtggggccacaggagcaaccagagcaccttcagccggcccaagggccacctgtctgagaagatgaccctggacctgaaggatgaaaatgatgctggcaacctgatcaccttccccaaggagagcctggccgtgggggacttcaacctgggcagcaatgtgtccctggagaagatcaagcaggaccagaagctgattgaggagaatgagaagctgaagacagagaaggatgccctgctggagagctacaaggccctggagctgaaggtggagcagatcgcccaggagctgcagcaggagaaggctgctgctgtggacctgaccaaccacctggagtacaccctgaagacctacatcgacaccaggatgaagaacctggccgccaagatggagatcctgaaggagatgagacatgtggacatctctgtgcgctttgggaaggacctgagtgatgccatccaggtgctggatgagggctgcttcaccaccccagccagcctgaatggcctggagatcatctgggccgagtacagcctggcccaggagaacatcaagacctgtgaatatgtgtctgagggcaacatcctgattgcccagagaaatgagatgcagcagaagctgtacatgtctgtggaggacttcatcctggaggtggatgagagcagcctgaacaagaggctgaagaccctgcaggacctgtctgtgtccctggaggccgtgtatggccaggccaaggagggcgccaacagtgatgagatcctgaagaagttctatgactggaagtgtgacaagcgggaggagttcacctctgtgcgctcagaaacagatgccagcctgcaccggctggtggcctggttccagaggaccctgaaggtgtttgacctgtctgtggagggcagcctcatcagtgaagatgccatggacaacattgatgagatcctggagaagacagagagctctgtgtgcaaggagctggagatcgccctggtggaccagggagatgctgacaaggagatcatcagcaacacctacagccaggtgctgcagaagatccacagcgaggagcggctcatcgccaccgtgcaggccaagtacaaggacagcattgagttcaagaagcagctgattgagtacctgaacaagagccccagcgtggaccacctgctgagcatcaagaagaccctgaagagcctgaaggccctgctgcgctggaagctggtggagaagagcaacctggaggagagtgatgatcctgatggcagccagatcgagaagatcaaggaggagatcacccagctgaggaacaacgtgttccaggagatctaccacgagcgggaggagtatgagatgctgaccagcctggcccagaagtggttccctgagctgcccctgctgcaccctgagatcggcctgctgaagtacatgaacagcggcggcctgctgaccatgagcctggagcgggacctgctggatgctgagcccatgaaggagctgagcagcaagaggcccctggtgcgctctgaggtgaatggccagatcatcctgctgaagggctacagcgtggatgtggacacagaggccaaggtgattgaaagagctgccacctaccaccgggcctggagggaggccgagggggacagcggcctgctgcccctcatcttcctgttcctgtgcaagagtgaccccatggcctacctgatggtgccctactacccccgggccaacctgaatgctgtgcaggccaacatgcccctgaacagcgaggagaccctgaaggtgatgaagggcgtggcccagggcctgcacaccctgcacaaggctgacatcatccacggcagcctgcaccagaacaacgtgtttgccctgaaccgggagcagggcatcgtgggggactttgacttcaccaagtctgtgtcccagagggcctctgtgaacatgatggtgggggacctgagcctgatgagccctgagctgaagatgggcaagccagccagccctggcagtgacctgtatgcctacggctgcctgctgctgtggctgtctgtgcagaaccaggagtttgagatcaacaaggatggcatccccaaggtggaccagttccacctggatgacaaggtgaagagcctgctgtgcagcctcatctgctaccgcagctccatgacagctgagcaggtgctgaatgctgagtgcttcctgatgcccaaggagcagagcgtgcccaaccctgagaaggacacagagtacaccctgtacaagaaggaggaggagatcaagacagagaacctggacaagtgcatggagaagaccagaaatggagaggccaactttgactgctag

SEQ ID NO: 93604 - DNA, 2991 bp, Artificial Sequence
  derived and/or modified sequence
atggacgaggacacccactacgacaaggtggaggacgtggtgggcagtcacatcgaagacgccgtaaccttttgggcccaatctatcaatagaaacaaagacatcatgaagatcggatgtagcttgtctgaagtctgtccacaggcatctagtgttttgggaaacttggatcccaacaaaatttatggggggctgttttctgaggatcagtgttggtaccgttgtaaggtgctgaagatcatctcagtggaaaagtgcctggtgagatatatagactatggcaacaccgaaatattgaatcgttcagatattgtagagattccgctggagcttcagttttcttccgtcgccaaaaagtacaagctgtggggattacacataccctcagaccaggaggtgacccagttcgatcaaggaaccacattcctcggcagcctcatcttcgaaaaggagattaaaatgcggataaaggccactagcgaggacggcacagtcatcgctcaggccgaatatgggagcgtggacatcggagaggaggtgctcaaaaagggattcgctgaaaaatgtcggctggcttcaaggactgatatctgtgaagaaaagaaactggaccctggccaactagtgctccggaacctgaagtctcccatccctttgtggggccatcgcagcaaccaatctaccttcagccgtccaaagggccacctctccgaaaagatgactctggatctaaaagatgagaatgacgctggtaacctgatcacatttcctaaggagtcacttgccgttggagattttaacctgggcagcaatgtgagtctggagaagatcaaacaggatcagaaacttatcgaagaaaacgaaaaactaaagacagagaaggatgctttgctcgagagctataaagcacttgagctaaaggttgagcagatcgctcaggaactccagcaggagaaggctgcagctgtggacctaactaaccacctggagtacacactgaagacttacatcgacacacgtatgaagaacttggccgccaagatggaaatcctgaaagaaatgcggcatgtcgacatatccgtacgcttcgggaaggacctgtccgacgcaatccaagtgcttgacgagggatgctttaccacccccgccagtttgaatggccttgaaatcatctgggctgagtacagcctcgcacaggaaaatatcaaaacctgcgagtatgtgagcgaagggaatatcttgatagcgcagcgcaacgaaatgcagcaaaaattgtatatgagcgtagaagacttcatcctagaggtcgatgagtcatctctaaataagcggctcaaaaccctgcaggacctgtccgtgtctctggaagccgtgtacggccaggctaaggagggcgccaattcggatgaaattctgaagaaattttatgactggaagtgcgataagcgtgaagaatttacctctgtgcgtagcgaaacagacgcgtctttgcacaggctggtcgcctggttccagcgcaccctaaaagtgtttgatctgtctgttgagggcagtttgatctcggaagacgccatggacaacattgacgagattctggaaaaaaccgaatcttcagtgtgcaaggagctagaaatcgcactcgtggatcagggcgacgccgacaaggagatcatctcaaatacttactctcaggtgcttcagaagattcactccgaagagcggctgatcgcaacggtgcaggcgaagtataaggactccatcgagttcaagaagcagctgatcgagtacctgaacaagtcaccatccgttgaccaccttctgtcaatcaagaagacattgaaatccctgaaagcgcttttgcggtggaaattggtggagaagtcaaacctggaggagtctgatgatcctgacggttctcagatagagaagattaaggaggagatcactcaactgcggaacaacgtgttccaggaaatttatcatgagcgcgaggagtacgaaatgctcactagcttggcccagaaatggtttcccgaacttccactcctgcacccagagatcggactcctcaagtatatgaacagcggtggccttttaactatgtcactcgagcgggatcttctcgacgccgagccaatgaaagagctttcctccaaacggcctctcgtgcgcagtgaggtgaacggacaaataatcctgttaaagggttactcggtggatgtcgacacagaggcaaaagtgattgagcgagctgcaacctaccaccgcgcttggagagaggctgagggcgattctggcctgttacctctgatattcctctttctttgcaaaagcgatcctatggcgtatttgatggtgccgtattacccacgcgctaacttgaatgctgtgcaagccaacatgcctctcaacagtgaggagacgctgaaggtgatgaagggcgtggctcaaggcttacacaccctccacaaagctgatattattcatgggagcctgcatcaaaacaatgtattcgcgctcaacagggagcagggcatcgttggagatttcgacttcacaaagagtgtttcccaaagggcctccgtcaacatgatggtaggggacttgagcctgatgagcccagaactgaaaatgggcaaaccagcttcaccaggtagtgacctctatgcttatggttgcctgctcctatggctctctgtccagaaccaagagtttgagatcaataaggacggcatccctaaagtggaccagttccacctcgacgataaagttaaaagcctgctgtgttccctgatctgttacaggagctccatgaccgcagagcaggtcttaaatgctgagtgctttttgatgccaaaagaacagtcagtccccaaccctgagaaagataccgagtatactctctacaaaaaggaggaggaaattaaaacagagaatctggacaagtgcatggagaagactcgcaatggcgaggctaactttgactgttag

SEQ ID NO: 93605 - DNA, 2991 bp, Artificial Sequence
  derived and/or modified sequence
atggacgaggacacccactacgacaaggtggaggacgtggtgggctcccatatagaagacgccgttacgttctgggcccagtccatcaaccgcaacaaagacatcatgaaaatcggctgcagcctttccgaagtctgtccccaggctagctccgtcctgggaaatctggaccctaacaagatctacggtggacttttttctgaagatcagtgctggtaccgatgtaaggtccttaagatcatatctgtcgaaaaatgcctagtccgctacatcgattatgggaatacggagattcttaacaggagtgacattgtggagattccactagagctgcagttcagctcagtggccaagaaatataaactatggggcctgcatattccttctgatcaggaagtgactcagttcgaccaggggacgacctttctcggaagccttatattcgagaaagagattaagatgaggatcaaggctacttctgaggatgggacagtaatcgcccaggctgaatatggcagtgtagacatcggggaggaagtcctaaagaaagggtttgccgaaaagtgcagactggcaagccgaaccgacatctgcgaggaaaagaaattggacccaggccagttggtgctacgcaatctgaagagtccgatacccctgtggggccatcgatctaaccagagcacgtttagtcgacctaaaggacaccttagtgaaaagatgacattggacctgaaagatgagaacgacgccggcaatctgatcaccttccccaaagagagtttagcggtgggagatttcaatctaggctccaacgtttccttggaaaagataaaacaagatcagaagctaattgaagagaatgagaaacttaagacggagaaggatgcgctcttagagtcatacaaggccctcgagctgaaagtcgagcagattgctcaggagttgcagcaggagaaggccgccgctgtcgacctcactaatcaccttgaatatacattgaaaacctacatagacactagaatgaaaaatctggccgctaaaatggaaatcttaaaggagatgagacatgtggatatttccgtccgctttggcaaggatctgagcgatgcgatccaagtgctggacgaaggatgttttacaactccagccagtctcaacgggctggagatcatttgggccgagtactccttggcacaggagaatatcaaaacttgtgagtatgtctcagagggaaacatcctgatcgcccagcgcaacgaaatgcagcaaaaactgtacatgtccgtggaagatttcatcctggaggtggacgaatcttcactgaataagcggctcaagacattgcaggatttgtccgtgtcattggaggccgtttatgggcaggcaaaagagggcgccaatagcgacgagatattaaagaagttttacgattggaaatgcgataaacgggaggagtttacgtctgtccgctcagagaccgatgcatcgttgcatagactggttgcgtggtttcagcggaccctgaaagttttcgacttgtcggtggaggggagcctgatatccgaggatgctatggacaacattgacgaaattctggaaaaaacggaatccagtgtctgtaaagaacttgaaatcgccctggtggatcaaggtgatgcagacaaagaaatcatttccaatacttattctcaagtgctccagaagattcacagcgaggaaagattgattgcaaccgtgcaggcaaaatacaaggactcaattgagttcaaaaagcaacttatcgaatacttgaacaagagcccgagtgtcgatcacctgttatccatcaaaaagaccttgaagtcactgaaagctctattgcggtggaaactggtagaaaaatccaatctggaggagtcggatgacccggatggaagtcagatcgaaaagatcaaggaagaaattacacagctccgaaacaacgtgtttcaagagatttaccacgaacgggaagaatacgagatgcttaccagcttggcacaaaagtggttcccagagttgcccctactgcacccagaaatcggcctgttgaagtatatgaactcaggtgggttgctcacgatgtccctggaaagagatttattagatgccgagcctatgaaagagctgtcttcaaaaagacctctggtgaggtccgaggttaacggtcagatcatcctactgaaggggtattcggtggatgttgacaccgaagctaaggtcatagaacgggcggctacatatcacagggcttggcgggaggcagagggagactcagggctgctcccactcatctttctcttcctctgtaagtccgatcctatggcgtacttgatggtcccttactacccaagagcaaaccttaatgcagtacaggcaaatatgccgttgaattctgaagaaaccctcaaggtgatgaaaggagtggcacagggactccacactttacacaaggctgacataatccacgggagtcttcaccaaaacaacgtgttcgcactcaaccgggagcagggaatcgttggcgactttgattttaccaagtctgtttcccaacgagcttccgtgaatatgatggtgggtgatctgagtctgatgtctcctgaactgaagatgggtaagcctgccagccccgggagtgacctgtacgcctatggctgcctcttgttatggctcagtgtccagaaccaggaatttgagataaataaagacggcattccaaaagtcgatcaattccatcttgatgataaagtcaaatccttattatgtagcttgatttgctataggtctagtatgactgccgaacaggtgctgaatgcggaatgctttctgatgcccaaagagcagagcgtgcccaatcctgaaaaggacactgagtatactctgtacaagaaggaggaagagatcaaaactgagaacctggataagtgcatggagaagactcgcaatggcgaagcaaattttgattgctag

SEQ ID NO: 93606 - DNA, 2991 bp, Artificial Sequence
  derived and/or modified sequence
atggacgaggacactcactatgacaaggtggaagatgtcgtggggtctcacattgaagatgctgttaccttctgggcccagagtattaacaggaataaggatatcatgaagattgggtgctcactctctgaggtgtgcccccaagccagttccgtcctcggaaatctagacccaaacaagatctatggtggcttgttctccgaggaccagtgttggtaccgctgtaaagtcctgaagattatttctgtggaaaagtgtttagtcagatacatcgattacggaaatactgagatacttaaccgcagtgacattgtggaaattccactagagctgcagttttcttccgtcgctaaaaaatacaaactctggggcctccacattccatctgatcaagaggtgacgcagttcgaccagggcacaactttcctgggcagtctgatattcgagaaagaaatcaaaatgcgcattaaggcaacatctgaagacggcacagtgatagctcaggctgagtacgggagtgtggacatcggtgaggaggtacttaaaaaggggttcgcagagaaatgccgtctggcatctcgaacagatatctgcgaggaaaagaagttggatccaggccaacttgtccttcgaaacctgaaatctcccatccctctttggggacatcgatctaaccagtcaactttcagccggccaaagggacacctgtctgaaaagatgaccctcgatctcaaagatgagaatgacgctggaaacctcattacatttcctaaggagtccctcgccgtaggcgactttaatctgggtagcaacgttagcctggaaaagatcaaacaggatcagaaactgattgaggagaacgaaaaacttaaaacggaaaaggatgcacttctagaaagttacaaggccctggagctgaaggtggagcagatcgcccaagagctgcagcaggagaaggcggcagccgttgacctaaccaaccacttggaatacactctaaaaacttacatcgacacccggatgaagaaccttgccgcaaaaatggagatacttaaggagatgaggcatgttgatataagcgtcaggttcggcaaggacctttcggacgctattcaggttctggacgaaggatgctttacaacacctgcctcgcttaatggccttgagatcatttgggcggagtactctctcgcacaagaaaacattaagacctgcgagtacgtatccgagggcaacattctgattgctcaacggaatgaaatgcaacagaagctgtatatgagtgtggaggacttcatcttagaagtcgacgaatctagtctgaataaacgtctaaaaacactgcaagacttgagcgtctctcttgaagctgtgtacggccaggcaaaagagggtgccaactcagatgaaatcctaaagaagttttacgattggaagtgcgacaagagggaagaatttacgtctgtccgctcagaaactgatgcaagtttgcaccggcttgtcgcatggttccagagaaccctgaaggttttcgatttgtccgtggaaggatccctgatctctgaagacgcgatggataacatcgacgaaatcctggagaagacagaatctagtgtttgcaaggaattagaaattgccctcgttgatcagggggacgctgacaaagagatcatttcaaacacttactctcaagttctgcagaagatacacagcgaggagcgtctcatcgcaactgtgcaggcgaaatataaggattccatcgaatttaagaagcagcttattgaatatttgaataagagcccttcagttgaccaccttctctccattaaaaagactctcaagagtcttaaggctctgttacggtggaagctggttgaaaagagtaacctcgaggagtctgacgaccctgacggatcccagatcgaaaagattaaggaggaaattacacagctgaggaataacgtgttccaggagatttaccatgagcgcgaggaatacgaaatgctgacctcactggcacagaagtggttccctgagctccctcttctgcatcccgagatcggactactcaagtacatgaactcagggggattgcttaccatgtctctggaacgcgacctgctcgacgctgagccaatgaaggagctgtcatcgaagcgacccctggtgaggtcggaagtaaatgggcagatcattctgctgaaggggtacagcgtcgacgttgataccgaagcaaaggttatagagagagctgccacttatcatagggcctggcgtgaggcagaaggtgactccggactcctccctctcattttcctgttcctttgcaaatcagatcctatggcctacctgatggtgccctattacccccgtgcaaatctgaacgccgtacaggcgaacatgccactgaattctgaggaaacgctgaaggtgatgaaaggagtggcgcaaggcctccacaccctacataaagcagatattatccatggttctctgcaccagaataatgtgtttgcgctgaaccgtgagcagggcatcgtgggcgattttgatttcaccaagtccgtgagccaaagagccagcgtgaatatgatggttggcgatttaagtctgatgagtccggaactgaagatgggcaaacctgcatcacctggttctgatctgtatgcttacggatgtttgctgctgtggcttagcgtacaaaaccaagaatttgagatcaacaaggacggtattccaaaagtggatcagttccacctggacgataaggttaagagcctattgtgctcccttatctgttaccgctcctcaatgacagccgagcaagttctgaatgcagaatgctttctgatgccaaaggagcaaagcgttcccaatccagagaaggatacggagtacaccctttataaaaaggaagaagagataaagaccgaaaacctagacaaatgcatggagaaaacaagaaatggtgaggccaatttcgactgctag

SEQ ID NO: 93607 - DNA, 2991 bp, Artificial Sequence
  derived and/or modified sequence
atggacgaagacacccattacgacaaagtggaagatgtcgtgggcagccatatagaagacgcagtgaccttttgggctcagtccataaacagaaacaaagacatcatgaaaataggatgcagcctgagcgaagtctgcccacaggcttcgtctgtgctcggcaatttggatccaaacaagatctatgggggtctcttttctgaagatcagtgttggtaccgctgtaaggttttgaagatcatatccgtggaaaaatgtctcgtgcggtacatcgactacgggaacaccgaaatcctgaaccggtcagatatcgtggagattcccttggagctgcagttcagctctgtggctaaaaagtacaagctctggggactccatattccttccgatcaagaagttacacagttcgaccagggaactaccttccttggctctctcatattcgaaaaggagatcaagatgaggataaaagcgactagcgaagacggaactgttattgctcaggccgagtatgggagtgtcgacataggcgaggaggtgctgaagaaggggtttgccgaaaagtgtcgcttggcatctcggacagatatctgcgaggagaagaagctggatcccggacagctggtgctgaggaatctcaaatctccaatccccctgtgggggcatagatcaaatcagtctaccttttccaggcctaaaggtcacttgtcagagaagatgaccttggacctaaaggatgagaatgacgcgggaaatctgattacgtttccaaaggaaagtctggcggtaggggattttaacctggggtccaacgtgagcctcgaaaagattaagcaggatcagaaactcattgaagagaatgagaagctcaagacagaaaaggacgcgctgctcgaatcctataaggcactcgaactgaaggtggagcagatcgcccaggaactccagcaagagaaggccgctgctgtcgaccttacaaaccacctggaatacacactgaaaacctatatcgatacaaggatgaagaatttagctgcaaaaatggaaatcttgaaagagatgaggcacgtggacattagtgtccgctttggaaaggatctctccgacgccattcaggtgctggacgaggggtgctttaccacacccgcatcactgaacggactggagattatttgggccgaatactccctggcgcaggagaacattaaaacttgtgagtatgtgtctgagggcaacattttgatagcccagcggaacgagatgcaacaaaagttgtatatgtctgtggaagattttattctggaggtggacgaaagtagtctgaacaagagactgaaaaccctgcaggatctctctgtaagtctggaggccgtgtacgggcaagcaaaagagggggcaaattccgacgagatcctgaagaaattctacgattggaaatgtgataaaagagaggagttcacatcagttaggagcgagacagatgcgtctctgcatagactggtcgcttggtttcagcgcaccctcaaggtcttcgacctgagcgtagagggctcgctgatttctgaggatgctatggacaatatagatgaaatactagagaagacggagtcctctgtgtgcaaggagttggagattgccctcgtcgatcaaggggacgccgataaggaaataatatcaaacacttacagccaggtgctgcagaaaatccactccgaggaacgacttatcgctaccgtccaggcaaaatacaaggattccatcgagttcaagaagcaactcattgagtatctgaacaagtccccatcagtcgaccatctgctgtctattaagaagaccctgaaatccctgaaggccctgctgcgctggaagctggtggagaaatccaacctggaggaatcagatgatcccgacggctctcagatcgagaagattaaggaggaaatcactcagctgaggaacaacgtgttccaggagatttaccatgaaagggaggagtatgagatgctcacgtctctggcccagaagtggtttcctgagctacctttattgcaccctgagatcggcctgctgaagtacatgaatagcgggggtcttctgacaatgtcactggaacgagatctactggacgccgagcccatgaaggagctctcctccaagcggcctctggtccggtctgaggtcaacggacaaatcatccttctcaagggatatagcgtggacgtcgatactgaggctaaagtcatcgaacgagctgccacttaccaccgagcttggcgcgaagcagaaggggacagcggcctgttgcccttgatcttcctctttctgtgcaaatccgacccaatggcataccttatggtcccttattaccctcgagcaaacctgaatgcagtgcaagccaacatgccactaaattcggaagagacactcaaagtcatgaaaggagtggcacaagggctacacactctgcacaaagcagatatcatacatggttccctgcaccagaacaatgtgtttgcactcaatcgcgagcagggaattgtcggcgacttcgacttcactaaaagcgtcagtcagcgggcatctgtcaacatgatggttggagatctgagcctgatgagcccagagcttaagatgggaaaacctgcttctcccggttccgacctctatgcctacggttgcctccttctgtggctgtctgtacagaatcaagaattcgaaatcaacaaggacggaatacctaaagtcgaccagtttcatttggatgacaaagtgaaatctcttctgtgttcattaatctgttatcgatcttcaatgacagcagagcaggtgctgaatgccgagtgctttttgatgcccaaagagcagagtgtccccaatccggaaaaggacaccgagtatacactgtataagaaggaagaggagatcaaaaccgagaatctcgataagtgcatggaaaaaactagaaacggagaggccaacttcgactgttag

SEQ ID NO: 93608 - DNA, 2991 bp, Artificial Sequence
  derived and/or modified sequence
atggacgaggacacccactacgacaaggtggaggacgtggtgggcagccacatcgaggacgccgtgaccttctgggcccagagcatcaacagaaacaaggacatcatgaagatcggctgcagcctgagcgaggtgtgcccccaggccagcagcgtgctgggcaacctggaccccaacaagatctacggcggcctgttcagcgaggaccagtgctggtacagatgcaaggtgctgaagatcatcagcgtggagaagtgcctggtgagatacatcgactacggcaacaccgagatcctgaacagaagcgacatcgtggagatccccctggagctgcagttcagcagcgtggccaagaagtacaagctgtggggcctgcacatccccagcgaccaggaggtgacccagttcgaccagggcaccaccttcctgggcagcctgatcttcgagaaggagatcaagatgagaatcaaggccaccagcgaggacggcaccgtgatcgcccaggccgagtacggcagcgtggacatcggcgaggaggtgctgaagaagggcttcgccgagaagtgcagactggccagcagaaccgacatctgcgaggagaagaagctggaccccggccagctggtgctgagaaacctgaagagccccatccccctgtggggccacagaagcaaccagagcaccttcagcagacccaagggccacctgagcgagaagatgaccctggacctgaaggacgagaacgacgccggcaacctgatcaccttccccaaggagagcctggccgtgggcgacttcaacctgggcagcaacgtgagcctggagaagatcaagcaggaccagaagctgatcgaggagaacgagaagctgaagaccgagaaggacgccctgctggagagctacaaggccctggagctgaaggtggagcagatcgcccaggagctgcagcaggagaaggccgccgccgtggacctgaccaaccacctggagtacaccctgaagacctacatcgacaccagaatgaagaacctggccgccaagatggagatcctgaaggagatgagacacgtggacatcagcgtgagattcggcaaggacctgagcgacgccatccaggtgctggacgagggctgcttcaccacccccgccagcctgaacggcctggagatcatctgggccgagtacagcctggcccaggagaacatcaagacctgcgagtacgtgagcgagggcaacatcctgatcgcccagagaaacgagatgcagcagaagctgtacatgagcgtggaggacttcatcctggaggtggacgagagcagcctgaacaagagactgaagaccctgcaggacctgagcgtgagcctggaggccgtgtacggccaggccaaggagggcgccaacagcgacgagatcctgaagaagttctacgactggaagtgcgacaagagagaggagttcaccagcgtgagaagcgagaccgacgccagcctgcacagactggtggcctggttccagagaaccctgaaggtgttcgacctgagcgtggagggcagcctgatcagcgaggacgccatggacaacatcgacgagatcctggagaagaccgagagcagcgtgtgcaaggagctggagatcgccctggtggaccagggcgacgccgacaaggagatcatcagcaacacctacagccaggtgctgcagaagatccacagcgaggagagactgatcgccaccgtgcaggccaagtacaaggacagcatcgagttcaagaagcagctgatcgagtacctgaacaagagccccagcgtggaccacctgctgagcatcaagaagaccctgaagagcctgaaggccctgctgagatggaagctggtggagaagagcaacctggaggagagcgacgaccccgacggcagccagatcgagaagatcaaggaggagatcacccagctgagaaacaacgtgttccaggagatctaccacgagagagaggagtacgagatgctgaccagcctggcccagaagtggttccccgagctgcccctgctgcaccccgagatcggcctgctgaagtacatgaacagcggcggcctgctgaccatgagcctggagagagacctgctggacgccgagcccatgaaggagctgagcagcaagagacccctggtgagaagcgaggtgaacggccagatcatcctgctgaagggctacagcgtggacgtggacaccgaggccaaggtgatcgagagagccgccacctaccacagagcctggagagaggccgagggcgacagcggcctgctgcccctgatcttcctgttcctgtgcaagagcgaccccatggcctacctgatggtgccctactaccccagagccaacctgaacgccgtgcaggccaacatgcccctgaacagcgaggagaccctgaaggtgatgaagggcgtggcccagggcctgcacaccctgcacaaggccgacatcatccacggcagcctgcaccagaacaacgtgttcgccctgaacagagagcagggcatcgtgggcgacttcgacttcaccaagagcgtgagccagagagccagcgtgaacatgatggtgggcgacctgagcctgatgagccccgagctgaagatgggcaagcccgccagccccggcagcgacctgtacgcctacggctgcctgctgctgtggctgagcgtgcagaaccaggagttcgagatcaacaaggacggcatccccaaggtggaccagttccacctggacgacaaggtgaagagcctgctgtgcagcctgatctgctacagaagcagcatgaccgccgagcaggtgctgaacgccgagtgcttcctgatgcccaaggagcagagcgtgcccaaccccgagaaggacaccgagtacaccctgtacaagaaggaggaggagatcaagaccgagaacctggacaagtgcatggagaagaccagaaacggcgaggccaacttcgactgctag

SEQ ID NO: 93609 - protein, 996 aa, Artificial Sequence
  derived and/or modified sequence
MWVQGHSSRASATESVSFSGIVQMDEDTHYDKVEDVVGSHIEDAVTFWAQSINRNKDIMKIGCSLSEVCPQASSVLGNLDPNKIYGGLFSEDQCWYRCKVLKIISVEKCLVRYIDYGNTEILNRSDIVEIPLELQFSSVAKKYKLWGLHIPSDQEVTQFDQGTTFLGSLIFEKEIKMRIKATSEDGTVIAQAEYGSVDIGEEVLKKGFAEKCRLASRTDICEEKKLDPGQLVLRNLKSPIPLWGHRSNQSTFSRPKGHLSEKMTLDLKDENDAGNLITFPKESLAVGDFNLGSNVSLEKIKQDQKLIEENEKLKTEKDALLESYKALELKVEQIAQELQQEKAAAVDLTNHLEYTLKTYIDTRMKNLAAKMEILKEMRHVDISVRFGKDLSDAIQVLDEGCFTTPASLNGLEIIWAEYSLAQENIKTCEYVSEGNILIAQRNEMQQKLYMSVEDFILEVDESSLNKRLKTLQDLSVSLEAVYGQAKEGANSDEILKKFYDWKCDKREEFTSVRSETDASLHRLVAWFQRTLKVFDLSVEGSLISEDAMDNIDEILEKTESSVCKELEIALVDQGDADKEIISNTYSQVLQKIHSEERLIATVQAKYKDSIEFKKQLIEYLNKSPSVDHLLSIKKTLKSLKALLRWKLVEKSNLEESDDPDGSQIEKIKEEITQLRNNVFQEIYHEREEYEMLTSLAQKWFPELPLLHPEIGLLKYMNSGGLLTMSLERDLLDAEPMKELSSKRPLVRSEVNGQIILLKGYSVDVDTEAKVIERAATYHRAWREAEGDSGLLPLIFLFLCKSDPMAYLMVPYYPRANLNAVQANMPLNSEETLKVMKGVAQGLHTLHKADIIHGSLHQNNVFALNREQGIVGDFDFTKSVSQRASVNMMVGDLSLMSPELKMGKPASPGSDLYAYGCLLLWDDKVKSLLCSLICYRSSMTAEQVLNAECFLMPKEQSVPNPEKDTEYTLYKKEEEIKTENLDKCMEKTRNGEANFDC

SEQ ID NO: 93610 - DNA, 2991 bp, Artificial Sequence
  derived and/or modified sequence
atgtgggtacaagggcattcttcaagggcttcggccaccgagtccgtctccttctcaggtatcgtacaaatggatgaagatacacattatgacaaggttgaggatgtggtgggctcacatattgaggacgctgtgacattttgggcacagtctattaaccgaaataaggatatcatgaagataggttgctccctttccgaggtctgtccacaggcaagttctgttttgggaaacctcgaccctaataagatctacggcggcctgttttctgaggaccaatgctggtatcgttgcaaggtgcttaagatcattagcgtggagaaatgcttggttcgatatatagattacggcaacactgagattttgaatcgctctgatatagtcgagattccgcttgagctgcaattctcatctgtcgccaagaagtataaactgtggggtcttcatatacccagtgatcaagaggtcacacaatttgatcagggaaccacctttcttggctcactcatttttgagaaggagattaaaatgcgcattaaagcaacctccgaggatggaacagtgatcgcgcaagccgaatatggtagtgttgatatcggagaagaagttctgaaaaagggcttcgctgagaaatgccgactggcttcaagaacagatatctgcgaagaaaaaaaactcgatcctggccagctggtgctccgtaacctaaaatccccaatacctctttggggccaccggtcgaaccaaagtacattctcgcggccaaaaggccacctctcagagaagatgactctagatctgaaagacgaaaatgatgccgggaatctgatcacattccctaaagaatcactcgccgtgggagatttcaatttaggttcaaacgtcagccttgaaaaaataaaacaagaccagaagctcattgaagagaacgagaagcttaagaccgagaaggatgcactcctggaaagttacaaagctctggagctgaaggtggagcagatcgcacaggagctgcaacaggaaaaagcagcggcagtcgatttaactaaccacctggaatatactttgaagacctatattgacactcgtatgaagaacttagccgcaaaaatggagatcctgaaggagatgcgccacgttgatatctcagtccggtttgggaaggacctttctgatgccattcaggtgctggacgagggctgcttcaccacacctgccagtttgaatggtctggaaatcatctgggccgagtatagcctagcccaggaaaatattaaaacatgcgagtacgtcagtgagggtaacatactgatcgcccaacggaacgaaatgcaacagaaattatacatgagcgtggaagattttatccttgaggtggatgagagctcccttaacaagaggctgaaaactctgcaggacctgtccgtgagtttggaagccgtgtatggccaggccaaggagggagctaacagcgacgaaatcctgaaaaagttctatgattggaagtgcgacaagagagaggagttcacttccgtacgctcagagactgacgccagtttgcatagactggtggcttggttccagaggactctgaaggttttcgatttgtccgtggaaggctctctcatctccgaagacgctatggataatattgatgagattctcgaaaaaaccgagagtagtgtctgtaaagagctggaaatagcactggtcgaccagggagacgccgacaaggaaattatctccaatacctactcacaggtgttacagaagattcactcggaggagcggctaatcgctactgtacaagcaaagtacaaagacagcattgagtttaagaagcaactgatcgagtatctgaataaaagcccaagcgtggaccatttgttgagcattaaaaagacacttaagagtctgaaggctctgctgcggtggaaattggttgaaaagtccaatctcgaagaaagcgatgatcctgacggcagtcaaatagagaaaatcaaagaggaaatcacacaactgaggaataacgtttttcaagaaatttatcacgagcgcgaggaatatgaaatgctgaccagcctcgcacagaagtggtttcctgagctgcccctcctgcaccctgaaatcggcctgcttaaatacatgaattctggggggctcctcactatgagcttagaacgcgatttgctagacgcggaaccaatgaaggagctcagcagcaaacggccgctggtccgatccgaggtgaatggacaaatcattctgttaaaaggctattcagtggacgtcgataccgaagccaaggtaattgaaagggcggcaacctaccacagggcttggcgggaagcagaaggggatagcggtcttctgcctctcatcttcctcttcctgtgcaaaagcgatccgatggcatatttgatggtaccatactaccctagagcgaatctgaacgctgtgcaagccaacatgcctttgaattccgaggagacactgaaagtcatgaagggggtggcccaaggtctgcatacgttacataaggctgatataattcacggctctctacaccagaacaatgtttttgccctgaaccgcgaacagggcattgtgggcgatttcgacttcacaaaatcagtgagccagagggccagcgtgaatatgatggtgggcgacctaagtctgatgagccctgagctcaaaatgggaaaacctgcgtctcctggatctgatctgtacgcctacggatgtctcctcctttgggacgacaaggtaaaaagtctcctttgctcactcatctgttacagatcctctatgaccgcagaacaggtgttaaacgctgaatgcttcctaatgcctaaggagcagagcgtcccaaatccggaaaaagataccgagtacactttgtataagaaagaggaagagattaagacggagaatttagacaagtgtatggaaaaaaccaggaacggggaggcaaatttcgattgctag

SEQ ID NO: 93611 - DNA, 2991 bp, Artificial Sequence
  derived and/or modified sequence
atgtgggtgcagggccacagcagccgggccagcgccacagaatctgtgtccttctctggaattgtgcagatggatgaggacacccactatgacaaggtggaggatgtggtgggcagccacattgaagatgctgtgaccttctgggcccagagcatcaacagaaacaaggacatcatgaagattggctgcagcctgtctgaggtgtgcccccaggccagctctgtgctgggcaacctggaccccaacaagatctatggaggcctcttcagcgaggaccagtgctggtaccgctgcaaggtgctgaagatcatctctgtggagaagtgcctggtgcgctacatcgactatggcaacacagagatcctgaacagaagtgacatcgtggagatccccctggagctgcagttcagctctgtggccaagaagtacaagctgtggggcctgcacatccccagcgaccaggaggtgacccagtttgaccagggcaccaccttcctgggcagcctcatctttgagaaggagatcaagatgaggatcaaggccaccagtgaagatggcaccgtgattgcccaggccgagtatggctctgtggacattggagaggaggtgctgaagaagggctttgctgagaagtgccgcctggccagcaggacagacatctgtgaggagaagaagctggaccccggccagctggtgctgaggaacctgaagagccccatccccctgtggggccacaggagcaaccagagcaccttcagccggcccaagggccacctgtctgagaagatgaccctggacctgaaggatgaaaatgatgctggcaacctgatcaccttccccaaggagagcctggccgtgggggacttcaacctgggcagcaatgtgtccctggagaagatcaagcaggaccagaagctgattgaagaaaatgagaagctgaagacagagaaggatgccctgctggagagctacaaggccctggagctgaaggtggagcagatcgcccaggagctgcagcaggagaaggctgctgctgtggacctgaccaaccacctggagtacaccctgaagacctacatcgacaccaggatgaagaacctggccgccaagatggagatcctgaaggagatgagacatgtggacatctctgtgcgctttgggaaggacctgagtgatgccatccaggtgctggatgagggctgcttcaccaccccagccagcctgaatggcctggagatcatctgggccgagtacagcctggcccaggagaacatcaagacctgtgaatatgtgtctgagggcaacatcctgattgcccagagaaatgagatgcagcagaagctgtacatgtctgtggaggacttcatcctggaggtggatgagagcagcctgaacaagaggctgaagaccctgcaggacctgtctgtgtccctggaggccgtgtatggccaggccaaggagggcgccaacagtgatgagatcctgaagaagttctatgactggaagtgtgacaagcgggaggagttcacctctgtgcgctcagaaacagatgccagcctgcaccggctggtggcctggttccagaggaccctgaaggtgtttgacctgtctgtggagggcagcctcatcagtgaagatgccatggacaacattgatgagatcctggagaagacagagagctctgtgtgcaaggagctggagatcgccctggtggaccagggagatgctgacaaggagatcatcagcaacacctacagccaggtgctgcagaagatccacagcgaggagcggctgattgccaccgtgcaggccaagtacaaggacagcattgagttcaagaagcagctgattgagtacctgaacaagagccccagcgtggaccacctgctgagcatcaagaagaccctgaagagcctgaaggccctgctgcgctggaagctggtggagaagagcaacctggaggagagtgatgatcctgatggcagccagatcgagaagatcaaggaggagatcacccagctgagaaataatgtgttccaggagatctaccacgagcgggaggagtatgagatgctgaccagcctggcccagaagtggttccctgagctgcccctgctgcaccctgagatcggcctgctgaagtacatgaacagcggcggcctgctgaccatgagcctggagcgggacctgctggatgctgagcccatgaaggagctgagcagcaagaggcccctggtgcgctctgaggtgaatggccagatcatcctgctgaagggctacagcgtggatgtggacacagaggccaaggtgattgagcgggccgccacctaccaccgggcctggagggaggccgagggggacagcggcctgctgcccctcatcttcctgttcctgtgcaagagtgaccccatggcctacctgatggtgccctactacccccgggccaacctgaatgctgtgcaggccaacatgcccctgaacagcgaggagaccctgaaggtgatgaagggcgtggcccagggcctgcacaccctgcacaaggctgacatcatccacggcagcctgcaccagaacaacgtgtttgccctgaaccgggagcagggcatcgtgggggactttgacttcaccaagtctgtgtcccagagggcctctgtgaacatgatggtgggggacctgagcctgatgagccctgagctgaagatgggcaagccagccagccctggcagtgacctgtatgcctacggctgcctgctgctgtgggatgacaaggtgaagagcctgctgtgcagcctcatctgctaccgcagctccatgacagctgagcaggtgctgaatgctgagtgcttcctgatgcccaaggagcagagcgtgcccaaccctgagaaggacacagagtacaccctgtacaagaaggaggaggagatcaagacagagaacctggacaagtgcatggagaagaccagaaatggagaggccaactttgactgctag

SEQ ID NO: 93612 - DNA, 2991 bp, Artificial Sequence
  derived and/or modified sequence
atgtgggtgcagggccacagcagccgggccagcgccaccgagagcgtctctttctcgggaatcgtgcaaatggatgaagacacccattacgacaaggtagaggacgtggtggggtcacacattgaggacgcggtgacattctgggctcagagcataaacaggaacaaggacataatgaagattggctgctctctcagcgaggtatgtcctcaggcgtctagtgtgctgggaaatttggaccctaataaaatatacggcggcttgttctcagaggatcaatgttggtatagatgtaaagtgctgaaaatcattagtgttgaaaagtgccttgtgcgatacattgattatggaaacaccgaaatactaaacaggtccgacatcgtggagatccccctggagttgcagttctcatccgtggccaagaaatataagctttggggcctacatatcccctctgaccaggaggtgacacagtttgatcagggcacgactttcctcgggagccttatctttgagaaggagattaaaatgaggatcaaagctacctcagaagacgggaccgttatagctcaggctgaatatggtagcgtagatatcggggaggaagtcctgaagaagggttttgctgagaaatgcaggcttgcttcccgtacagacatatgcgaggagaaaaagcttgaccccggacagctggttctgagaaaccttaagagtccaattccgctgtggggccaccgctcaaaccagagcaccttttcgcgaccaaagggccacctgagcgaaaagatgactttggatttgaaagacgagaatgacgccggtaatctgattacttttccgaaggaatccttggccgtgggtgattttaacttaggctccaatgtgagccttgagaagatcaagcaggaccagaaactgatcgaggaaaatgagaaactaaagactgagaaagacgccctcctggaaagctataaggctcttgagctgaaagtggagcaaatcgctcaggaactgcagcaagagaaggctgcagcagtggatctcaccaaccatctggagtacacccttaagacgtacatcgacactcggatgaaaaacttggccgccaagatggagatcttgaaggaaatgaggcacgtcgatattagcgtgcgatttggtaaagacctgagcgatgcaatccaggtgctcgacgaaggctgttttaccaccccggcctcactcaacggcctagagatcatatgggcagagtactcactggcccaagagaacattaagacctgtgagtatgtaagcgagggaaacattctcattgcacagcgtaacgagatgcagcaaaaactatacatgtccgtggaagatttcattttagaggttgacgagagcagcttaaacaagcggctgaagacgctccaggacctatccgtatcactggaggcggtgtacggccaggccaaggaaggagccaacagcgatgagatcctgaaaaaattctacgattggaaatgcgataaacgcgaggagtttactagtgtgcggagtgaaaccgacgccagtctacatcggctcgtggcttggtttcagagaactctgaaggtgttcgatctgtctgtggaaggatcactcatctcggaggatgccatggacaatatcgacgagatactcgagaagactgaaagctcagtgtgtaaagaattagagatcgccctggtggatcagggagatgctgataaagagattatcagcaatacatacagccaagtcttacagaagattcactccgaggagcggctcatcgccacagtccaagccaaatacaaagactccattgaattcaaaaagcagctgatcgagtatctgaataagtctccaagtgtggaccacttacttagcatcaaaaagacactgaaatccctcaaagctctgctgagatggaagttggtggaaaaatccaatcttgaggaatcagatgaccctgatgggtcccaaattgagaaaataaaggaagaaataactcaacttagaaataacgttttccaagagatttaccatgagcgtgaggaatatgaaatgctgacctcacttgctcagaagtggtttcccgagctgccattgctgcatcccgagattggactgctaaagtacatgaacagcggaggcctccttactatgtccttagagcgtgacctgctcgacgcagagcctatgaaggagctgtcgtccaagagacccttggtgcgaagcgaggtgaacggccaaatcattctgctgaaggggtattctgtcgatgtggatacagaagcaaaggtgattgagcgggcagcgacctaccacagagcctggcgagaggccgaaggggatagcggtctcctgcctctgatttttctgtttctctgtaagtctgaccctatggcttatcttatggtgccatactatcctagagccaatctgaatgcagtgcaggcaaacatgccacttaactccgaagaaacacttaaagtgatgaagggtgtcgcccagggtctgcacaccctgcacaaggcagacatcatccatggcagccttcaccagaacaacgtgttcgcactgaaccgggagcaaggcattgttggtgatttcgatttcaccaagagcgtcagtcagagggcatcagttaatatgatggttggggacctgagtctcatgtctcctgaattgaagatggggaaacccgccagcccagggtcggacttgtatgcctacggctgtctgctcctatgggatgacaaggtgaagtctctcctgtgtagccttatctgctaccggtctagcatgacggcagaacaggtattgaacgccgagtgcttccttatgccaaaagaacaaagtgtccctaacccggagaaggatactgaatacaccctgtacaaaaaggaagaagagataaaaacagagaaccttgataagtgcatggaaaagactaggaatggggaggcaaactttgactgctag

SEQ ID NO: 93613 - DNA, 2991 bp, Artificial Sequence
  derived and/or modified sequence
atgtgggttcaaggacactcctcccgggcttctgccaccgagagcgttagcttctcaggcatcgttcagatggatgaggacactcactatgataaagtcgaggacgttgtcgggagccacattgaggatgccgtgacgttttgggcccaatccataaaccggaacaaggatatcatgaagatcggatgctccctgagtgaagtttgcccccaggcatcctccgtgctcggaaacctggatccaaacaagatttatgggggactgttttcagaggatcagtgttggtatcgctgtaaagttctgaaaattatctctgttgagaagtgtttggtgcgatacatcgattatggcaatacagagatactcaaccggagcgatattgtcgagataccgttggaattacaattctcatcagtggccaaaaaatacaaactgtggggcttacacatcccttctgaccaggaagtgacgcagtttgaccaggggacaacatttctgggctcgctgatatttgagaaggagattaaaatgcggataaaggccaccagcgaggatggcacggtaattgcacaggccgaatacggctctgtcgacattggcgaggaagtgttgaagaagggtttcgccgagaaatgccgcctcgccagccggaccgatatctgcgaggagaagaaactggaccccggtcagctggtgctccgtaacctgaagagcccaatacctctgtggggccacaggagtaaccagtcaaccttctcccggcctaaagggcatctgtccgagaaaatgacattagacctaaaggatgagaacgacgccggaaatttaataacttttcctaaggagtctttggcagttggggactttaacttgggcagtaatgtgtctctcgagaagatcaaacaggaccagaagcttatcgaagagaatgaaaaactgaagactgagaaagacgcgctgctcgaaagctacaaagctttggaactcaaagtggagcaaatcgcacaggaactgcagcaagaaaaggccgctgcagtcgaccttacaaaccacctagagtacacgttgaagacatacatagataccaggatgaaaaatctcgccgctaagatggagatcctaaaagagatgaggcacgtcgatatttccgttcgcttcggcaaagacctgtccgatgctattcaggtgctagatgaggggtgttttacaacccccgcaagcctgaatgggttggagatcatttgggctgagtacagccttgcccaggaaaatatcaagacttgcgagtacgtttccgagggaaatatcctcatcgcacagcggaatgagatgcaacagaaactgtacatgagtgttgaagacttcatccttgaagtggacgagtcttctctgaataagcggctgaagaccctgcaggatcttagtgtgagtttggaggcagtttatggccaggctaaggaaggcgcaaattcggacgagatcctgaaaaaattctatgactggaaatgcgataaacgggaggagttcacctctgtgaggtcagagacagacgcgagtctgcaccgccttgtagcctggttccagcggacactcaaagtgtttgacctgtctgtagaaggctctctcatcagcgaggacgccatggacaacatcgacgagatactcgaaaaaacagaaagcagcgtgtgtaaagaacttgaaattgccttagttgatcagggagacgccgacaaggagattatatccaatacatattctcaggtcctccagaaaatccacagtgaggagcggcttattgccaccgtgcaggctaagtataaggactcaatcgaattcaaaaaacagctgattgagtacctgaacaagagcccttcagtggaccacctgcttagtattaagaagaccctgaagagcttgaaagcccttctcaggtggaagctggtggaaaagtcaaacctggaggagtccgacgaccccgacggatcccagattgagaagatcaaagaagaaatcacccaattgcggaataacgtattccaagagatatatcacgagagggaagagtatgagatgctgacctccctagcacagaagtggtttccggagctccccctgctgcatcccgagatcggcctgctgaagtatatgaactcaggcggactgctgacgatgtcgctcgagcgagacttactggatgccgagccgatgaaagagctgagttccaagcgaccactagtccgaagcgaagtcaatggccagataatactgctgaaaggctactcagtggacgtggacaccgaggctaaggtgattgaacgggctgctacctaccaccgcgcatggcgcgaggcagaaggtgactccggcctgctgcctctgatattcctgtttctgtgcaagtcggatcccatggcatatctcatggtcccctactacccaagagccaatctcaatgccgtgcaggctaacatgcccctgaactctgaagagacactcaaagtaatgaagggcgttgctcagggcctccatacattgcacaaggcagacatcatccatggctctctacatcaaaataatgtgtttgccttgaatagggaacagggcatagtgggtgattttgattttaccaagagcgtgagccagagagccagcgtgaacatgatggtgggagacttatctttaatgtccccggagctgaagatggggaagccagcgagcccaggctccgatctgtatgcctacggttgcctcttgctttgggatgataaagtgaaatctctgctgtgcagcttgatctgctacagaagctctatgaccgcagaacaagttttgaacgccgaatgttttctgatgcccaaagaacagagcgtcccaaatccggagaaagacacagagtacaccctgtacaaaaaggaggaagagattaagacagaaaatctggataaatgcatggagaagaccagaaacggagaggcaaattttgattgttag

SEQ ID NO: 93614 - DNA, 3085 bp, Artificial Sequence
  derived and/or modified sequence
gaaagtccagtatgtgggtccagggtcactcttctagagcttccgcaacggaaagtgtgagtttttcaggaattgttcaaatggatgaagatacacattacgataaagtggaagatgtggttggaagtcacatagaagatgcagtaacattttgggcccagagtatcaatagaaataaggatatcatgaagattggttgctcactgtctgaagtttgcccccaggccagttcagttttggggaatcttgacccaaacaagatttatggtggattattttctgaagatcagtgttggtacagatgcaaagtactgaaaatcatcagcgttgaaaagtgtctggtgaggtacattgactatggaaatactgaaattctaaatcgatctgatatagttgaaattcctttggagctgcagttttctagtgttgccaaaaagtataaactttggggactacacattccttctgatcaagaagttacccagtttgatcagggcacaacctttttggggagcttgatttttgaaaaggaaataaaaatgagaattaaagcaacctctgaagatggaacagttattgctcaggctgagtatggcagtgtggatataggggaagaggtgcttaagaaaggatttgcagagaaatgcagacttgcttccagaactgacatctgtgaggaaaaaaaattggatcctggtcaacttgttctcaggaacctcaaaagccccattcctttgtgggggcatagatcaaaccagtcaaccttcagcaggcccaaggggcacttaagtgagaaaatgactcttgacttgaaggatgaaaatgatgcaggcaatcttataacatttccaaaggaaagtttggctgttggtgactttaatttagggtctaacgtcagcctggaaaaaattaagcaggaccagaaactgattgaagaaaatgaaaaacttaaaacagagaaggacgctcttcttgaaagttataaggcgttagaattgaaagtagagcagattgcccaggagctgcagcaagagaaggcagctgctgtggatttgactaaccacttagaatacactctgaagacctatatagataccagaatgaaaaatctggcagctaagatggaaatactgaaagaaatgaggcatgtcgacatcagtgtccgtttcggaaaagacctttcagatgctatacaagtgttggatgaagggtgctttactactccagcttctttgaatggattagagataatatgggcagaatacagtctggctcaggagaatattaaaacttgtgaatatgtgagtgaagggaatattttgattgcccaaagaaatgaaatgcagcagaagctgtacatgtcagtagaagattttattctggaagttgatgagtcatctcttaataaacgcttaaaaacattgcaggatttgtcagtctctttagaagcagtgtatggacaagccaaagaaggagcaaattctgatgaaatacttaaaaaattttatgactggaagtgtgataaaagagaggagttcaccagtgttagaagtgaaacagacgcttctctgcaccgtcttgtagcatggttccaaagaaccttaaaggtttttgacctatctgtggaaggatcactgatttcagaagacgcaatggataatattgatgaaatcctagagaagactgagtcaagtgtctgcaaagagctggagatagctctggttgatcaaggtgatgcagacaaggagataatttcaaatacatatagtcaagtactgcaaaagattcattcagaggaaaggctcattgccacagtacaagctaagtacaaggacagtattgagtttaaaaagcagcttattgaatatttaaataagagtcccagtgtggatcacttgctatccattaagaagacattgaaaagcttaaaagctctactcagatggaaattggttgaaaagagtaatttggaagagtcagatgatcctgatggctctcaaattgagaaaataaaagaagaaataactcagctgcgcaataatgtctttcaggaaatttatcatgagagagaggaatatgagatgctaactagtttggcacagaaatggttccctgagctgcctctgcttcatcctgaaataggattactcaaatacatgaactctggtggtctccttacaatgagcttggaacgagatcttcttgatgctgagcccatgaaggaacttagcagcaagcgtcctttggtacgttctgaggttaatgggcagataattctgttaaagggctattctgtggatgttgacacagaagccaaggtgattgagagagcagccacctaccatagagcttggagagaagctgaaggagactcagggttactgccattgatattcctgtttttatgtaagtctgatcctatggcttatctgatggtcccatactaccctagggcaaacctgaatgctgttcaagccaacatgcctttaaattcagaagaaactttaaaggtcatgaaaggtgttgcccagggtctgcatacattgcataaggctgacataattcatggatcacttcatcagaacaatgtatttgctttaaaccgtgaacaaggaattgttggagattttgacttcaccaaatctgtgagtcagcgagcctcggtgaacatgatggttggtgacttgagtttgatgtcacctgagttgaaaatgggaaaacctgcttctccaggttcagacttatatgcttatggctgcctcttattatgggatgataaagtcaaatccctcctctgtagcttgatatgttatagaagttcaatgactgctgaacaagttttaaatgctgaatgtttcttgatgccaaaggagcaatcagttccaaacccagaaaaagatactgaatacaccctatataaaaaggaagaagaaataaagacggagaacttggataaatgtatggagaagacaagaaatggtgaagccaactttgattgttaaattattattgttgttgttgcagaggttctttttaaaaactttggtttggttaatacacagaaatatctagaaatgttctggga

SEQ ID NO: 93615 - DNA, 2991 bp, Artificial Sequence
  derived and/or modified sequence
atgtgggtgcagggccacagcagcagagccagcgccaccgagagcgtgagcttcagcggcatcgtgcagatggacgaggacacccactacgacaaggtggaggacgtggtgggcagccacatcgaggacgccgtgaccttctgggcccagagcatcaacagaaacaaggacatcatgaagatcggctgcagcctgagcgaggtgtgcccccaggccagcagcgtgctgggcaacctggaccccaacaagatctacggcggcctgttcagcgaggaccagtgctggtacagatgcaaggtgctgaagatcatcagcgtggagaagtgcctggtgagatacatcgactacggcaacaccgagatcctgaacagaagcgacatcgtggagatccccctggagctgcagttcagcagcgtggccaagaagtacaagctgtggggcctgcacatccccagcgaccaggaggtgacccagttcgaccagggcaccaccttcctgggcagcctgatcttcgagaaggagatcaagatgagaatcaaggccaccagcgaggacggcaccgtgatcgcccaggccgagtacggcagcgtggacatcggcgaggaggtgctgaagaagggcttcgccgagaagtgcagactggccagcagaaccgacatctgcgaggagaagaagctggaccccggccagctggtgctgagaaacctgaagagccccatccccctgtggggccacagaagcaaccagagcaccttcagcagacccaagggccacctgagcgagaagatgaccctggacctgaaggacgagaacgacgccggcaacctgatcaccttccccaaggagagcctggccgtgggcgacttcaacctgggcagcaacgtgagcctggagaagatcaagcaggaccagaagctgatcgaggagaacgagaagctgaagaccgagaaggacgccctgctggagagctacaaggccctggagctgaaggtggagcagatcgcccaggagctgcagcaggagaaggccgccgccgtggacctgaccaaccacctggagtacaccctgaagacctacatcgacaccagaatgaagaacctggccgccaagatggagatcctgaaggagatgagacacgtggacatcagcgtgagattcggcaaggacctgagcgacgccatccaggtgctggacgagggctgcttcaccacccccgccagcctgaacggcctggagatcatctgggccgagtacagcctggcccaggagaacatcaagacctgcgagtacgtgagcgagggcaacatcctgatcgcccagagaaacgagatgcagcagaagctgtacatgagcgtggaggacttcatcctggaggtggacgagagcagcctgaacaagagactgaagaccctgcaggacctgagcgtgagcctggaggccgtgtacggccaggccaaggagggcgccaacagcgacgagatcctgaagaagttctacgactggaagtgcgacaagagagaggagttcaccagcgtgagaagcgagaccgacgccagcctgcacagactggtggcctggttccagagaaccctgaaggtgttcgacctgagcgtggagggcagcctgatcagcgaggacgccatggacaacatcgacgagatcctggagaagaccgagagcagcgtgtgcaaggagctggagatcgccctggtggaccagggcgacgccgacaaggagatcatcagcaacacctacagccaggtgctgcagaagatccacagcgaggagagactgatcgccaccgtgcaggccaagtacaaggacagcatcgagttcaagaagcagctgatcgagtacctgaacaagagccccagcgtggaccacctgctgagcatcaagaagaccctgaagagcctgaaggccctgctgagatggaagctggtggagaagagcaacctggaggagagcgacgaccccgacggcagccagatcgagaagatcaaggaggagatcacccagctgagaaacaacgtgttccaggagatctaccacgagagagaggagtacgagatgctgaccagcctggcccagaagtggttccccgagctgcccctgctgcaccccgagatcggcctgctgaagtacatgaacagcggcggcctgctgaccatgagcctggagagagacctgctggacgccgagcccatgaaggagctgagcagcaagagacccctggtgagaagcgaggtgaacggccagatcatcctgctgaagggctacagcgtggacgtggacaccgaggccaaggtgatcgagagagccgccacctaccacagagcctggagagaggccgagggcgacagcggcctgctgcccctgatcttcctgttcctgtgcaagagcgaccccatggcctacctgatggtgccctactaccccagagccaacctgaacgccgtgcaggccaacatgcccctgaacagcgaggagaccctgaaggtgatgaagggcgtggcccagggcctgcacaccctgcacaaggccgacatcatccacggcagcctgcaccagaacaacgtgttcgccctgaacagagagcagggcatcgtgggcgacttcgacttcaccaagagcgtgagccagagagccagcgtgaacatgatggtgggcgacctgagcctgatgagccccgagctgaagatgggcaagcccgccagccccggcagcgacctgtacgcctacggctgcctgctgctgtgggacgacaaggtgaagagcctgctgtgcagcctgatctgctacagaagcagcatgaccgccgagcaggtgctgaacgccgagtgcttcctgatgcccaaggagcagagcgtgcccaaccccgagaaggacaccgagtacaccctgtacaagaaggaggaggagatcaagaccgagaacctggacaagtgcatggagaagaccagaaacggcgaggccaacttcgactgctag

SEQ ID NO: 93616 - protein, 259 aa, Artificial Sequence
  derived and/or modified sequence
MAVQISKKRKFVADGIFKAELNEFLTRELAEDGYSGVEVRVTPTRTEIIILATRTQNVLGEKGRRIRELTAVVQKRFGFPEGSVELKIMVMVTGYPLLPLKLYAEKVATRGLCAIAQAESLRYKLLGGLAVRRACYGVLRFIMESGAKGCEVVVSGKLRGQRAKSMKFVDGLMIHSGDPVNYYVDTAVRHVLLRQGVLGIKVKIMLPWDPTGKIGPKKPLPDHVSIVEPKDEILPTTPISEQKGGKPEPPAMPQPVPTA

SEQ ID NO: 93617 - DNA, 780 bp, Artificial Sequence
  derived and/or modified sequence
atggctgttcaaattagcaagaaacgcaaattcgtggccgacggcatctttaaggccgaattgaacgagtttctgacaagagagctcgcagaggatggttactcaggcgtcgaggtgcgggtgaccccaacgaggacagagattatcatccttgcaactcgaacacaaaacgtcttaggtgaaaaagggagaagaatccgggagctgactgccgtagtccaaaaaagatttggatttccagaggggagcgttgaactgaaaatcatggtgatggtgacgggctatccattgttaccactgaagctgtatgccgagaaggtcgccactcgtggcctgtgcgctatcgctcaagctgaaagtttgaggtacaaactgctgggagggctggccgtgcgcagagcttgttacggggtcctgcgctttatcatggaaagtggagctaaaggctgcgaggtggtggttagtgggaagctgagaggccagcgcgctaaatctatgaaatttgtggatgggcttatgattcactctggagacccagttaactactacgttgacacagccgtgcggcacgtactgctgcggcagggggttttgggcatcaaagtgaagatcatgttgccctgggatcccacgggtaaaattggccctaagaagcctttgccggatcacgtgtctattgtggagcccaaggacgagattctgcctaccactcctatctcagagcagaagggcgggaaaccagaacctcctgcaatgcctcaaccagtgcccactgcctag

SEQ ID NO: 93618 - DNA, 780 bp, Artificial Sequence
  derived and/or modified sequence
atggctgtgcagatcagcaagaagaggaagtttgtggctgatggcatcttcaaggccgagctgaatgagttcctgacccgggagctggctgaagatggctacagcggcgtggaggtgcgggtgacccccaccaggacagagatcatcatcctggccaccaggacccagaatgtgctgggggagaagggccgccgcatccgggagctgacagctgtggtgcagaagagatttggcttccctgagggctctgtggagctgaagatcatggtgatggtgacaggctaccccctgctgcccctgaagctgtatgcagagaaggtggccacccggggcctgtgtgccatcgcccaggccgagagcctgcgctacaagctgctgggcggcctggccgtgcggcgggcctgctacggcgtgctgcgcttcatcatggagagcggggccaagggctgtgaggtggtggtgtctgggaagctgcggggccagagggccaagtccatgaagtttgtggatggcctgatgatccacagcggggaccctgtgaactactacgtggacacagctgtgcgccacgtgctgctgcggcagggcgtgctgggcatcaaggtgaagatcatgctgccctgggaccccaccgggaagattggccccaagaagcccctgcctgaccacgtgtccatcgtggagcccaaggatgagatcctgcccaccacccccatcagcgagcagaagggcggcaagccagagcccccagccatgccccagcctgtgcccacagcctag

SEQ ID NO: 93619 - DNA, 780 bp, Artificial Sequence
  derived and/or modified sequence
atggccgtgcagatcagcaagaagcggaagttcgtggccgacggcatcttcaaagctgaacttaatgagtttctcaccagggagctggccgaagatggatactcaggcgtagaggtacgagtgacaccaacaagaacggagatcatcatactcgcaactagaacacaaaatgtgttgggtgaaaaagggagacgcataagggagctgacggctgttgtacagaaaaggtttgggttcccggaaggatccgtcgagttgaaaattatggtaatggtgacaggctaccctcttctgcccctgaaactgtatgccgagaaggtggcaacccgcggcctgtgcgccattgcgcaggctgagagcctccgttacaagttactcggagggctggcagtccgcagggcctgttatggagtcctgaggttcattatggagtccggagcaaagggctgcgaggttgtcgtgagcgggaagctgcgcggacaacgggctaagtcgatgaagtttgtcgacggcttaatgatccatagcggggatccagtcaattattatgtggatactgcagttcggcatgtgctcctaaggcaaggagtcctggggatcaaggtcaagattatgctaccctgggatccaaccgggaaaatcggcccgaaaaaaccactacctgatcacgttagtatcgtggaacccaaagacgagatactgccgaccaccccgatcagcgaacagaaaggggggaagccagaacctccggccatgccacagcctgttccaacagcgtag

SEQ ID NO: 93620 - DNA, 780 bp, Artificial Sequence
  derived and/or modified sequence
atggccgtacagatctcgaagaaacgcaagtttgtcgccgacggcatattcaaggccgaactgaatgagtttctgaccagagagttggccgaggacggctattctggcgtggaggtgcgtgtgacaccaaccaggacagagatcataatcctggccacacgaactcagaacgtccttggtgagaagggcaggagaatccgggaactgacagccgtggtgcagaagagatttggcttccccgaaggatcggttgagttaaagatcatggtgatggtgacaggataccctttactccctctgaaattatacgctgagaaagttgcgacccgcggtctgtgtgcgatagctcaggcggaaagcttgaggtataaattactgggaggcttagcagtgaggagagcatgctatggcgtgttgcggtttatcatggagtccggagcaaaagggtgcgaagtagtggtgtctggcaagctccgcggacaaagggctaagtctatgaaatttgtggatggcctaatgatccactccggcgaccccgtgaattactacgtcgacacggctgtgaggcatgtgcttctgaggcagggcgtgctgggcataaaagtgaaaattatgctcccttgggatcccacaggaaaaattggaccgaagaagccccttcccgaccacgtgagtatcgttgagccaaaagacgaaattctgcccacgactccaatttctgaacagaaagggggaaagccagagcctccggctatgccccagcctgtgcctacggcttag

SEQ ID NO: 93621 - DNA, 907 bp, Artificial Sequence
  derived and/or modified sequence
gcggagcgcggcggcaagatggcagtgcaaatatccaagaagaggaagtttgtcgctgatggcatcttcaaagctgaactgaatgagtttcttactcgggagctggctgaagatggctactctggagttgaggtgcgagttacaccaaccaggacagaaatcattatcttagccaccagaacacagaatgttcttggtgagaagggccggcggattcgggaactgactgctgtagttcagaagaggtttggctttccagagggcagtgtagagttgaaaataatggtgatggtaacaggatatcccttgcttcctttaaagctttatgctgaaaaggtggccactagaggtctgtgtgccattgcccaggcagagtctctgcgttacaaactcctaggagggcttgctgtgcggagggcctgctatggtgtgctgcggttcatcatggagagtggggccaaaggctgcgaggttgtggtgtctgggaaactccgaggacagagggctaaatccatgaagtttgtggatggcctgatgatccacagcggagaccctgttaactactacgttgacactgctgtgcgccacgtgttgctcagacagggtgtgctgggcatcaaggtgaagatcatgctgccctgggacccaactggtaagattggccctaagaagcccctgcctgaccacgtgagcattgtggaacccaaagatgagatactgcccaccacccccatctcagaacagaagggtgggaagccagagccgcctgccatgccccagccagtccccacagcataacagtttcttacttttgtgctttatttggtttcagggtctccttggcagctgtattctggagtctggatgttgctctctaaagacctttaataaaattttgtacaaagac

SEQ ID NO: 93622 - DNA, 780 bp, Artificial Sequence
  derived and/or modified sequence
atggccgtgcagatcagcaagaagagaaagttcgtggccgacggcatcttcaaggccgagctgaacgagttcctgaccagagagctggccgaggacggctacagcggcgtggaggtgagagtgacccccaccagaaccgagatcatcatcctggccaccagaacccagaacgtgctgggcgagaagggcagaagaatcagagagctgaccgccgtggtgcagaagagattcggcttccccgagggcagcgtggagctgaagatcatggtgatggtgaccggctaccccctgctgcccctgaagctgtacgccgagaaggtggccaccagaggcctgtgcgccatcgcccaggccgagagcctgagatacaagctgctgggcggcctggccgtgagaagagcctgctacggcgtgctgagattcatcatggagagcggcgccaagggctgcgaggtggtggtgagcggcaagctgagaggccagagagccaagagcatgaagttcgtggacggcctgatgatccacagcggcgaccccgtgaactactacgtggacaccgccgtgagacacgtgctgctgagacagggcgtgctgggcatcaaggtgaagatcatgctgccctgggaccccaccggcaagatcggccccaagaagcccctgcccgaccacgtgagcatcgtggagcccaaggacgagatcctgcccaccacccccatcagcgagcagaagggcggcaagcccgagccccccgccatgccccagcccgtgcccaccgcctag

SEQ ID NO: 93623 - DNA, 708 bp, Artificial Sequence
  derived and/or modified sequence
atgagcgcattgcggagaaaatttggtgatgactaccaggtggtaacaacctcatcatccgggtccggcctccaaccgcaagggcccggccaagatcctcagcaacagttggtacccaagaagaaaagacagcggtttgtggataagaatggaaggtgtaatgtgcagcacgggaacctggggtctgaaacaagtagatacctgtccgatctctttaccactctggttgatctcaagtggcgctggaatttgtttattttcattttgacgtacaccgtggcctggcttttcatggcttccatgtggtgggttattgcatatacccgcggcgatctcaataaagcgcacgtgggaaactatactccctgtgtcgctaatgtttataattttccttccgcgtttctgttttttatagagactgaggctactatcggctatggttaccggtacattaccgataagtgtcctgaaggtattatacttttcctgttccaaagcattttgggatcaatcgtcgacgccttcctgatcggatgcatgttcataaaaatgtctcaacccaaaaagcgtgctgagacattaatgttcagtgagcacgccgtgatcagcatgagagatggcaagttgacactgatgttccgtgtaggaaatttacggaattctcacatggtttccgctcagatcaggtgcaaactgctcaagggttag

SEQ ID NO: 93624 - DNA, 708 bp, Artificial Sequence
  derived and/or modified sequence
atgtctgccctgcggaggaagtttggagatgactaccaggtggtgaccaccagcagcagcggcagcggcctgcagccccagggccctggccaggacccccagcagcagctggtgcccaagaagaagaggcagagatttgtggacaagaatggccgctgcaatgtgcagcacggcaacctgggcagcgagaccagccgctacctgagtgacctcttcaccaccctggtggacctgaagtggcgctggaacctcttcatcttcatcctgacctacacagtggcctggctgttcatggcctccatgtggtgggtgattgcctacaccaggggggacctgaacaaggcccacgtgggcaactacaccccctgtgtggccaacgtgtacaacttccccagcgccttcctgttcttcatcgagacagaggccaccatcggctacggctaccgctacatcacagacaagtgcccagagggcatcatcctcttcctgttccagagcatcctgggcagcatcgtggatgccttcctgattggctgcatgttcatcaagatgagccagcccaagaagagagctgagaccctgatgttttctgaacatgctgtgatctccatgagagatggcaagctgaccctgatgttccgggtgggcaacctgaggaacagccacatggtgtctgcccagatccgctgcaagctgctgaagggctag

SEQ ID NO: 93625 - DNA, 708 bp, Artificial Sequence
  derived and/or modified sequence
atgagcgccctgcggcggaagttcggcgacgactaccaggtggtgacgacaagtagctccggctctggcctccaaccccaggggcccggccaggatccacagcagcagctcgtccccaagaagaaacggcaacgattcgtggataagaacgggcggtgcaatgtgcagcacggtaacctggggagcgagacttccaggtatctgagtgacctttttaccaccctggttgatctcaaatggcgctggaacttgttcatattcatccttacatacacggtagcatggttattcatggctagcatgtggtgggttattgcttatacaaggggtgatctgaacaaggcccacgttggcaactataccccatgcgtggccaatgtctataacttccctagcgcctttcttttttttattgagaccgaggccaccattgggtacggatatcgctacataaccgacaagtgccctgagggcattattttatttttgtttcagtcgatcttgggctcgatcgtggacgcttttctgataggttgcatgtttataaaaatgtctcaacccaaaaaacgagcagaaaccctcatgttctctgaacatgctgttattagtatgagggatgggaaactcaccctaatgtttcgagtcggcaatctgcgcaacagccacatggttagtgcccaaataaggtgcaagctactcaaaggatag

SEQ ID NO: 93626 - DNA, 1095 bp, Artificial Sequence
  derived and/or modified sequence
attggtgctagtttgcagcgcccagctcctgcgccttcgcttcgcgtttgaatctggctcgccccttcgtattatgtctgcactccgaaggaaatttggggacgattatcaggtagtgaccacatcgtccagcggctcgggcttgcagccccaggggccaggccaggaccctcagcagcagcttgtgcccaagaagaagcggcagcggttcgtggacaagaacggccggtgcaatgtacagcacggcaacctgggcagcgagacaagccgctacctctcggacctcttcaccacgctggtggacctcaagtggcgctggaacctcttcatcttcattctcacctacaccgtggcctggcttttcatggcgtccatgtggtgggtgatcgcctacactcggggcgacctgaacaaagcccacgtcggtaactacacgccttgcgtggccaatgtctataacttcccttctgccttcctcttcttcatcgagacggaggccaccatcggctatggctaccgatacatcacagacaagtgccccgagggcatcatcctcttcctcttccagtccatcctgggctccatcgtggacgccttcctcatcggctgcatgttcatcaagatgtcccagcccaagaagcgcgccgagaccctcatgttcagcgagcacgcggtgatctccatgagggacggaaaactcacgcttatgttccgggtgggcaacctgcgcaacagccacatggtctccgcgcagattcgctgcaagctgctcaaaggatgacttgtcaagctcgaacatcatatactgaagatgaagttctttggggtcatcgtttttttcctgtaatttccttagaagagggattctttaaagttgattactcccagttccatgcaacatttgaagtccccaccccaccttacagtgtgaaagagcaggaggaaatgcttctcatgtcgtcccctttaatagcaccagccataactaacagcaaagaaagacataattctgtggaatgcttagatggactagatgatattactacaaaactaccatctaagctgcagaaaattactggaagagaagactttccc

SEQ ID NO: 93627 - DNA, 708 bp, Artificial Sequence
  derived and/or modified sequence
atgtccgcacttaggagaaaattcggagacgattatcaggttgtaaccacttcttcctccggatcaggactccagcctcaggggccaggacaggacccacagcagcagctagttcccaagaaaaagcggcagcgctttgtggacaagaatggccgttgtaacgtgcagcacgggaacctcgggtctgaaacctctagatatctgtccgacctctttactacactggttgatttgaagtggcggtggaacctatttatcttcatactgacttacaccgtggcttggcttttcatggcatctatgtggtgggtgatcgcttacacaagaggcgacctgaataaagctcatgtgggcaactacaccccctgtgttgcgaatgtctataattttccatccgcttttttgttttttattgagaccgaggcaaccatcggttatgggtaccggtatatcacggacaagtgtcctgagggcatcatactctttctgttccagtcgatactcggaagcatcgtggatgctttcctgattgggtgtatgttcataaagatgtctcaacccaagaagcgggctgagacactgatgttctccgagcacgctgtaatttcgatgagggatggtaagttgaccctgatgtttcgagtcggcaatctcagaaacagccatatggtttctgctcaaattagatgcaaacttctgaagggatag

SEQ ID NO: 93628 - DNA, 708 bp, Artificial Sequence
  derived and/or modified sequence
atgagcgccctgagaagaaagttcggcgacgactaccaggtggtgaccaccagcagcagcggcagcggcctgcagccccagggccccggccaggacccccagcagcagctggtgcccaagaagaagagacagagattcgtggacaagaacggcagatgcaacgtgcagcacggcaacctgggcagcgagaccagcagatacctgagcgacctgttcaccaccctggtggacctgaagtggagatggaacctgttcatcttcatcctgacctacaccgtggcctggctgttcatggccagcatgtggtgggtgatcgcctacaccagaggcgacctgaacaaggcccacgtgggcaactacaccccctgcgtggccaacgtgtacaacttccccagcgccttcctgttcttcatcgagaccgaggccaccatcggctacggctacagatacatcaccgacaagtgccccgagggcatcatcctgttcctgttccagagcatcctgggcagcatcgtggacgccttcctgatcggctgcatgttcatcaagatgagccagcccaagaagagagccgagaccctgatgttcagcgagcacgccgtgatcagcatgagagacggcaagctgaccctgatgttcagagtgggcaacctgagaaacagccacatggtgagcgcccagatcagatgcaagctgctgaagggctag

SEQ ID NO: 93629 - protein, 155 aa, Artificial Sequence
  derived and/or modified sequence
MVDLTQVMDDEVFMAFASYATIILSKMMLMSTATAFYRLTRKVFANPEDCVAFGKGENAKKYLRTDDRVERVRRAHLNDLENIIPFLGIGLLYSLSGPDPSTAILHFRLFVGARIYHTIAYLTPLPQPNRALSFFVGYGVTLSMAYRLLKSKLYL

SEQ ID NO: 93630 - protein, 77 aa, Artificial Sequence
  derived and/or modified sequence
MVDLTQVMDDEVFMAFASYATIILSKMMLMSTATAFYRLTRKVFANPEDCVAFGKGENAKKYLRTDDRVERVRRAHL

SEQ ID NO: 93631 - protein, 80 aa, Artificial Sequence
  derived and/or modified sequence
MVDLTQVMDDEVFMAFASYATIILSKMMLMSTATAFYRLTRKVFANPEDCVAFGKGENAKKYLRTDDRVERVRRAHLNDL

SEQ ID NO: 93632 - DNA, 468 bp, Artificial Sequence
  derived and/or modified sequence
atggtagacctcactcaggtcatggatgatgaggtatttatggcttttgccagttatgccacaattattttgtctaagatgatgctcatgagtaccgccaccgcattttatcggctgactcgtaaagtgtttgccaaccccgaggactgcgtggctttcggaaagggcgagaacgcaaagaaatacttgaggaccgacgacagagtggaacgggtcaggcgagcacacctgaatgacttagagaatataataccgtttctgggtatagggttgctgtactccttgagcggccccgacccgtcgacagcaatcctgcactttcggctgttcgtgggggctcgcatctaccatacaatcgcgtacctcaccccgctgccgcagccaaatcgggctctttccttttttgtaggttatggcgttactctgtcaatggcctataggctactgaaaagtaaactgtatctatag

SEQ ID NO: 93633 - DNA, 468 bp, Artificial Sequence
  derived and/or modified sequence
atggtcgatcttacccaggtgatggacgatgaagtttttatggccttcgcaagttatgccacgatcattctgtctaagatgatgttaatgagcaccgcaaccgcattttacaggttgacacgcaaggtttttgccaatcccgaagattgtgtggcatttggaaaaggcgagaacgcaaaaaaataccttagaactgacgatcgagtggagagggtccgacgggcccatctgaacgacttggagaatatcatacctttcctgggcatcgggttgctgtattctctgagtggaccagatcccagtacggccattctccacttcagattgttcgttggcgctcgaatttatcacacgatcgcatacctcacgcccctaccccagcccaatagagcccttagcttctttgtcgggtatggggtaacacttagtatggcctacaggctcctcaagtcgaagttatacctatag

SEQ ID NO: 93634 - DNA, 468 bp, Artificial Sequence
  derived and/or modified sequence
atggtggacctgactcaggtgatggacgacgaagtttttatggctttcgctagctacgcaactattatcctctccaaaatgatgttgatgagtaccgcaactgctttctaccggctcacacggaaggtctttgctaatcctgaagactgcgtggcctttggaaagggggagaacgccaagaagtacctgagaaccgatgatcgagtggagcgggtgagaagagcacatcttaatgatctcgaaaacattatcccctttctgggaatcgggttgctgtactcactttctggcccagatccgagtacagccatactccactttcgcctgtttgttggcgcgagaatctaccatactattgcctacctgacgcccctcccccagccaaaccgagcactcagtttcttcgtaggttatggcgtcacactcagtatggcctatagactgttgaagagcaagctgtatctttag

SEQ ID NO: 93635 - DNA, 468 bp, Artificial Sequence
  derived and/or modified sequence
atggtggacctgactcaagttatggatgacgaggtcttcatggccttcgcctcatacgccaccattatcctgtcaaaaatgatgctgatgagcactgctacggcattctatcggttgactagaaaggtgttcgctaatcccgaggactgtgtagcattcggaaagggtgagaatgccaagaaatacctgcgaacagatgatagagttgagagggtcaggagagcccacctcaacgatttagaaaacatcattccctttctgggcatcgggctcctatatagcttgagcggaccagacccaagtacggctatactgcacttccgcctcttcgtcggcgcaaggatctaccacacaattgcctacttaacccctttaccccaaccaaatcgagcactcagctttttcgtgggctacggcgttaccctctcgatggcttaccgccttctgaagagcaaactgtatctatag

SEQ ID NO: 93636 - DNA, 234 bp, Artificial Sequence
  derived and/or modified sequence
atggtggatctgacgcaggtgatggacgatgaggtgttcatggccttcgctagttatgccaccatcatcttgtcgaaaatgatgctgatgagcactgccacagctttctaccggctgacccgcaaggtgttcgcgaatcccgaagattgtgtcgcattcgggaagggcgaaaatgccaagaagtatttgcgaacggacgacagggtcgaaagggtgagaagagctcacctctag

SEQ ID NO: 93637 - DNA, 243 bp, Artificial Sequence
  derived and/or modified sequence
atggtggacttaacacaggtcatggacgacgaagtcttcatggcctttgcttcctacgccactatcattctctcaaaaatgatgctcatgagcacggccacggcgttttacagactcaccagaaaggtgttcgctaaccccgaggattgtgtcgcgtttggaaaaggggaaaacgcaaaaaaatacttgagaaccgacgatcgcgtcgagcgtgtccgccgagcccacctgaatgatttatag

SEQ ID NO: 93638 - DNA, 468 bp, Artificial Sequence
  derived and/or modified sequence
atggtggacctgacccaggtgatggatgatgaggtgttcatggcctttgccagctatgccaccatcatcctgagcaagatgatgctgatgagcacagccacagccttctaccgcctgaccaggaaggtgtttgccaaccctgaggactgtgtggcctttggaaaaggagaaaatgccaagaagtacctgaggacagatgacagagtggagcgggtgagaagagcccacctgaatgacctggagaacatcatccccttcctgggcatcggcctgctgtacagcctgagcggccctgaccccagcacagccatcctgcacttccggctgtttgtgggcgcccgcatctaccacaccatcgcctacctgacccccctgccccagcccaacagagccctgtccttctttgtgggctacggcgtgaccctgtccatggcctaccgcctgctgaagagcaagctgtacctgtag

SEQ ID NO: 93639 - DNA, 234 bp, Artificial Sequence
  derived and/or modified sequence
atggtggacctgacccaggtgatggatgatgaggtgttcatggcctttgccagctatgccaccatcatcctgagcaagatgatgctgatgagcacagccacagccttctaccgcctgaccaggaaggtgtttgccaaccctgaggactgtgtggcctttggaaaaggagaaaatgccaagaagtacctgaggacagatgacagagtggagcgggtgagaagagcccacctgtag

SEQ ID NO: 93640 - DNA, 243 bp, Artificial Sequence
  derived and/or modified sequence
atggtggacctgacccaggtgatggatgatgaggtgttcatggcctttgccagctatgccaccatcatcctgagcaagatgatgctgatgagcacagccacagccttctaccgcctgaccaggaaggtgtttgccaaccctgaggactgtgtggcctttggaaaaggagaaaatgccaagaagtacctgaggacagatgacagagtggagcgggtgagaagagcccacctgaatgacctgtag

SEQ ID NO: 93641 - DNA, 901 bp, Artificial Sequence
  derived and/or modified sequence
tcgtgacaaagcaaattgtctggtatcatgaatttggaacaccattccagaccaaaattgaaaaaatggttgacctcacccaggtaatggatgatgaagtattcatggcttttgcatcctatgcaacaattattctttcaaaaatgatgcttatgagtactgcaactgcattctatagattgacaagaaaggtttttgccaatccagaagactgtgtagcatttggcaaaggagaaaatgccaagaagtatcttcgaacagatgacagagtagaacgtgtacgcagagcccacctgaatgaccttgaaaatattattccatttcttggaattggcctcctgtattccttgagtggtcccgacccctctacagccatcctgcacttcagactatttgtcggagcacggatctaccacaccattgcatatttgacaccccttccccagccaaatagagctttgagtttttttgttggatatggagttactctttccatggcttacaggttgctgaaaagtaaattgtacctgtaaagaaaatcatacaactcagcatccagttggctttttaagaattctgtacttccaatttataatgaatactttcttagattttaggtaggaggggagcagaggaattatgaactggggtaaacccattttgaatattagcattgccaatatcctgtattcttgttttacatttggattagaaatttaacatagtaattcttaagtcttttgtctgatttttaaagtactttcttataaatttggatcatgttatgatttgtaacattcacacaacacctcacttttgaatctataaaagaattgcacgtatgagaaacctatatttcaatactgctgaaacagacatgaaataaagaatttaaagaatg

SEQ ID NO: 93642 - DNA, 909 bp, Artificial Sequence
  derived and/or modified sequence
gaattcaagtcctaaagcctacagttttgaatactactgaaatgacaagttattccagaccaaaattgaaaaaatggttgacctcacccaggtaatggatgatgaagtattcatggcttttgcatcctatgcaacaattattctttcaaaaatgatgcttatgagtactgcaactgcattctatagattgacaagaaaggtttttgccaatccagaagactgtgtagcatttggcaaaggagaaaatgccaagaagtatcttcgaacagatgacagagtagaacgtgtacgcagagcccacctgaatgaccttgaaaatattattccatttcttggaattggcctcctgtattccttgagtggtcccgacccctctacagccatcctgcacttcagactatttgtcggagcacggatctaccacaccattgcatatttgacaccccttccccagccaaatagagctttgagtttttttgttggatatggagttactctttccatggcttacaggttgctgaaaagtaaattgtacctgtaaagaaaatcatacaactcagcatccagttggctttttaagaattctgtacttccaatttataatgaatactttcttagattttaggtaggaggggagcagaggaattatgaactggggtaaacccattttgaatattagcattgccaatatcctgtattcttgttttacatttggattagaaatttaacatagtaattcttaagtcttttgtctgatttttaaagtactttcttataaatttggatcatgttatgatttgtaacattcacacaacacctcacttttgaatctataaaagaattgcacgtatgagaaacctatatttcaatactgctgaaacagacatgaaataaagaatttaaagaatg

SEQ ID NO: 93643 - DNA, 979 bp, Artificial Sequence
  derived and/or modified sequence
ggcagatggaagacttgggggggtctctgccagctggaagtgcttggctccacttagcagctaaacttagcttttcaatcgatcgcttttgaaagggaattgtatttctgtccccgtgcggattccagaccaaaattgaaaaaatggttgacctcacccaggtaatggatgatgaagtattcatggcttttgcatcctatgcaacaattattctttcaaaaatgatgcttatgagtactgcaactgcattctatagattgacaagaaaggtttttgccaatccagaagactgtgtagcatttggcaaaggagaaaatgccaagaagtatcttcgaacagatgacagagtagaacgtgtacgcagagcccacctgaatgaccttgaaaatattattccatttcttggaattggcctcctgtattccttgagtggtcccgacccctctacagccatcctgcacttcagactatttgtcggagcacggatctaccacaccattgcatatttgacaccccttccccagccaaatagagctttgagtttttttgttggatatggagttactctttccatggcttacaggttgctgaaaagtaaattgtacctgtaaagaaaatcatacaactcagcatccagttggctttttaagaattctgtacttccaatttataatgaatactttcttagattttaggtaggaggggagcagaggaattatgaactggggtaaacccattttgaatattagcattgccaatatcctgtattcttgttttacatttggattagaaatttaacatagtaattcttaagtcttttgtctgatttttaaagtactttcttataaatttggatcatgttatgatttgtaacattcacacaacacctcacttttgaatctataaaagaattgcacgtatgagaaacctatatttcaatactgctgaaacagacatgaaataaagaatttaaagaatg

SEQ ID NO: 93644 - DNA, 914 bp, Artificial Sequence
  derived and/or modified sequence
cctgcattgcgcgcgacccggcggcgggacaggcttgctgcttcctcctcctcggcctcaccattccagaccaaaattgaaaaaatggttgacctcacccaggtaatggatgatgaagtattcatggcttttgcatcctatgcaacaattattctttcaaaaatgatgcttatgagtactgcaactgcattctatagattgacaagaaaggtttttgccaatccagaagactgtgtagcatttggcaaaggagaaaatgccaagaagtatcttcgaacagatgacagagtagaacgtgtacgcagagcccacctgaatgaccttgaaaatattattccatttcttggaattggcctcctgtattccttgagtggtcccgacccctctacagccatcctgcacttcagactatttgtcggagcacggatctaccacaccattgcatatttgacaccccttccccagccaaatagagctttgagtttttttgttggatatggagttactctttccatggcttacaggttgctgaaaagtaaattgtacctgtaaagaaaatcatacaactcagcatccagttggctttttaagaattctgtacttccaatttataatgaatactttcttagattttaggtaggaggggagcagaggaattatgaactggggtaaacccattttgaatattagcattgccaatatcctgtattcttgttttacatttggattagaaatttaacatagtaattcttaagtcttttgtctgatttttaaagtactttcttataaatttggatcatgttatgatttgtaacattcacacaacacctcacttttgaatctataaaagaattgcacgtatgagaaacctatatttcaatactgctgaaacagacatgaaataaagaatttaa

SEQ ID NO: 93645 - DNA, 298 bp, Artificial Sequence
  derived and/or modified sequence
tcgtgacaaagcaaattgtctggtatcatgaatttggaacaccattccagaccaaaattgaaaaaatggttgacctcacccaggtaatggatgatgaagtattcatggcttttgcatcctatgcaacaattattctttcaaaaatgatgcttatgagtactgcaactgcattctatagattgacaagaaaggtttttgccaatccagaagactgtgtagcatttggcaaaggagaaaatgccaagaagtatcttcgaacagatgacagagtagaacgtgtacgcagagcccacctgaa

SEQ ID NO: 93646 - DNA, 365 bp, Artificial Sequence
  derived and/or modified sequence
ggggtctctgccagctggaagtgcttggctccacttagcagctaaacttagcttttcaatcgatcgcttttgaaagggaattgtatttctgtccccgtgcggattccagaccaaaattgaaaaaatggttgacctcacccaggtaatggatgatgaagtattcatggcttttgcatcctatgcaacaattattctttcaaaaatgatgcttatgagtactgcaactgcattctatagattgacaagaaaggtttttgccaatccagaagactgtgtagcatttggcaaaggagaaaatgccaagaagtatcttcgaacagatgacagagtagaacgtgtacgcagagcccacctgaatgaccttg

SEQ ID NO: 93647 - DNA, 468 bp, Artificial Sequence
  derived and/or modified sequence
atggtggacctgacccaggtgatggacgacgaggtgttcatggccttcgcctcctacgctacgatcattttgtctaagatgatgttaatgagcacagcaactgcgttttatcgcctcacccgcaaggttttcgccaatccggaagattgcgtagcctttggcaaaggcgagaatgcaaaaaaatacttacgcactgacgaccgagttgaaagagttaggcgggcccacttgaatgacctggagaatataattcctttcctgggcatcggactgctctattctctcagcggaccagatcctagcacagctatacttcatttcagactctttgtgggagctagaatttaccacacaatagcttatttgacacctttgccacagcccaatcgggctttatctttctttgttggctatggcgtgaccctgtcaatggcctacaggctgctcaaatcaaagctgtacctttag

SEQ ID NO: 93648 - DNA, 468 bp, Artificial Sequence
  derived and/or modified sequence
atggtggacctgacccaggtgatggacgacgaggtgttcatggccttcgccagttacgctacgattatcctgagcaaaatgatgctgatgagcactgcaaccgcattctacaggcttacccgcaaggtgttcgctaaccctgaggattgcgtcgcttttggcaaaggggagaacgccaagaagtatctgcgcactgacgaccgggtagaacgtgttagaagagctcacctgaatgaccttgagaacataatccccttcctgggcatagggctgctctattctctaagtggtccagatccgtcaaccgccatattacattttaggcttttcgtaggcgcacgaatttaccacaccatagcttacctcacacccttgccccagccaaatcgagctttgtcctttttcgtggggtacggagtcacccttagcatggcctaccgtctgctaaaaagcaaactgtacctgtag

SEQ ID NO: 93649 - DNA, 468 bp, Artificial Sequence
  derived and/or modified sequence
atggtggacctgacccaggtgatggacgacgaggtgttcatggccttcgcgagttatgcgactattatccttagcaaaatgatgctgatgagtaccgctactgccttctaccggctcaccaggaaagtgttcgcaaaccccgaggattgcgtggcttttggaaagggtgagaatgccaagaaatacctgcgcacggatgatcgcgtggagcgggtaagacgggctcacttgaacgatctggagaatatcatcccttttctgggaatcggactcctgtacagtttgagcgggcctgacccctccaccgccatattgcatttccgtctgtttgtcggcgcccggatctatcacacaatcgcttacctgacccctctgccgcagccaaatcgggcattgagcttttttgttgggtatggagttaccctgtctatggcctatcgcctgttaaagagtaagttgtatctgtag

SEQ ID NO: 93650 - DNA, 468 bp, Artificial Sequence
  derived and/or modified sequence
atggtggacctgacccaggtgatggacgacgaggtgttcatggccttcgctagctacgcaaccatcattttatcaaaaatgatgctgatgagtacagcgacagccttctaccgtctcacacggaaggtgtttgcaaatccggaagactgtgtggcatttgggaaaggcgagaatgccaagaagtatcttcggactgacgatcgggtggaacgcgttcgaagagctcacctgaacgacctggagaacataattcctttcctgggcatcggtttgctgtactctctctccggcccagacccaagcaccgccatcttacattttaggctgttcgtgggggccaggatttatcacactatcgcttacctgactcccctgcctcagcctaacagagcgctctcctttttcgtggggtacggcgtgactctgtccatggcttaccgactcctcaagagcaaactatacctgtag

SEQ ID NO: 93651 - DNA, 234 bp, Artificial Sequence
  derived and/or modified sequence
atggtggacctgacccaggtgatggacgacgaggtgttcatggccttcgcaagttatgccacgattatcctgtcaaaaatgatgctgatgagtacggccacggccttctaccgtctaacccgaaaggtgttcgccaatccggaagactgtgttgccttcggcaaaggagaaaatgccaagaagtacttgaggaccgatgatcgcgtggagcgcgtccgaagagcacacctgtag

SEQ ID NO: 93652 - DNA, 243 bp, Artificial Sequence
  derived and/or modified sequence
atggtggacctgacccaggtgatggacgacgaggtgttcatggcctttgccagctacgcgaccataatcttgtccaagatgatgctcatgtccactgctacggcattctatcgcttgaccagaaaggtgttcgccaatcccgaagattgcgtcgcattcgggaaaggggagaacgcaaaaaaatacctccgtaccgatgaccgagttgaacgagtgcggagggcccatctcaacgacctttag

SEQ ID NO: 93653 - DNA, 468 bp, Artificial Sequence
  derived and/or modified sequence
atggtcgacctgacccaagtgatggacgacgaggtctttatggcgtttgcctcttacgctacaatcatcctctccaagatgatgctgatgtcaaccgccacggctttttaccggctgacaaggaaggtgtttgccaaccccgaggactgcgttgctttcgggaagggagaaaatgcaaagaaatatctgcggaccgatgatcgagtggaaagagtgcgccgtgcccacctgaacgacctcgaaaacattattccttttctcggtatcggcttgctgtatagtctgtccgggccagatccgtctacagctatcttgcattttaggctatttgtgggcgcacgcatttaccatacgattgcgtatttgactcctctgccacaacccaacagagcgttgagtttcttcgttgggtacggcgtgaccctcagtatggcctataggctgctcaagtctaaactgtatctttag

SEQ ID NO: 93654 - DNA, 468 bp, Artificial Sequence
  derived and/or modified sequence
atggtcgacctgacacaagtgatggacgacgaggtctttatggccttcgcatcatacgcgacaattatactcagcaagatgatgctaatgtcaactgcgactgctttttataggttaactcggaaagtttttgccaacccggaagactgtgtagcatttggcaagggcgagaacgccaagaagtacctccggacagacgatcgtgtcgagcgggtgcggcgtgctcacctgaacgatctcgagaacataattccctttctgggaattggactcctctactcacttagcggtccagaccctagcaccgccatcttacactttaggctttttgttggcgcacgcatttaccatactattgcttatcttacccctctgccgcagcccaacagagccctcagttttttcgtgggatatggcgttactctgtccatggcctatcgactgctgaagtctaagttatatctttag

SEQ ID NO: 93655 - DNA, 468 bp, Artificial Sequence
  derived and/or modified sequence
atggtcgacttgactcaggttatggatgatgaggtgtttatggctttcgccagctacgccacaatcattctgtccaaaatgatgctgatgagcacagccacagcattctacagactcacgagaaaagtcttcgcaaacccggaagactgcgtggctttcggaaaaggtgagaacgccaaaaaatacctccgaactgacgatcgagtggaacgagtgcgcagggctcatttgaacgatctggagaacatcattcctttcctgggtattgggttactgtattcgctgagcggccctgacccgtctactgcaattctgcattttaggctgttcgtgggggcacgcatttaccacaccattgcttacctgacgccactacctcagcccaacagagcccttagcttttttgttgggtacggtgtaacacttagcatggcttataggctgctgaaaagtaaactttatctttag

SEQ ID NO: 93656 - DNA, 468 bp, Artificial Sequence
  derived and/or modified sequence
atggtggacctaacgcaggttatggacgatgaagtcttcatggcatttgcctcctacgctactatcattctctctaagatgatgctgatgtccactgccaccgctttctaccggctgaccagaaaagtgtttgcaaatcccgaggattgtgtggcatttgggaaaggagagaacgccaagaaatatctgaggaccgatgaccgcgtggagcgcgtccgacgggcacacctcaatgatcttgagaatatcataccgtttctcggaatcggattgttatatagtctgagcggcccagacccctctactgccatcctacattttcgactgtttgttggggctcggatctaccacaccatcgcctacctgacaccgctgccccagcccaaccgggctctaagcttctttgtaggatatggcgtgaccctgtcaatggcctaccgacttctcaagagcaagctgtatctttag

SEQ ID NO: 93657 - DNA, 234 bp, Artificial Sequence
  derived and/or modified sequence
atggtcgaccttacgcaggtgatggatgatgaggtttttatggccttcgcttcctacgccacgataattctaagcaaaatgatgctgatgagcactgctactgccttctacagactcactcggaaggtcttcgccaaccccgaagattgcgtggccttcggtaagggcgagaacgccaaaaaatatctgcggaccgacgatagggtagagcgcgtgagaagggcgcatttatag

SEQ ID NO: 93658 - DNA, 243 bp, Artificial Sequence
  derived and/or modified sequence
atggtagacctgacgcaagtaatggatgatgaagttttcatggcttttgctagctacgctaccatcatcctttccaaaatgatgcttatgtccaccgccaccgctttttataggctcactcgaaaagtgtttgccaacccagaagactgcgtggctttcgggaagggagaaaacgcgaagaaatatctgcggactgacgatagagtggaacgagtgaggcgtgcccacctgaatgatctctag

SEQ ID NO: 93659 - DNA, 468 bp, Artificial Sequence
  derived and/or modified sequence
atggtggatctcacccaggttatggacgacgaagttttcatggcgttcgctagttacgccacaatcatcctcagtaaaatgatgctcatgtcaactgccacagccttttatagacttaccaggaaggtctttgccaatcctgaggactgcgtcgcatttgggaaaggagagaatgccaaaaagtaccttcgcactgatgatcgtgttgaaagggtgcgtagagctcacctaaacgatctggaaaatatcattcccttcttgggcatcggcctgctttattcactcagtggaccagatccttcgactgccatcctccactttcgcctcttcgtcggagcaagaatttaccatactattgcctacttgactccattaccacagcctaatcgcgccctctcattttttgtagggtacggagtgaccctgagcatggcatatagactgctgaaatccaaactctacctttag

SEQ ID NO: 93660 - DNA, 468 bp, Artificial Sequence
  derived and/or modified sequence
atggttgacttaacccaggtaatggatgatgaagtatttatggcctttgctagctatgcaaccattatcctgagcaagatgatgctaatgtccacagctacagccttctacagacttaccaggaaagtatttgccaaccccgaggattgtgtggccttcggtaaaggagagaacgcgaagaaatatctgcggactgacgatcgtgtggaacgcgtacggagagcacatcttaatgatttagagaacatcatcccctttctcgggataggccttctgtattcactgagcggtccagatccctcaaccgcaatccttcatttccgattattcgtaggcgcacggatctaccacacaatcgcatacctaactccacttccacagcctaatagagctctgtctttttttgttggatacggtgtaacgctgtccatggcctatcgtttactgaagtccaaactctacctgtag

SEQ ID NO: 93661 - DNA, 468 bp, Artificial Sequence
  derived and/or modified sequence
atggtggacctgacccaggtgatggacgacgaggtgttcatggccttcgccagctacgccaccatcatcctgagcaagatgatgctgatgagcaccgccaccgccttctacagactgaccagaaaggtgttcgccaaccccgaggactgcgtggccttcggcaagggcgagaacgccaagaagtacctgagaaccgacgacagagtggagagagtgagaagagcccacctgaacgacctggagaacatcatccccttcctgggcatcggcctgctgtacagcctgagcggccccgaccccagcaccgccatcctgcacttcagactgttcgtgggcgccagaatctaccacaccatcgcctacctgacccccctgccccagcccaacagagccctgagcttcttcgtgggctacggcgtgaccctgagcatggcctacagactgctgaagagcaagctgtacctgtag

SEQ ID NO: 93662 - DNA, 234 bp, Artificial Sequence
  derived and/or modified sequence
atggtggacctgacccaggtgatggacgacgaggtgttcatggccttcgccagctacgccaccatcatcctgagcaagatgatgctgatgagcaccgccaccgccttctacagactgaccagaaaggtgttcgccaaccccgaggactgcgtggccttcggcaagggcgagaacgccaagaagtacctgagaaccgacgacagagtggagagagtgagaagagcccacctgtag

SEQ ID NO: 93663 - DNA, 243 bp, Artificial Sequence
  derived and/or modified sequence
atggtggacctgacccaggtgatggacgacgaggtgttcatggccttcgccagctacgccaccatcatcctgagcaagatgatgctgatgagcaccgccaccgccttctacagactgaccagaaaggtgttcgccaaccccgaggactgcgtggccttcggcaagggcgagaacgccaagaagtacctgagaaccgacgacagagtggagagagtgagaagagcccacctgaacgacctgtag

SEQ ID NO: 93664 - protein, 449 aa, Artificial Sequence
  derived and/or modified sequence
MEFDCEGLRRLLGKYKFRDLTVEELRNVNVFFPHFKYSMDTYGNTYNIPIRFWILDSHPFAPPICFLKPTANMGILVGKHVDAQGRIYLPYLQNWSHPKSVIVGLIKEMIAKFQEELPMYSLSSSDEARQVDLLAYIAKITEGVSDTNSKSWANHENKTVNKITVVGGGELGIACTLAISAKGIADRLVLLDLSEGTKGATMDLEIFNLPNVEISKDLSASAHSKVVIFTVNSLGSSQSYLDVVQSNVDMFRALVPALGHYSQHSVLLVASQPVEIMTYVTWKLSTFPANRVIGIGCNLDSQRLQYIITNVLKAQTSGKEVWVIGEQGEDKVLTWSGQEEVVSHTSQVQLSNRAMELLRVKGQRSWSVGLSVADMVDSIVNNKKKVHSVSALAKGYYDINSEVFLSLPCILGTNGVSEVIKTTLKEDTVTEKLQSSASSIHSLQQQLKL

SEQ ID NO: 93665 - DNA, 1350 bp, Artificial Sequence
  derived and/or modified sequence
atggagttcgactgcgagggcctgagaagactgctgggcaagtacaagttcagagacctgaccgtggaggagctgagaaacgtgaacgtgttcttcccccacttcaagtacagcatggacacctacggcaacacctacaacatccccatcagattctggatcctggacagccaccccttcgccccccccatctgcttcctgaagcccaccgccaacatgggcatcctggtgggcaagcacgtggacgcccagggcagaatctacctgccctacctgcagaactggagccaccccaagagcgtgatcgtgggcctgatcaaggagatgatcgccaagttccaggaggagctgcccatgtacagcctgagcagcagcgacgaggccagacaggtggacctgctggcctacatcgccaagatcaccgagggcgtgagcgacaccaacagcaagagctgggccaaccacgagaacaagaccgtgaacaagatcaccgtggtgggcggcggcgagctgggcatcgcctgcaccctggccatcagcgccaagggcatcgccgacagactggtgctgctggacctgagcgagggcaccaagggcgccaccatggacctggagatcttcaacctgcccaacgtggagatcagcaaggacctgagcgccagcgcccacagcaaggtggtgatcttcaccgtgaacagcctgggcagcagccagagctacctggacgtggtgcagagcaacgtggacatgttcagagccctggtgcccgccctgggccactacagccagcacagcgtgctgctggtggccagccagcccgtggagatcatgacctacgtgacctggaagctgagcaccttccccgccaacagagtgatcggcatcggctgcaacctggacagccagagactgcagtacatcatcaccaacgtgctgaaggcccagaccagcggcaaggaggtgtgggtgatcggcgagcagggcgaggacaaggtgctgacctggagcggccaggaggaggtggtgagccacaccagccaggtgcagctgagcaacagagccatggagctgctgagagtgaagggccagagaagctggagcgtgggcctgagcgtggccgacatggtggacagcatcgtgaacaacaagaagaaggtgcacagcgtgagcgccctggccaagggctactacgacatcaacagcgaggtgttcctgagcctgccctgcatcctgggcaccaacggcgtgagcgaggtgatcaagaccaccctgaaggaggacaccgtgaccgagaagctgcagagcagcgccagcagcatccacagcctgcagcagcagctgaagctgtag

SEQ ID NO: 93666 - DNA, 1350 bp, Artificial Sequence
  derived and/or modified sequence
atggaattcgattgcgaaggcctgcgccgcctgctagggaaatacaagttcagagatttgaccgtcgaagagttgcggaacgtgaacgtgttttttcctcacttcaaatactcgatggatacctacgggaatacatacaacatccccatcagattttggatcctcgatagccatccattcgctccgcctatctgctttctaaaacccactgccaatatgggcatcctagtcgggaaacatgttgacgcccaggggaggatttatctgccctatttgcagaactggtctcatcctaagagcgtcatcgtgggtctgatcaaggaaatgatagcaaagttccaagaggagctccccatgtactcactttccagtagcgatgaagccagacaagtggatctgctagcctacatcgccaagatcactgagggcgtttcagacacaaatagtaagtcttgggcaaaccatgaaaacaaaactgtgaacaagatcaccgtggtggggggtggcgaactgggcatcgcctgtaccctcgcaatctccgcaaaggggattgcagaccggttggtcctgttggacctaagcgagggaaccaaaggagccactatggatcttgaaatcttcaatttgcctaatgttgaaatttctaaagacctgtcggccagcgctcactcaaaagtcgttatttttaccgtgaactcattgggatccagccagagctatctcgacgttgtgcagtcaaacgtcgacatgtttcgagccctcgtgcccgctctgggacactattctcaacacagcgttctgctggtggcaagccaacctgtggagatcatgacctatgttacatggaaattaagcacatttcccgctaatcgggtaatcggaattggctgtaacctggattcccagcgtctgcagtatatcattaccaatgtgctgaaggctcaaacatcaggcaaagaggtgtgggtgatcggtgagcagggggaagataaggtgctcacatggtccggtcaggaggaggtggtgtcacacaccagccaagtgcaactgagtaaccgtgctatggaactgctgcgagtcaagggccaaagatcatggagcgtggggctttccgtggccgatatggtcgattctatcgtcaacaataaaaaaaaggtgcactcagtgtccgctctcgctaagggatattacgacatcaactcggaggtgttcctctccttaccgtgcatcctggggacaaacggcgtttctgaagtgatcaagaccactttaaaggaggataccgtgacagagaaactacaaagcagcgcaagttccatacactccctgcaacagcaactaaagctctag

SEQ ID NO: 93667 - DNA, 1350 bp, Artificial Sequence
  derived and/or modified sequence
atggagtttgactgtgagggcctgcggcggctgctgggcaagtacaagttccgggacctgactgtggaggagctgagaaatgtgaatgtgttcttcccccacttcaagtacagcatggacacctacggcaacacctacaacatccccatccgcttctggatcctggacagccacccctttgccccacccatctgcttcctgaagcccacagccaacatgggcatcctggtgggcaagcacgtggatgcccagggccgcatctacctgccctacctgcagaactggagccaccccaagagcgtcatcgtgggcctcatcaaggagatgattgccaagttccaggaggagctgcccatgtacagcctgagcagcagtgatgaggcccggcaggtggacctgctggcctacatcgccaagatcacagaaggagtgtctgacaccaacagcaagtcctgggccaaccacgagaacaagacagtgaacaagatcaccgtggtgggcggcggggagctgggcatcgcctgcaccctggccatcagcgccaagggcattgctgaccggctggtgctgctggacctgtctgagggcaccaagggggccaccatggacctggagatcttcaacctgcccaacgtggagatcagcaaggacctgagcgccagcgcccacagcaaggtggtgatcttcaccgtgaacagcctgggcagcagccagagctacctggatgtggtgcagagcaatgtggacatgttccgggccctggtgcctgccctgggccactacagccagcacagcgtgctgctggtggccagccagcctgtggagatcatgacctacgtgacctggaagctgagcaccttccctgccaacagagtgattggaattggctgcaacctggacagccagaggctgcagtacatcatcaccaacgtgctgaaggcccagaccagcggcaaggaggtgtgggtgattggagagcagggcgaggacaaggtgctgacctggagcggccaggaggaggtggtgagccacaccagccaggtgcagctgagcaacagagccatggagctgctgcgggtgaagggccagaggtcctggagcgtgggcctgtctgtggccgacatggtggacagcatcgtgaacaacaagaagaaggtgcacagcgtgtctgccctggccaagggctactatgacatcaacagcgaggtgttcctgagcctgccctgcatcctgggcaccaacggggtgtctgaggtgatcaagaccaccctgaaggaggacacagtgacagagaagctgcagagcagcgccagcagcatccacagcctgcagcagcagctgaagctgtag

SEQ ID NO: 93668 - DNA, 1350 bp, Artificial Sequence
  derived and/or modified sequence
atggagttcgactgcgagggcctgcggcggctgctgggcaagtacaaattccgggacctgacagttgaagagcttcgcaatgtcaacgtcttcttccctcactttaagtatagcatggatacgtacggcaacacatataatattcctataaggttctggattttggattcgcacccttttgccccgcccatctgctttctgaaacccacagcgaatatgggcatcttggtcggcaaacacgtggatgctcagggaaggatatacctgccatatttacagaattggtcccatcctaaaagtgttattgtcggtcttatcaaggaaatgatcgcgaagtttcaggaagaactaccgatgtacagcctgtcctcaagcgatgaagcccgccaggtggacttacttgcctatattgctaagatcacagagggggtatctgacacaaattccaagtcatgggctaaccatgagaataagacggttaacaagataaccgtagttggaggcggtgaactcggaatcgcctgcacccttgcaatctccgcaaaggggatcgccgacaggctggtgctccttgatctatccgagggcaccaaaggagcaaccatggatttagagatctttaacctcccgaatgttgaaatcagcaaagatctgtccgcttccgcccacagcaaagtagtcatttttaccgtgaactcactgggctcaagccagtcctatttggacgtcgtgcagtccaatgtggacatgttccgcgcgctcgtccccgccctgggtcattattcacagcactcagtcctgcttgtggcctcacaacctgtggaaattatgacctacgttacatggaagttatcgacgttcccagctaatcgcgtgattggaattggctgtaacttggactcacagagattgcagtatattatcacaaacgtgcttaaggctcagacatcggggaaagaagtatgggtcataggggagcagggagaggataaggtgttgacgtggtccgggcaggaagaggtggtatcccatacatctcaagtacagttatctaatagggccatggaactcctgagagtgaagggccagagatcatggagcgtaggcctttctgtcgctgacatggtagattctatcgtaaacaataaaaaaaaagtccactctgtctccgctctcgccaagggctactatgacataaatagcgaagttttcctgtccctcccttgcattctgggtaccaacggggtcagcgaggtcatcaagacaaccctgaaggaagacacggttacagagaagctacaaagcagtgcttcctcaattcattcactacaacaacaactcaagctgtag

SEQ ID NO: 93669 - DNA, 1350 bp, Artificial Sequence
  derived and/or modified sequence
atggaatttgattgtgagggacttaggcggctgttagggaagtacaaatttagggatctcaccgtcgaggagttacgaaatgttaacgtgttttttcctcacttcaaatacagtatggatacctacgggaatacctacaacatccctatccgattttggattctagactcacaccctttcgcacctcccatctgctttcttaagcccaccgccaatatgggaatcctagttgggaagcacgtcgatgcgcagggacggatctacttgccgtatctgcaaaactggagccatcccaagtccgtgattgtgggactgattaaggagatgatcgccaagtttcaggaagaattgcctatgtactcactcagctcgagtgatgaggccaggcaggttgacctcttggcatatatcgccaagattaccgagggggtgtccgacacgaattcgaagagctgggctaaccacgagaacaaaactgtcaacaagattaccgtcgtggggggtggggagttgggtatcgcatgcacactggctatctcagctaagggtatcgcagatcgactcgtgttgctcgacctcagcgagggcaccaagggggcaacgatggacctggaaatctttaatctgcctaatgtggagatttctaaggatctctctgcatcagcccactcaaaggtagtaatctttacagtaaattctttggggtcctcccagagctacctcgatgtggtccagagtaatgtggacatgttccgggctctggtgcctgccttggggcattactcgcaacatagcgtgctgctggtcgcctcacagccagtggaaataatgacttatgtgacctggaagctgtcaacgttccccgctaaccgggtgatcgggattggctgtaacctggatagtcaacgactgcagtacatcataaccaatgtgctgaaggcccagacatcaggaaaggaggtctgggtgatcggggaacagggggaagacaaggtgctgacctggagcggtcaggaagaggtcgtgtctcacacgagtcaggtccagctgtccaatcgtgcgatggaactgcttcgagttaaagggcaacgcagctggtctgttggcctgtccgtagcggacatggtcgactctatagttaacaacaagaagaaggtacattccgtcagcgcactagccaaaggttattatgacattaactccgaagtcttcctgagtctgccttgtattttgggaactaatggggtgagcgaggtgatcaagaccaccctgaaggaagacacggttacagagaaactccaatcctctgcctctagtatacatagtctccagcagcagctcaaattgtag

SEQ ID NO: 93670 - DNA, 1848 bp, Artificial Sequence
  derived and/or modified sequence
aagaaggtccgggggctggagtcctgggacctagctcgggaccggcctggagatggagttcgactgcgagggcctgagacggctgcttggcaagtacaagttcagggacctaactgtggaagaactaaggaatgtaaatgtatttttcccacatttcaaatattccatggacacctatggtaatacatataacataccaattcgtttctggattttggattctcaccctttcgctccccctatttgcttcttgaagccaactgcaaatatgggaatcttagtcggaaaacatgtggatgctcaaggcagaatatatttgccctatctccaaaactggagccatcctaaatctgtcattgttggattaattaaagaaatgattgccaagtttcaagaggaacttcccatgtattctctatcatcatctgatgaggcacggcaggtagacttgctagcctatattgcaaaaatcactgaaggtgtttcagatacaaattcaaagagctgggcaaatcatgagaataaaacagtcaataaaattactgtggttggaggtggagaactcggtattgcctgcacattagcaatttcagcaaagggtattgcagacaggcttgtcctcttagacctctcagaagggactaaaggagccacgatggaccttgaaatcttcaaccttcctaatgtggagatcagcaaagatttgtctgcctctgctcattccaaggtggtgatcttcacagtcaactctttgggtagttctcagtcgtaccttgatgtggtacagagcaatgtggatatgttcagagcccttgtcccagctctgggacattatagtcaacacagtgtcctgctcgttgcatctcaaccagtggaaatcatgacctatgtaacatggaaactgagtacatttcctgcaaatcgagtgatcggaattggatgtaatctggattcacagagattacagtatattattacaaatgttttgaaggcacagacttcaggcaaagaagtatgggttattggcgagcaaggagaagacaaagtgctcacatggagtggccaagaagaagtagtgagtcatacctctcaagtgcagctgtccaacagagccatggaactgctaagagtaaaaggtcaaagatcctggtctgttggactatcagtagctgacatggttgacagtattgtaaacaataagaagaaagtgcattctgtatcagctttagcaaagggatattatgatataaatagtgaagtgtttttaagtttgccttgcatccttggaaccaatggagtatctgaagttatcaaaaccacactgaaagaagatacagttactgagaaactccaaagcagtgcatcctcaatccacagtctccaacaacagttaaaactttgattctcaaatgcaatttgagaggctggacttctacctaaagggaaaagtcatttaattttacctatatataggtttgaggatttctgtatcctgctacttacttttacaaactgcttggttaaagtagagggtttcttgattagctttgtgatgtaaatccttaaggagttatacaaggaggggaaaaattaattttatttggggttcttgagatatctatgctgttctttaaatctacagcaggggtaaacattcatctgcagtgtgcatcaatttaaatcatatatcctaaactaaaagcacaattcatacttcgggaatattttataagtaatatatctttaaaagaaaattaccctttgacttttataatcaacataagttccaggcccagtatggatttacaaaatctgtgtcagttgtacattcacaggatccacagctta

SEQ ID NO: 93671 - protein, 248 aa, Artificial Sequence
  derived and/or modified sequence
MDLEIFNLPNVEISKDLSASAHSKVVIFTVNSLGSSQSYLDVVQSNVDMFRALVPALGHYSQHSVLLVASQPVEIMTYVTWKLSTFPANRVIGIGCNLDSQRLQYIITNVLKAQTSGKEVWVIGEQGEDKVLTWSGQEEVVSHTSQVQLSNRAMELLRVKGQRSWSVGLSVADMVDSIVNNKKKVHSVSALAKGYYDINSEVFLSLPCILGTNGVSEVIKTTLKEDTVTEKLQSSASSIHSLQQQLKL

SEQ ID NO: 93672 - protein, 470 aa, Artificial Sequence
  derived and/or modified sequence
MEETIKDPPTSAVLLDHCHFSQVIFNSVEKFYIPGGDVTCHYTFTQHFIPRRKDWIGIFRAFKCFQDKLEQELLKWRSQGQKLQVGWKTTREYYTFMWVTLPIDLNNKSAKQQEVQFKAYYLPKDDEYYQFCYVDEDGVVRGASIPFQFRPENEEDILVVTTQGEVEEIEQHNKELCKENQELKDSCISLQKQNSDMQAELQKKQEELETLQSINKKLELKVKEQKDYWETELLQLKEQNQKMSSENEKMGIRVDQLQAQLSTQEKEMEKLVQGDQDKTEQLEQLKKENDHLFLSLTEQRKDQKKLEQTVEQMKQNETTAMKKQQELMDENFDLSKRLSENEIICNALQRQKERLEGENDLLKRENSRLLSYMGLDFNSLPYQVPTSDEGGARQNPGLAYGNPYSGIQESSSPSPLSIKKCPICKADDICDHTLEQQQMQPLCFNCPICDKIFPATEKQIFEDHVFCHSL

SEQ ID NO: 93673 - DNA, 1413 bp, Artificial Sequence
  derived and/or modified sequence
atggaggagaccatcaaggacccccccaccagcgccgtgctgctggaccactgccacttcagccaggtgatcttcaacagcgtggagaagttctacatccccggcggcgacgtgacctgccactacaccttcacccagcacttcatccccagaagaaaggactggatcggcatcttcagagccttcaagtgcttccaggacaagctggagcaggagctgctgaagtggagaagccagggccagaagctgcaggtgggctggaagaccaccagagagtactacaccttcatgtgggtgaccctgcccatcgacctgaacaacaagagcgccaagcagcaggaggtgcagttcaaggcctactacctgcccaaggacgacgagtactaccagttctgctacgtggacgaggacggcgtggtgagaggcgccagcatccccttccagttcagacccgagaacgaggaggacatcctggtggtgaccacccagggcgaggtggaggagatcgagcagcacaacaaggagctgtgcaaggagaaccaggagctgaaggacagctgcatcagcctgcagaagcagaacagcgacatgcaggccgagctgcagaagaagcaggaggagctggagaccctgcagagcatcaacaagaagctggagctgaaggtgaaggagcagaaggactactgggagaccgagctgctgcagctgaaggagcagaaccagaagatgagcagcgagaacgagaagatgggcatcagagtggaccagctgcaggcccagctgagcacccaggagaaggagatggagaagctggtgcagggcgaccaggacaagaccgagcagctggagcagctgaagaaggagaacgaccacctgttcctgagcctgaccgagcagagaaaggaccagaagaagctggagcagaccgtggagcagatgaagcagaacgagaccaccgccatgaagaagcagcaggagctgatggacgagaacttcgacctgagcaagagactgagcgagaacgagatcatctgcaacgccctgcagagacagaaggagagactggagggcgagaacgacctgctgaagagagagaacagcagactgctgagctacatgggcctggacttcaacagcctgccctaccaggtgcccaccagcgacgagggcggcgccagacagaaccccggcctggcctacggcaacccctacagcggcatccaggagagcagcagccccagccccctgagcatcaagaagtgccccatctgcaaggccgacgacatctgcgaccacaccctggagcagcagcagatgcagcccctgtgcttcaactgccccatctgcgacaagatcttccccgccaccgagaagcagatcttcgaggaccacgtgttctgccacagcctgtag

SEQ ID NO: 93674 - DNA, 1413 bp, Artificial Sequence
  derived and/or modified sequence
atggaagagactatcaaagaccccccaacatccgccgtgctcctggaccactgccactttagtcaggtgatcttcaacagtgttgagaaattctatatccctggcggagacgtcacttgccactatacctttactcagcacttcattccccggaggaaagattggatcggtatcttcagggcctttaagtgttttcaggacaaacttgagcaggaattgcttaagtggcggagtcaggggcagaagctgcaggtgggctggaagacaacaagggagtactatactttcatgtgggtcacgcttccaatcgacctgaacaataagagcgcgaagcaacaggaagtacagttcaaagcttactacctgcctaaagacgacgagtattatcagttttgctatgtggacgaggacggcgtggtgagaggagcttccattcccttccaatttagacctgaaaatgaggaggatatcctggttgtcactacccaaggcgaggttgaggaaattgaacagcacaataaagagctctgcaaagagaatcaggaactgaaggactcttgcatctctttgcagaagcagaattcggacatgcaggctgagctgcagaaaaaacaagaagagctggagactctccagagcataaacaaaaagcttgagctgaaggtgaaagagcagaaggattattgggagacagagctcctgcaactgaaagagcagaatcagaagatgtctagtgagaatgagaaaatgggcatccgcgtggatcagctgcaggctcagctctctacccaggaaaaagagatggagaaactggtgcagggtgatcaagacaagacagagcaactggaacagcttaagaaagaaaacgatcacctgtttctttctctcaccgagcagcgaaaagaccagaagaagctggaacagaccgtggagcagatgaagcagaacgaaactacggcaatgaaaaagcagcaggagctgatggacgagaatttcgacctctctaagagactgagcgaaaatgaaatcatctgcaatgctctacagcgccagaaggaaaggttggagggggaaaatgacctgttaaaacgggagaattctcggttgttatcttatatgggcctggattttaacagcctgccctaccaggtccccacgagcgatgagggtggagcgcgacagaatccaggtttggcctatggcaacccctattcaggtattcaagaaagtagtagcccctcacctctttccattaagaaatgccctatctgcaaggccgacgacatatgtgaccataccctggagcagcagcaaatgcagcccctgtgctttaactgccctatatgcgacaaaatatttcccgcgaccgaaaagcagatttttgaggatcacgttttctgccactctctctag

SEQ ID NO: 93675 - DNA, 1413 bp, Artificial Sequence
  derived and/or modified sequence
atggaggagaccatcaaggacccccccaccagcgctgtgctgctggaccactgccacttcagccaggtgatcttcaacagcgtggagaagttctacatccctggaggagatgtgacctgccactacaccttcacccagcacttcatccccaggaggaaggactggattggcatcttccgggccttcaagtgcttccaggacaagctggagcaggagctgctgaagtggaggagccagggccagaagctgcaggtgggctggaagaccacccgggagtactacaccttcatgtgggtgaccctgcccatcgacctgaacaacaagagcgccaagcagcaggaggtgcagttcaaggcctactacctgcccaaggatgatgagtactaccagttctgctacgtggatgaagatggagtggtgcggggggccagcatccccttccagttccggccagaaaatgaggaggacatcctggtggtgaccacccagggcgaggtggaggagattgagcagcacaacaaggagctgtgcaaggagaaccaggagctgaaggacagctgcatcagcctgcagaagcagaacagcgacatgcaggccgagctgcagaagaagcaggaggagctggagaccctgcagagcatcaacaagaagctggagctgaaggtgaaggagcagaaggactactgggagacagagctgctgcagctgaaggagcagaaccagaagatgagcagtgaaaatgagaagatgggcatccgggtggaccagctgcaggcccagctgagcacccaggagaaggagatggagaagctggtgcagggcgaccaggacaagacagagcagctggagcagctgaagaaggaaaatgaccacctgttcctgagcctgacagagcagaggaaggaccagaagaagctggagcagacagtggagcagatgaagcagaatgagaccacagccatgaagaagcagcaggagctgatggatgagaactttgacctgagcaagaggctgtctgaaaatgagatcatctgcaatgccctgcagaggcagaaggagcggctggagggggagaatgacctgctgaagcgggagaacagccggctgctgagctacatgggcctggacttcaacagcctgccctaccaggtgcccaccagtgatgagggcggggcccggcagaaccctggcctggcctacggcaacccctacagcggcatccaggagagcagcagccccagccccctgagcatcaagaagtgccccatctgcaaggcagatgacatctgtgaccacaccctggagcagcagcagatgcagcccctgtgcttcaactgccccatctgtgacaagatcttccctgccacagagaagcagatctttgaggaccacgtgttctgccacagcctgtag

SEQ ID NO: 93676 - DNA, 1413 bp, Artificial Sequence
  derived and/or modified sequence
atggaggagaccatcaaggacccccccaccagcgccgtgctgctggaccattgtcatttcagccaagttatatttaactctgtggagaaattctacatcccaggcggtgacgtgacttgccactatacattcacccagcatttcattccacgcagaaaggactggataggtatcttccgcgcattcaagtgctttcaagataaattggagcaggaactgttgaagtggaggtcgcaggggcagaaattacaagtgggttggaagacaacacgcgagtactacaccttcatgtgggtaacactgcccatcgacctgaataacaagtccgcgaaacagcaggaagtccagttcaaggcctactatctgccgaaagacgacgagtattatcagttctgttacgtcgacgaggatggcgttgtgcggggcgccagtattcctttccagttccggcctgagaatgaagaggacatcctggtggtcactacacagggcgaggtggaggaaatcgagcagcacaacaaagagctttgcaaagaaaaccaggagctcaaagacagctgtataagcctgcaaaagcagaatagcgacatgcaggcagaattgcagaagaaacaggaggagctcgagacccttcagagtatcaataagaagctggaacttaaagtgaaagaacagaaggactattgggagactgagctgctacagctgaaggaacagaaccagaagatgagttctgagaatgagaaaatgggcattagagtggaccagctgcaggctcagctaagtacacaggagaaggagatggagaaattggtccagggggaccaggacaagactgaacaactggagcagctcaagaaggagaacgatcacttatttctgtcactgaccgagcaacgaaaagaccaaaagaagctcgagcaaacggtggaacagatgaagcagaacgaaactactgcaatgaagaagcagcaggagctcatggatgagaactttgatctgagcaaacgcctgagtgagaacgaaatcatttgcaatgcactccagcggcagaaggagcggctagagggagaaaacgatctcttgaagcgcgagaactctaggctgctgtcttatatgggactggacttcaattctctaccctaccaggtgcccacttcagacgagggcggagctcggcagaaccccggtctggcatatggaaatccctacagtggcattcaggagtccagcagtccttctccgcttagcattaagaaatgtccaatttgtaaggcagatgacatatgcgaccatacactcgaacagcagcagatgcagcccctttgcttcaactgccctatatgcgacaagatcttcccggctacagaaaaacagattttcgaggatcatgtattctgccatagcctctag

SEQ ID NO: 93677 - DNA, 1413 bp, Artificial Sequence
  derived and/or modified sequence
atggaggagacaattaaggatcctccgactagtgctgtgctcctggaccactgtcacttctctcaagttattttcaattccgttgagaaattctacattcctggaggagacgttacctgtcattacacctttacccagcactttatacctagaagaaaggactggatcggtatcttccgggctttcaaatgttttcaggacaagctggagcaggaacttctgaaatggcggagccaaggtcagaagctacaggtgggatggaagacaaccagggaatactacacatttatgtgggtgactctccccattgatctgaataataagagcgcgaagcagcaagaggtacagttcaaggcctactacctcccaaaggatgacgagtattaccagttctgctacgttgacgaggacggcgtcgtgaggggcgcttcgattcctttccagtttcggcctgaaaacgaggaagacattctcgtggtaacaacgcagggggaggtcgaggagattgagcagcacaataaggagctgtgcaaagaaaaccaagagctcaaggactcctgtatcagcttacaaaaacagaacagcgacatgcaggcggaactgcagaaaaaacaggaagaacttgagactctccaaagcattaacaagaagctggaactcaaggttaaagaacaaaaagactactgggagaccgagctgttgcagctcaaggaacagaaccaaaagatgagctccgagaacgaaaaaatggggattcgtgtggaccagctccaggcacagctatcaacccaggaaaaggagatggagaagctcgtccagggagatcaagacaaaacggaacagctggagcagctgaaaaaggagaatgaccacctgtttttgagtctaaccgagcaacgcaaagatcagaaaaagttggagcagaccgtggaacagatgaagcagaacgagacaactgcaatgaagaagcagcaggaactgatggacgaaaactttgatttatccaagaggctgagtgaaaatgaaatcatttgcaacgcccttcagcgccagaaagagcgcctagagggcgagaacgacctcctgaaacgggagaattctaggctgttgagttatatggggctggattttaactctctgccttaccaggtgcccacgagtgatgaagggggtgcgaggcaaaatccgggactggcctatgggaacccttactctggcatccaggagtcctcttcgccatctcctctcagcatcaagaaatgcccaatatgcaaagctgacgatatttgcgatcacactttagagcagcagcaaatgcaaccactgtgcttcaattgtcctatctgcgataagatttttcccgcaaccgagaaacaaatcttcgaagatcacgtgttttgccactcactttag

SEQ ID NO: 93678 - DNA, 1916 bp, Artificial Sequence
  derived and/or modified sequence
cactctgccctgttgctgtcgcgccgctgctggttgctgtccctggacccctaccatggaggagaccatcaaagatccccccacatcagctgtcttgctggatcactgtcatttctctcaggtcatctttaacagtgtggagaagttctacatccctggaggggacgtcacatgtcattataccttcacccagcatttcatccctcgtcgaaaggattggattggcatctttagagcatttaaatgtttccaagacaaattggaacaagaactactcaaatggaggagccaaggacagaaattgcaggtggggtggaagacaacccgtgagtattacaccttcatgtgggttactttgcccattgacctaaacaacaaatcagctaaacagcaggaagtccaattcaaagcttactacctgcccaaggatgatgagtattaccagttctgctatgtggatgaggatggtgtggtccggggagcaagtattcctttccaattccgtccagaaaatgaggaagacatcctggttgttaccactcagggagaggtggaagagattgagcagcacaacaaggagctttgcaaagaaaaccaggagctgaaggacagctgtatcagcctccagaagcagaactcagacatgcaggctgagctccaaaagaagcaggaggagctagaaaccctacagagcatcaataagaagttggaactgaaagtgaaagaacagaaggactattgggagacagagctgcttcaactgaaagaacaaaaccagaagatgtcctcagaaaatgagaagatgggaatcagagtggatcagcttcaggcccagctgtcaactcaagagaaagaaatggagaagcttgttcagggagatcaagataagacagagcagttagagcagctgaaaaaggaaaatgaccacctctttctcagtttaactgaacagaggaaggaccagaagaagctcgagcagacagtggagcaaatgaagcagaatgaaactactgcaatgaagaaacaacaggaattaatggatgaaaactttgacctgtcaaaaagactgagtgagaacgaaattatatgtaatgctctgcagagacagaaagagagattggaaggagaaaatgatcttttgaagagggagaacagcagattgctcagttacatgggtctggattttaattctttgccgtatcaagtacctacttcagatgaaggaggcgcaagacaaaatccaggacttgcctatggaaacccatattctggtatccaagaaagttcttcccccagcccgctctccatcaagaaatgccctatctgcaaagcagatgatatttgtgatcacaccttggagcaacagcagatgcagcccctttgtttcaattgtccaatttgtgacaagatcttcccagctacagagaagcagatctttgaagaccacgtgttctgccactctctctgagtatcccaacctcttggatgtatacagagattttatagaatagaacctatagcttctaccatgagttatatgagtcaagatcctgcctaacctgaaattattagggatttactcagccctgctgccgctaacagtggagttatgtcactgatctgaaggtcactgttaagggcttctgctgccatccttgtgggttgctacctttaagtcgcataactctagctgtatcatcctctcacctgtcattcttctgagggtctcagtacaagggccctgggatggagccaacctgggtattcacaacaggcctgacttgatactaagtgattagttttccaagttgtcccactgccattcaaagtcagcccttgagtgtatttgttctcagtcctaaccctggggccagagattggtccgaggttgagaattccttcctcctcatccttgg

SEQ ID NO: 93679 - protein, 146 aa, Artificial Sequence
  derived and/or modified sequence
MAGCCAALAAFLFEYDTPRIVLIRSRKVGLMNRAVQLLILAYVIGWVFVWEKGYQETDSVVSSVTTKVKGVAVTNTSKLGFRIWDVADYVIPAQEENSLFVMTNVILTMNQTQGLCPEIPDATTVCKSDASCTAGSAGTHSNDLLF

SEQ ID NO: 93680 - protein, 361 aa, Artificial Sequence
  derived and/or modified sequence
MAGCCAALAAFLFEYDTPRIVLIRSRKVGLMNRAVQLLILAYVIGWVFVWEKGYQETDSVVSSVTTKVKGVAVTNTSKLGFRIWDVADYVIPAQEENSLFVMTNVILTMNQTQGLCPEIPDATTVCKSDASCTAGSAGTHSNGVSTGRPAFLKAAENFTLLVKNNIWYPKFNFSKRNILPNITTTYLKSCIYDAKTDPFCPIFRLGKIVENAGHSFQDMAVEGGIMGIQVNWDCNLDRAASLCLPRYSFRRLDTRDVEHNVSPGYNFRFAKYYRDLAGNEQRTLIKAYGIRFDIIVFGKAGKFDIIPTMINIGSGLALLGMATVLCDIIVLYCMKKRLYYREKKYKYVEDYEQGLASELDQ

SEQ ID NO: 93681 - DNA, 1086 bp, Artificial Sequence
  derived and/or modified sequence
atggccggatgttgtgctgctctggccgcttttctgtttgaatatgacacaccgcgaatcgtgctgatacggagccggaaagtcggtctaatgaatcgcgccgtccagctcttaatcctggcctatgtgattggctgggtgtttgtatgggaaaaggggtatcaggagaccgattcagtcgtcagtagtgtgactactaaggtgaaaggagtggccgtcaccaacacctctaaactggggttcaggatctgggacgtggccgactacgtaatccccgcccaggaggagaatagtctcttcgtgatgactaacgtgatcctgacaatgaatcagactcaagggttatgtcccgagattcctgacgcaacgactgtatgcaagtccgacgcctcttgcaccgctggttcagccggcacacattccaacggggtgtctactggtcggccagccttccttaaggccgctgagaacttcaccctgctagttaaaaacaacatttggtaccccaagttcaacttctctaaaagaaatatactcccgaatatcacaactacttacttgaaaagctgtatttatgatgccaagacagaccccttctgccctattttccgccttggtaagattgttgaaaatgctgggcactcgttccaggatatggccgtggagggagggattatgggaatccaggttaattgggactgcaatctagacagggctgccagcctgtgtcttcctaggtattccttcaggcgcctggatacgcgagatgtagaacacaatgtctcccctgggtataacttccgcttcgcaaagtactatcgagatttggcagggaatgaacaaagaaccctgatcaaggcgtacgggatcagatttgacatcatcgtgtttgggaaggccggaaaattcgacatcatcccaactatgattaatattggatctggccttgctttactaggcatggcaacagtgctttgtgacattatcgttctgtattgtatgaaaaaacgactctactatagggagaagaagtataaatacgttgaagattatgaacaggggctggcgagtgaactcgatcagtag

SEQ ID NO: 93682 - DNA, 1086 bp, Artificial Sequence
  derived and/or modified sequence
atggccggctgctgtgccgccctggccgccttcctgtttgaatatgacaccccccgcatcgtgctgatccgcagcaggaaggtgggcctgatgaacagagctgtgcagctgctgatcctggcctacgtgattggctgggtgtttgtgtgggagaagggctaccaggagacagattctgtggtgtcctctgtgaccaccaaggtgaagggcgtggccgtgaccaacaccagcaagctgggcttccgcatctgggatgtggccgactatgtgatcccagcccaggaggagaacagcctgtttgtgatgaccaacgtcatcctgaccatgaaccagacccagggcctgtgcccagagatcccagatgccaccaccgtgtgcaagagtgatgccagctgcacagctggcagcgctggcacccacagcaatggagtgtccacaggccgcccagccttcctgaaggctgctgagaacttcaccctgctggtgaagaacaacatctggtaccccaagttcaacttcagcaagaggaacatcctgcccaacatcaccaccacctacctgaagagctgcatctatgatgccaagacagaccccttctgccccatcttccggctgggcaagatcgtggagaatgccggccacagcttccaggacatggctgtggagggcggcatcatgggcatccaggtgaactgggactgcaacctggacagagctgccagcctgtgcctgccccgctacagcttccggcggctggacaccagagatgtggagcacaacgtgtccccaggctacaacttccgctttgccaagtactacagagacctggccggaaatgagcagaggaccctcatcaaggcctacggcatccgctttgacatcatcgtgtttgggaaggccggcaagtttgacatcatccccaccatgatcaacatcggcagcggcctggccctgctgggcatggccaccgtgctgtgtgacatcatcgtgctgtactgcatgaagaagaggctgtactaccgggagaagaagtacaagtatgtggaggactatgagcagggcctggccagcgagctggaccagtag

SEQ ID NO: 93683 - DNA, 1086 bp, Artificial Sequence
  derived and/or modified sequence
atggccggctgctgcgccgccctggccgccttcctgttcgagtacgacaccccccgcattgtattgatccgcagcagaaaagtgggtttgatgaatagggctgtgcaactgcttattttagcatacgttatcgggtgggtcttcgtctgggagaaagggtatcaggagaccgactcggttgtgtcatccgttaccactaaggtcaaaggagtggcagtgacaaatacctctaagctcgggtttcggatatgggacgttgcggactatgtgattcccgcccaagaagagaactcactatttgttatgacaaatgtgattctcactatgaaccagacacagggattgtgcccagaaattcccgacgctacaacggtctgtaaatccgatgcctcttgcactgctggttccgccggcacgcacagcaacggcgtctcgacaggacgccctgcattcctgaaagctgctgagaatttcactctgctggtgaaaaacaacatttggtacccgaaattcaatttctctaagcggaatatcctgcccaacatcacgactacttacttgaagtcgtgtatttacgatgctaagacagacccattctgtcccatctttaggctcgggaaaatcgtggaaaacgctgggcactccttccaggatatggcagtggaaggcggcatcatgggaatccaggttaactgggattgtaacctggatagagcggcaagcctctgcctgcctcggtactcatttaggcggctagatacccgagacgttgagcacaatgttagccccggctacaatttccggttcgccaaatactatcgtgaccttgccgggaatgagcaaagaaccctgattaaggcttacggaattaggtttgatatcatcgtattcggaaaggctggcaaattcgacattatcccaactatgataaatattggatccggactggccttactgggaatggctacagtgctgtgtgacatcattgtgctttattgtatgaaaaagcggctgtattatcgtgagaagaagtataaatacgtagaagactatgagcaaggacttgcctccgagttggatcagtag

SEQ ID NO: 93684 - DNA, 1086 bp, Artificial Sequence
  derived and/or modified sequence
atggctgggtgttgcgcagcgcttgcagccttcctgtttgagtatgataccccaagaattgtgctaatcagaagccgcaaagtgggccttatgaaccgggctgtacaacttctcatccttgcttatgtaatcggttgggtctttgtgtgggagaaaggttaccaggaaacagactcagtcgtatcgagcgtgaccactaaggttaagggtgtggcggtgaccaacacttcaaaactgggtttccgaatctgggatgtagccgactatgtaatcccagctcaagaggagaattccttatttgtgatgacaaacgtgatattaaccatgaaccagacacagggcctctgtcccgaaattcctgacgccactacagtgtgcaaaagcgatgcctcatgtacagcaggctctgccggaacgcatagtaatggggtcagcacaggtcggccagcgtttctgaaggctgccgagaactttacattacttgttaaaaataatatttggtatcccaagtttaatttcagcaagaggaatatcctgccaaacatcactactacgtatctgaaaagttgtatttatgacgccaagacagatccattctgtccgatcttccgtcttggaaagattgttgaaaacgccggtcattccttccaggacatggcagttgaggggggtattatgggcattcaggttaactgggattgtaatttagacagggctgcctccctgtgcctgccgcgttatagctttcggcgtctcgatactcgtgacgtggagcataacgtctcccccggatacaactttcgatttgccaaatactatcgggatcttgccggtaacgaacagaggaccctgatcaaggcctacgggatccgatttgacattatcgtgtttgggaaggcaggaaaattcgacatcatccctactatgatcaatatcggctccggcctggcactactaggtatggcgaccgttctgtgcgacataatagtcctgtactgtatgaaaaagaggctatactatcgtgaaaagaagtataagtatgtggaggactacgaacaggggttggcgagcgagctcgaccagtag

SEQ ID NO: 93685 - DNA, 986 bp, Artificial Sequence
  derived and/or modified sequence
agaccgactaggggactgggagcgggcggcgcggccatggcgggctgctgcgccgcgctggcggccttcctgttcgagtacgacacgccgcgcatcgtgctcatccgcagccgcaaagtggggctcatgaaccgcgccgtgcaactgctcatcctggcctacgtcatcgggtgggtgtttgtgtgggaaaagggctaccaggaaactgactccgtggtcagctccgttacgaccaaggtcaagggcgtggctgtgaccaacacttctaaacttggattccggatctgggatgtggcggattatgtgataccagctcaggaggaaaactccctcttcgtcatgaccaacgtgatcctcaccatgaaccagacacagggcctgtgccccgagattccagatgcgaccactgtgtgtaaatcagatgccagctgtactgccggctctgccggcacccacagcaacgacctgcttttttaaaggctgcagaaaacttcactcttttggttaagaacaacatctggtatcccaaatttaatttcagcaagaggaatatccttcccaacatcaccactacttacctcaagtcgtgcatttatgatgctaaaacagatcccttctgccccatattccgtcttggcaaaatagtggagaacgcaggacacagtttccaggacatggccgtggagggaggcatcatgggcatccaggtcaactgggactgcaacctggacagagccgcctccctctgcttgcccaggtactccttccgccgcctcgatacacgggacgttgagcacaacgtatctcctggctacaatttcaggtttgccaagtactacagagacctggctggcaacgagcagcgcacgctcatcaaggcctatggcatccgcttcgacatcattgtgtttgggaaggcagggaaatttgacatcatccccactatgatcaacatcggctctggcctggcactgctaggcatggtg

SEQ ID NO: 93686 - DNA, 1084 bp, Artificial Sequence
  derived and/or modified sequence
atggcgggctgctgcgccgcgctggcggccttcctgttcgagtacgacacgccgcgcatcgtgctcatccgcagccgcaaagtggggctcatgaaccgcgccgtgcaactgctcatcctggcctacgtcatcgggtgggtgtttgtgtgggaaaagggctaccaggaaactgactccgtggtcagctccgttacgaccaaggtcaagggcgtggctgtgaccaacacttctaaacttggattccggatctgggatgtggcggattatgtgataccagctcaggaggaaaactccctcttcgtcatgaccaacgtgatcctcaccatgaaccagacacagggcctgtgccccgagattccagatgcgaccactgtgtgtaaatcagatgccagctgtactgccggctctgccggcacccacagcaacggagtctcaacaggcagacctgcttttttaaaggctgcagaaaacttcactcttttggttaagaacaacatctggtatcccaaatttaatttcagcaagaggaatatccttcccaacatcaccactacttacctcaagtcgtgcatttatgatgctaaaacagatcccttctgccccatattccgtcttggcaaaatagtggagaacgcaggacacagtttccaggacatggccgtggagggaggcatcatgggcatccaggtcaactgggactgcaacctggacagagccgcctccctctgcttgcccaggtactccttccgccgcctcgatacacgggacgttgagcacaacgtatctcctggctacaatttcaggtttgccaagtactacagagacctggctggcaacgagcagcgcacgctcatcaaggcctatggcatccgcttcgacatcattgtgtttgggaaggcagggaaatttgacatcatccccactatgatcaacatcggctctggcctggcactgctaggcatggcgaccgtgctgtgtgacatcatagtcctctactgcatgaagaaaagactctactatcgggagaagaaatataaatatgtggaagattacgagcagggtcttgctagtgagctggaccagt

SEQ ID NO: 93687 - DNA, 1086 bp, Artificial Sequence
  derived and/or modified sequence
atggccggctgctgcgccgccctggccgccttcctgttcgagtacgacacccccagaatcgtgctgatcagaagcagaaaggtgggcctgatgaacagagccgtgcagctgctgatcctggcctacgtgatcggctgggtgttcgtgtgggagaagggctaccaggagaccgacagcgtggtgagcagcgtgaccaccaaggtgaagggcgtggccgtgaccaacaccagcaagctgggcttcagaatctgggacgtggccgactacgtgatccccgcccaggaggagaacagcctgttcgtgatgaccaacgtgatcctgaccatgaaccagacccagggcctgtgccccgagatccccgacgccaccaccgtgtgcaagagcgacgccagctgcaccgccggcagcgccggcacccacagcaacggcgtgagcaccggcagacccgccttcctgaaggccgccgagaacttcaccctgctggtgaagaacaacatctggtaccccaagttcaacttcagcaagagaaacatcctgcccaacatcaccaccacctacctgaagagctgcatctacgacgccaagaccgaccccttctgccccatcttcagactgggcaagatcgtggagaacgccggccacagcttccaggacatggccgtggagggcggcatcatgggcatccaggtgaactgggactgcaacctggacagagccgccagcctgtgcctgcccagatacagcttcagaagactggacaccagagacgtggagcacaacgtgagccccggctacaacttcagattcgccaagtactacagagacctggccggcaacgagcagagaaccctgatcaaggcctacggcatcagattcgacatcatcgtgttcggcaaggccggcaagttcgacatcatccccaccatgatcaacatcggcagcggcctggccctgctgggcatggccaccgtgctgtgcgacatcatcgtgctgtactgcatgaagaagagactgtactacagagagaagaagtacaagtacgtggaggactacgagcagggcctggccagcgagctggaccagtag

SEQ ID NO: 93688 - DNA, 441 bp, Artificial Sequence
  derived and/or modified sequence
atggcagggtgctgcgccgcacttgcagcatttttgttcgaatacgatactccccgaatcgtcctcattagatctcggaaggttgggctgatgaatagggccgtccagctgttgatcctggcctacgtgataggctgggtgtttgtgtgggaaaagggttatcaggagactgatagtgtggtcagttctgtaaccaccaaagtcaagggagtcgcagtcaccaatacatctaaattgggatttcggatctgggacgtggcagattatgtgattcctgcccaggaggagaactcacttttcgtgatgaccaacgtgatactaactatgaaccaaacacaaggcttatgccctgaaattccagatgccacaacggtgtgtaagtcagacgcgagctgcaccgccggctccgccggcacccactctaatgacctgctcttttag

SEQ ID NO: 93689 - DNA, 441 bp, Artificial Sequence
  derived and/or modified sequence
atggccggctgctgtgccgccctggccgccttcctgtttgaatatgacaccccccgcatcgtgctgatccgcagcaggaaggtgggcctgatgaacagagctgtgcagctgctgatcctggcctacgtgattggctgggtgtttgtgtgggagaagggctaccaggagacagattctgtggtgtcctctgtgaccaccaaggtgaagggcgtggccgtgaccaacaccagcaagctgggcttccgcatctgggatgtggccgactatgtgatcccagcccaggaggagaacagcctgtttgtgatgaccaacgtcatcctgaccatgaaccagacccagggcctgtgcccagagatcccagatgccaccaccgtgtgcaagagtgatgccagctgcacagctggcagcgctggcacccacagcaatgacctgctcttctag

SEQ ID NO: 93690 - DNA, 441 bp, Artificial Sequence
  derived and/or modified sequence
atggccggctgctgcgccgccctggccgccttcctgttcgagtacgacacgcccaggatagtgctcattcgatctaggaaggttggccttatgaatagggccgtgcagctccttatcctggcatacgtgatcggctgggtctttgtatgggaaaagggctaccaagagactgacagcgtcgtatcgtctgtcacaacaaaggtcaagggagtcgccgttactaatacgtcaaagctgggctttcgaatttgggatgtcgctgattatgtgatacctgcacaggaggaaaatagcctgtttgtgatgaccaatgtcatcttaacgatgaaccaaacacaggggctgtgcccggaaatccctgatgcaacaaccgtttgcaagtctgacgcctcctgcactgccggttcggctgggacgcattctaacgacttgctcttctag

SEQ ID NO: 93691 - DNA, 441 bp, Artificial Sequence
  derived and/or modified sequence
atggctggatgctgtgccgctttggccgctttcttgtttgagtacgacacacctcggatcgtgctcatccgatcgagaaaggtcggcctaatgaacagggctgtgcagctgcttattctggcttacgtgattggatgggtgtttgtctgggaaaaaggttatcaggagacagattctgtcgtctctagcgtaaccaccaaagtgaagggcgtcgcagtaaccaataccagcaagctcggattccgcatctgggacgtggccgattacgtcattcccgcacaggaagaaaatagcctgttcgtgatgactaacgtcattctgacaatgaaccagacacaggggctttgcccggaaattccagatgccactaccgtgtgcaaatccgacgcatcctgtactgcgggaagcgctggaacacactctaatgatctgctgttttag

SEQ ID NO: 93692 - DNA, 441 bp, Artificial Sequence
  derived and/or modified sequence
atggccggctgctgcgccgccctggccgccttcctgttcgagtacgacacccccagaatcgtgctgatcagaagcagaaaggtgggcctgatgaacagagccgtgcagctgctgatcctggcctacgtgatcggctgggtgttcgtgtgggagaagggctaccaggagaccgacagcgtggtgagcagcgtgaccaccaaggtgaagggcgtggccgtgaccaacaccagcaagctgggcttcagaatctgggacgtggccgactacgtgatccccgcccaggaggagaacagcctgttcgtgatgaccaacgtgatcctgaccatgaaccagacccagggcctgtgccccgagatccccgacgccaccaccgtgtgcaagagcgacgccagctgcaccgccggcagcgccggcacccacagcaacgacctgctgttctag

SEQ ID NO: 93693 - protein, 178 aa, Artificial Sequence
  derived and/or modified sequence
MLLILLSVALLALSSAESSSEDVSQEESLFLISGKPEGRRPQGGNQPQRPPPPPGKPQGPPPQGGNQSQGPPPPPGKPEGRPPQGGNQSQGPPPHPGKPERPPPQGGNQSQGKPQGPPQQEGNKPQGPPPPGKPQGPPPAGGNPQQPQAPPAGKPQGPPPPPQGGRPPRPAQGQQPPQ

SEQ ID NO: 93694 - protein, 148 aa, Artificial Sequence
  derived and/or modified sequence
MSVSEIFVELQGFLAAEQDIREEIRKVVQSLEQTAREILTLLQGVHQGAGFQDIPKRCLKAREHFGTVKTHLTSLKTKFPAEQYYRFHEHWRFVLQRLVFLAAFVVYLETETLVTREAVTEILGIEAVCQQRDCWRLLPTPPHLHLHQ

SEQ ID NO: 93695 - DNA, 447 bp, Artificial Sequence
  derived and/or modified sequence
atgagcgtgagcgagatcttcgtggagctgcagggcttcctggccgccgagcaggacatcagagaggagatcagaaaggtggtgcagagcctggagcagaccgccagagagatcctgaccctgctgcagggcgtgcaccagggcgccggcttccaggacatccccaagagatgcctgaaggccagagagcacttcggcaccgtgaagacccacctgaccagcctgaagaccaagttccccgccgagcagtactacagattccacgagcactggagattcgtgctgcagagactggtgttcctggccgccttcgtggtgtacctggagaccgagaccctggtgaccagagaggccgtgaccgagatcctgggcatcgaggccgtgtgccagcagagagactgctggagactgctgcccacccccccccacctgcacctgcaccagtag

SEQ ID NO: 93696 - DNA, 447 bp, Artificial Sequence
  derived and/or modified sequence
atgtcggtgtcggagatcttcgttgagctacagggatttcttgctgccgaacaggatatccgggaagagattagaaaggtggtgcaatccttggaacagacggcaagagagattctcaccctcctgcagggggttcaccaaggggccggctttcaggacatccctaaacgatgcttgaaggcccgggaacatttcggaaccgttaagacacacctcacatcgctgaaaacaaagtttcccgccgagcaatactatcgattccatgaacactggaggtttgtcctgcagcgactggtgttcttggctgcttttgtggtgtatttggagactgagaccctggtaacacgcgaagccgtcaccgagatactaggtattgaggcggtgtgtcaacagagagattgttggcggttgctacctactccgcctcatctccacctgcatcagtag

SEQ ID NO: 93697 - DNA, 447 bp, Artificial Sequence
  derived and/or modified sequence
atgtctgtgtctgagatctttgtggagctgcagggcttcctggccgctgagcaggacatccgggaggagatcaggaaggtggtgcagagcctggagcagacagcccgggagatcctgaccctgctgcagggcgtgcaccagggcgccggcttccaggacatccccaagcgctgcctgaaggcccgggagcactttggaacagtgaagacccacctgaccagcctgaagaccaagtttcctgctgagcagtactaccgcttccacgagcactggaggtttgtgctgcagaggctggtgttcctggccgcctttgtggtgtacctggagacagagaccctggtgacccgggaggccgtgacagagatcctgggcattgaagctgtgtgccagcagagggactgctggaggctgctgcccaccccaccccacctgcacctgcaccagtag

SEQ ID NO: 93698 - DNA, 447 bp, Artificial Sequence
  derived and/or modified sequence
atgagcgtgagcgagatcttcgtggagctgcagggcttcctggccgccgagcaagatatccgggaggagattcgcaaagtggtgcagtcactggagcaaactgctcgtgagattttgacactgctgcagggggtccatcaaggtgccggtttccaggacattcctaagaggtgcttgaaagcgcgggaacattttgggaccgtgaagacacacctgacatcactgaagactaaattccccgccgagcagtactacaggttccacgaacactggcgattcgtcctccagaggctggtctttttggccgccttcgtagtttacctggagaccgagaccttggtgacccgggaagctgtgaccgagattctaggtatagaagccgtgtgtcagcaacgtgattgttggcgtctgctgcccaccccacctcatctccatcttcatcagtag

SEQ ID NO: 93699 - DNA, 447 bp, Artificial Sequence
  derived and/or modified sequence
atgagtgtgtccgagatctttgtcgagcttcagggcttcttggccgctgagcaggacatccgtgaagagattcgtaaggttgttcagtcactcgaacagacagctcgcgagattctgacgttgctgcagggcgtccaccagggcgctggcttccaggacatcccaaagcgatgcctcaaagcccgtgagcactttgggaccgtcaaaacccacctcacatcactaaaaacaaaattccccgctgagcagtattatcgattccatgagcactggcggttcgtgctgcagcgcttggtctttcttgctgcttttgtggtttatctagaaacagaaacgttggttactcgggaggcggtgaccgaaattcttggcatagaggccgtgtgccaacagcgggactgttggagactacttccaaccccaccccacctccacctgcaccagtag

SEQ ID NO: 93700 - protein, 2037 aa, Artificial Sequence
  derived and/or modified sequence
MLEAIDKNRALHAAERLQTKLRERGDVANEDKLSLLKSVLQSPLFSQILSLQTSVQQLKDQVNIATSATSNIEYAHVPHLSPAVIPTLQNESFLLSPNNGNLEALTGPGIPHINGKPACDEFDQLIKNMAQGRHVEVFELLKPPSGGLGFSVVGLRSENRGELGIFVQEIQEGSVAHRDGRLKETDQILAINGQALDQTITHQQAISILQKAKDTVQLVIARGSLPQLVSPIVSRSPSAASTISAHSNPVHWQHMETIELVNDGSGLGFGIIGGKATGVIVKTILPGGVADQHGRLCSGDHILKIGDTDLAGMSSEQVAQVLRQCGNRVKLMIARGAIEERTAPTALGITLSSSPTSTPELRVDASTQKGEESETFDVELTKNVQGLGITIAGYIGDKKLEPSGIFVKSITKSSAVEHDGRIQIGDQIIAVDGTNLQGFTNQQAVEVLRHTGQTVLLTLMRRGMKQEAELMSREDVTKDADLSPVNASIIKENYEKDEDFLSSTRNTNILPTEEEGYPLLSAEIEEIEDAQKQEAALLTKWQRIMGINYEIVVAHVSKFSENSGLGISLEATVGHHFIRSVLPEGPVGHSGKLFSGDELLEVNGITLLGENHQDVVNILKELPIEVTMVCCRRTVPPTTQSELDSLDLCDIELTEKPHVDLGEFIGSSETEDPVLAMTDAGQSTEEVQAPLAMWEAGIQHIELEKGSKGLGFSILDYQDPIDPASTVIIIRSLVPGGIAEKDGRLLPGDRLMFVNDVNLENSSLEEAVEALKGAPSGTVRIGVAKPLPLSPEEGYVSAKEDSFLYPPHSCEEAGLADKPLFRADLALVGTNDADLVDESTFESPYSPENDSIYSTQASILSLHGSSCGDGLNYGSSLPSSPPKDVIENSCDPVLDLHMSLEELYTQNLLQRQDENTPSVDISMGPASGFTINDYTPANAIEQQYECENTIVWTESHLPSEVISSAELPSVLPDSAGKGSEYLLEQSSLACNAECVMLQNVSKESFERTINIAKGNSSLGMTVSANKDGLGMIVRSIIHGGAISRDGRIAIGDCILSINEESTISVTNAQARAMLRRHSLIGPDIKITYVPAEHLEEFKISLGQQSGRVMALDIFSSYTGRDIPELPEREEGEGEESELQNTAYSNWNQPRRVELWREPSKSLGISIVGGRGMGSRLSNGEVMRGIFIKHVLEDSPAGKNGTLKPGDRIVEVDGMDLRDASHEQAVEAIRKAGNPVVFMVQSIINRPRAPSQSESEPEKAPLCSVPPPPPSAFAEMGSDHTQSSASKISQDVDKEDEFGYSWKNIRERYGTLTGELHMIELEKGHSGLGLSLAGNKDRSRMSVFIVGIDPNGAAGKDGRLQIADELLEINGQILYGRSHQNASSIIKCAPSKVKIIFIRNKDAVNQMAVCPGNAVEPLPSNSENLQNKETEPTVTTSDAAVDLSSFKNVQHLELPKDQGGLGIAISEEDTLSGVIIKSLTEHGVAATDGRLKVGDQILAVDDEIVVGYPIEKFISLLKTAKMTVKLTIHAENPDSQAVPSAAGAASGEKKNSSQSLMVPQSGSPEPESIRNTSRSSTPAIFASDPATCPIIPGCETTIEISKGRTGLGLSIVGGSDTLLGAIIIHEVYEEGAACKDGRLWAGDQILEVNGIDLRKATHDEAINVLRQTPQRVRLTLYRDEAPYKEEEVCDTLTIELQKKPGKGLGLSIVGKRNDTGVFVSDIVKGGIADADGRLMQGDQILMVNGEDVRNATQEAVAALLKCSLGTVTLEVGRIKAGPFHSERRPSQSSQVSEGSLSSFTFPLSGSSTSESLESSSKKNALASEIQGLRTVEMKKGPTDSLGISIAGGVGSPLGDVPIFIAMMHPTGVAAQTQKLRVGDRIVTICGTSTEGMTHTQAVNLLKNASGSIEMQVVAGGDVSVVTGHQQEPASSSLSFTGLTSSSIFQDDLGPPQCKSITLERGPDGLGFSIVGGYGSPHGDLPIYVKTVFAKGAASEDGRLKRGDQIIAVNGQSLEGVTHEEAVAILKRTKGTVTLMVLS

SEQ ID NO: 93701 - DNA, 6114 bp, Artificial Sequence
  derived and/or modified sequence
atgctcgaggccatcgataaaaatagagccttgcatgctgccgaacggctgcaaaccaagttacgcgaaagaggagacgtggctaacgaagacaagctgagcctgctgaaatccgtgctgcagagccctctattcagccagattctgtccctccagacgagtgtgcagcagctgaaggatcaggtcaacattgccacaagtgctacgagtaacatcgagtatgcacacgtgcctcacctgagcccagccgtcattccaaccctgcagaatgaatccttcctgctgagtcctaacaacggtaacttggaggctctcacggggcccggcatcccacatatcaacggcaaacccgcgtgtgatgagtttgatcagctgattaaaaacatggcacaaggacggcacgtggaagtgtttgaattgcttaaacctccctccggcggtcttggtttcagcgtagtgggtctgagatctgagaaccgtggggagctcggaatctttgttcaggaaatccaggaggggtccgtggcacatagggacggacggttgaaagaaaccgaccaaatcttggccatcaatggccaagcattggaccagactatcactcatcagcaggcaatttcaattttacagaaggcaaaagatacagtacagctggtcatcgcaaggggatcactcccccagcttgtctcaccgatcgtgagcaggagcccatctgcggcttcgacaataagcgcccacagcaaccctgtgcattggcaacacatggagacaatcgaactggtgaacgatggaagtgggctgggatttggcattatcggggggaaagcaaccggcgtcatagttaaaaccatacttcctgggggggtggccgaccagcatggccgcctgtgttccggggatcacattctcaaaattggggacacagacttagcaggcatgagctcggagcaggtagctcaggtgctccggcagtgtggcaatagagtgaaactgatgatagcccgtggtgcgatcgaggagcggacagcgcctacggccctggggataacactgtcttcatcaccaacctctacacccgaattacgtgtcgacgcttccactcagaaaggcgaagagagcgagacttttgatgtagaattgaccaagaatgtgcaaggcttgggcatcaccatcgctggatacatcggggacaagaaactcgaaccctctgggattttcgtaaagtctataaccaagagctctgcagtggagcacgatgggagaattcagatcggcgaccagattatcgcagtcgacgggacaaacctacagggcttcacaaatcagcaggcagtcgaagtgctacggcacaccggccagacagtactactaacattaatgcggcggggaatgaagcaggaggccgagcttatgagcagagaagacgtgactaaggacgcagatctctcaccagtgaacgcatccataattaaggagaactacgagaaggacgaagacttcctaagctccacacggaatacaaatatccttccgaccgaggaggaggggtaccccttactgagtgcagaaattgaggaaattgaggacgcccagaaacaggaagcagctttgcttactaagtggcagaggattatggggattaattacgaaattgtcgtcgcccacgtctcaaaattcagcgagaattccggcctgggcatatcccttgaggcaacagtcggacaccatttcatcaggagcgtcctaccagagggaccagttgggcattcaggcaaattattcagcggcgacgagttgcttgaagtcaatggtatcacactgctgggtgagaatcatcaggatgtcgtcaacatcctgaaggaactgcccatcgaggtgaccatggtctgctgtagacgcactgtacccccaacaacccagtccgaacttgacagtttggacctttgtgatatagagttaacagaaaaaccccacgtggacctcggagagtttatcggaagcagcgagaccgaggacccagttctggctatgacagacgcagggcaaagcacagaggaggtccaggctccattagccatgtgggaggctggcatccagcacatagagcttgaaaagggatccaagggcctgggcttttccatactcgattatcaggacccaattgacccggcctcaactgtgatcatcattcgctctttggtgcccggtgggattgctgaaaaagacgggcgactgctgcccggtgatagactgatgtttgtgaacgacgttaatctggaaaattcgtctctcgaggaggcggtggaggccctcaagggtgcacctagtgggacagtccgaattggagtggccaagcctctgccccttagtcccgaggaggggtatgtgtcagccaaggaggacagcttcctttacccaccccatagctgcgaggaggctgggctggccgacaaacctctgttccgagcggacctcgccctggtggggactaacgacgccgatttggtggacgagtccactttcgagtcaccctactctcccgaaaacgactctatttactccacgcaggcgagcatcctcagcctgcacggatccagttgcggtgacggactgaactatggaagctcacttccctcttctcctccaaaagacgtaatcgaaaactcatgcgatcctgtcttggacctgcatatgtcattagaggaactgtatacacaaaacctattgcagaggcaggatgaaaacactccttccgttgatatttctatggggcctgcgagcgggtttaccataaacgactacacccccgctaacgctatcgaacagcagtatgagtgcgaaaacaccatcgtgtggaccgagtcacacctcccctccgaagtaattagcagcgccgagcttccttcagtgctgcccgatagcgccggaaagggcagcgaatacttgctggaacagtcctcactcgcctgtaatgctgagtgtgtaatgctgcaaaatgtgagcaaagagagtttcgagcggaccattaacatagcgaagggaaattcatcactgggaatgacagtctctgccaataaagacggactgggcatgattgtgaggagcatcattcacgggggggcaatctcacgggacggacgcatcgccatcggagactgcatactgtcaatcaacgaggaaagcaccatatctgtgacgaatgcgcaagccagagctatgttgcgacggcacagcctcataggacccgacatcaaaatcacatacgtgcctgctgagcatctggaagagtttaagatttctttaggtcagcaatcaggcagggttatggctctggacatcttctcttcttatactgggagagacatcccggagctacccgaacgagaagagggtgagggcgaggagagcgagctgcagaacacagcatacagtaattggaatcagccacgcagggtggagttgtggcgtgagccttcaaagtctctcggtatctctattgtgggcggaaggggcatgggcagccggttgtcaaatggggaggtgatgcgcggtatctttataaagcacgtgctggaggactcccctgcgggcaaaaacggcaccctgaaacctggggatcggatcgtagaagtggatggaatggacctgagggatgcttctcatgagcaggcagtagaggccattcggaaagctggcaacccagtagtgtttatggttcagagcattattaatagacccagggccccatcccagtccgagagcgagccagaaaaagcacctctctgctcggtaccccctcctcccccaagcgcttttgctgaaatgggtagtgaccacacccagtccagcgctagtaagattagccaggacgtcgataaagaagacgagttcggatattcttggaagaatatacgagaacgatacggtactctcactggcgagctgcacatgatcgagctggaaaaggggcacagtggtttagggctcagcttagcaggtaataaggaccgctctcgtatgagtgtgttcattgttgggatcgatcctaacggtgcggctggcaaggatggacggctgcagattgccgacgagttgctggaaatcaatgggcagatcttatacggccgaagtcaccaaaacgctagctctattataaagtgcgcgccatctaaagtgaaaataatcttcatccggaataaagatgccgtcaaccagatggcagtgtgtcccggtaatgcagtggaaccactgcccagtaactccgagaatctccagaataaggaaacagaaccaaccgtgactacatcagacgccgcagtggacttgagctcctttaaaaacgtgcagcatctggagttgcctaaggaccagggagggctgggcattgccatctctgaagaggatactctcagcggtgtgatcataaagtcactgacagaacacggggtggctgccaccgatggaagattgaaggtgggagaccagattctggcagtggatgatgagattgtggtcgggtaccctatagagaagtttatctccctcctgaaaacagcaaaaatgactgtcaagctcacaatccacgcggagaatcctgactcccaggcagtgcctagcgccgccggtgccgcctcaggggaaaagaaaaacagcagtcaatccctgatggttccacagtccggaagtccggaacccgagtctatcaggaatactagcagatcaagcacacctgcaatctttgcctctgaccccgccacctgcccaatcatacccggctgcgaaaccacaatcgagattagcaagggaaggaccggtctcggcctctccatagtggggggctccgacaccttactgggagcgattatcattcacgaggtctatgaagaaggagccgcatgcaaggacggacggctctgggccggcgaccaaatccttgaggtcaatggcatcgatctgaggaaagcgacgcacgatgaggctatcaacgtattaaggcagacaccgcagcgcgtccgcttaacactgtatagggacgaggccccctacaaggaggaggaggtatgcgacacactaaccattgagctgcagaaaaagcctggaaagggccttggactgtcgattgtggggaagaggaacgacaccggggtctttgtgtctgacatcgttaagggtggaatcgccgatgctgacggtagattgatgcaaggggatcaaatcctgatggtgaatggcgaggatgtcaggaatgccactcaggaggctgtggcggcgctcttgaagtgcagcctcggcaccgtgaccctggaggttggcaggatcaaagccggaccttttcattccgagaggaggccaagtcagtccagccaggtgtcagaggggtccctgtcctcattcaccttcccccttagtggatcttctacctccgaaagcctggagtcatcgagcaagaaaaacgccttggcctccgagatacaaggactgcggacggtagagatgaagaagggtcctacagactctctgggtatctcaatcgctggcggggttggctcccccctgggggacgtgccaatcttcatcgcaatgatgcatccaactggggtggctgcacagacacagaagctcagggttggtgaccggatcgttacaatctgcggaacttccactgagggaatgactcacacccaggccgtcaacctgctgaagaacgcctctggtagtattgaaatgcaagtggtagccggaggtgacgtcagtgtggtgaccggccaccaacaggaaccggcctctagctctctgagctttacaggactcacctcctctagtatctttcaagatgatcttgggccaccacagtgtaagtctattacactcgagcgcggccccgatggccttgggttcagcatcgtgggagggtatggatccccccacggtgacctcccaatatacgtcaagaccgtgtttgccaagggagcggcctctgaagatggtcgtcttaagcgcggcgaccagattatagcagtgaatggacagtctttggaaggtgtgacccacgaagaggccgtcgctatcttaaaacgcaccaagggtacagttaccctcatggtgctgagctag

SEQ ID NO: 93702 - DNA, 6114 bp, Artificial Sequence
  derived and/or modified sequence
atgctggaggccatcgacaagaacagagccctgcatgctgctgagcggctgcagaccaagctgcgggagagaggagatgtggccaatgaagacaagctgagcctgctgaagtctgtgctgcagagccccctcttcagccagatcctgagcctgcagacctctgtgcagcagctgaaggaccaggtgaacatcgccaccagcgccaccagcaacatcgagtatgcccacgtgccccacctgagccctgctgtgatccccaccctgcagaatgaaagcttcctgctgagccccaacaatggaaacctggaggccctgaccggccctggcatcccccacatcaacgggaagccagcctgtgatgaatttgaccagctgatcaagaacatggcccagggccgccacgtggaggtgtttgagctgctgaagcccccatctgggggcctgggcttctctgtggtgggcctgcggtctgagaacagaggagagctgggcatctttgtgcaggagatccaggagggctctgtggcccacagagatggccgcctgaaggagacagaccagatcctggccatcaatggccaggccctggaccagaccatcacccaccagcaggccatcagcatcctgcagaaggccaaggacacagtgcagctggtgattgcccggggcagcctgccccagctggtgagccccatcgtgagccgcagccccagcgctgccagcaccatcagcgcccacagcaaccctgtgcactggcagcacatggagaccatcgagctggtgaatgatggcagcggcctgggcttcggcatcatcggcggcaaggccactggagtcatcgtgaagaccatcctgcccggcggcgtggccgaccagcacggccgcctgtgcagcggggaccacatcctgaagattggagacacagacctggccggcatgagcagcgagcaggtggcccaggtgctgcggcagtgtggcaacagagtgaagctgatgattgcccggggggccatcgaggagaggacagcccccacagccctgggcatcaccctgagcagcagccccaccagcaccccagagctgcgggtggatgccagcacccagaagggggaggagagcgagacctttgatgtggagctgaccaagaatgtgcagggcctgggcatcaccatcgccggctacatcggggacaagaagctggagcccagcggcatctttgtgaagagcatcaccaagagcagcgctgtggagcatgatggccgcatccagatcggggaccagatcatcgctgtggatggcaccaacctgcagggcttcaccaaccagcaggccgtggaggtgctgcggcacacaggccagacagtgctgctgaccctgatgagaagaggcatgaagcaggaggccgagctgatgagccgggaggatgtgaccaaggatgctgacctgagccctgtgaatgccagcatcatcaaggagaactatgagaaggatgaggacttcctgagcagcaccaggaacaccaacatcctgcccacagaggaggagggctaccccctgctgtctgctgagattgaggagattgaagatgcccagaagcaggaggccgccctgctgaccaagtggcagaggatcatgggcatcaactatgaaattgtggtggcccacgtgtccaagttctctgaaaattctggcctgggcatcagcctggaggccaccgtgggccaccacttcatccgctctgtgctgcctgagggccctgtgggccacagcggcaagctgttctctggagatgagctgctggaggtgaatggcatcaccctgctgggggagaaccaccaggatgtggtgaacatcctgaaggagctgcccatcgaggtgaccatggtgtgctgcagaagaacagtgccccccaccacccagagcgagctggacagcctggacctgtgtgacatcgagctgacagagaagccccacgtggacctgggggagttcatcggcagcagcgagacagaagatcctgtgctggccatgacagatgctggccagagcacagaggaggtgcaggcccccctggccatgtgggaggccggcatccagcacatcgagctggagaagggcagcaagggcctgggcttcagcatcctggactaccaggaccccattgatcctgccagcaccgtcatcatcatccgcagcctggtgcctgggggcattgctgagaaggatggccgcctgctgcccggggaccggctgatgtttgtgaatgatgtgaacctggagaacagcagcctggaggaggccgtggaggccctgaagggggcccccagcggcaccgtgagaattggagtggccaagcccctgcccctgagccctgaggagggctacgtgtctgccaaggaggacagcttcctgtacccaccccacagctgtgaggaggccggcctggccgacaagcccctcttccgggctgacctggccctggtgggcaccaatgatgctgacctggtggatgagagcacctttgagagcccctacagcccagaaaatgacagcatctacagcacccaggccagcatcctgagcctgcacggcagcagctgtggagatggcctgaactacggcagcagcctgcccagcagcccccccaaggatgtgattgagaacagctgtgaccctgtgctggacctgcacatgagcctggaggagctgtacacccagaacctgctgcagaggcaggatgagaacacccccagcgtggacatctccatgggccctgccagcggcttcaccatcaatgactacaccccagccaatgccatcgagcagcagtatgaatgtgagaacaccatcgtgtggacagagagccacctgcccagcgaggtgatcagcagcgctgagctgcccagcgtgctgcctgacagcgctggaaaaggaagtgagtacctgctggagcagagcagcctggcctgcaatgcagaatgtgtgatgctgcagaatgtgtccaaggagagctttgagaggaccatcaacatcgccaagggcaacagcagcctgggcatgacagtgtctgccaacaaggatggcctgggcatgattgtgcgcagcatcatccacggcggggccatcagcagagatggccgcatcgccatcggggactgcatcctgagcatcaatgaggagagcaccatctctgtgaccaatgcccaggcccgggccatgctgcggcggcacagcctcatcggccctgacatcaagatcacctacgtgcctgctgagcacctggaggagttcaagatcagcctgggccagcagagcggccgggtgatggccctggacatcttcagcagctacacaggccgggacatccctgagctgcctgagcgggaggagggggagggggaggagagcgagctgcagaacacagcctacagcaactggaaccagccccggcgggtggagctgtggagggagcccagcaagagcctgggcatcagcatcgtgggcggccggggcatgggcagccggctgagcaatggagaggtgatgaggggcatcttcatcaagcacgtgctggaggacagccctgctgggaagaatggcaccctgaagccaggggaccgcatcgtggaggtggatggcatggacctgagagatgccagccatgagcaggccgtggaggccatcaggaaggccggcaaccctgtggtgttcatggtgcagagcatcatcaaccggccccgggcccccagccagagcgagagcgagcctgagaaggcccccctgtgcagcgtgcccccacctccacccagcgcctttgctgagatgggcagtgaccacacccagagcagcgccagcaagatcagccaggatgtggacaaggaggatgaatttggctacagctggaagaacatccgggagagatatggcaccctgaccggggagctgcacatgattgagctggagaagggccacagcggcctgggcctgagcctggccggcaacaaggacaggagcaggatgtctgtgttcatcgtgggcatcgaccccaacggggctgctgggaaggatggccgcctgcagattgctgatgagctgctggagatcaatggccagatcctgtatggccgcagccaccagaatgccagcagcatcatcaagtgtgcccccagcaaggtgaagatcatcttcatccggaacaaggatgctgtgaaccagatggctgtgtgccctggaaatgctgtggagcccctgcccagcaacagcgagaacctgcagaacaaggagacagagcccaccgtgaccaccagtgatgctgctgtggacctgagcagcttcaagaatgtgcagcacctggagctgcccaaggaccagggcggcctgggcatcgccatcagcgaggaggacaccctgtctggagtcatcatcaagagcctgacagaacatggagtggccgccacagatggccgcctgaaggtgggggaccagatcctggccgtggatgatgaaattgtggtgggctaccccatcgagaagttcatcagcctgctgaagacagccaagatgacagtgaagctgaccatccatgctgagaacccagacagccaggccgtgcccagcgctgctggagctgccagcggggagaagaagaacagcagccagagcctgatggtgccccagagcggcagccctgagcctgagagcatccggaacaccagccgcagcagcaccccagccatctttgccagtgaccctgccacctgccccatcatccctggctgtgagaccaccatcgagatcagcaaaggaagaacaggcctgggcctgagcatcgtgggcggcagtgacaccctgctgggcgccatcatcatccacgaggtgtatgaggagggcgccgcctgcaaggatggccgcctgtgggccggggaccagatcctggaggtgaatggcatcgacctgaggaaggccacccatgatgaggccatcaacgtgctgcggcagaccccccagagggtgcggctgaccctgtacagagatgaggccccctacaaggaggaggaggtgtgtgacaccctgaccatcgagctgcagaagaagccaggcaagggcctgggcctgagcatcgtgggcaagagaaatgacaccggggtgtttgtgtctgacatcgtgaagggcggcattgctgatgctgatggccgcctgatgcagggcgaccagatcctgatggtgaatggagaagatgtgagaaatgccacccaggaggccgtggccgccctgctgaagtgcagcctgggcaccgtgaccctggaggtgggccgcatcaaggccggccccttccacagcgagcggcggcccagccagagcagccaggtgtctgagggcagcctgagcagcttcaccttccccctgagcggcagcagcaccagcgagagcctggagagcagcagcaagaagaatgccctggccagcgagatccagggcctgaggacagtggagatgaagaagggccccacagacagcctgggcatcagcattgctggaggagtgggcagccccctgggagatgtgcccatcttcatcgccatgatgcaccccactggagtggccgcccagacccagaagctgcgggtgggggaccgcatcgtgaccatctgtggcaccagcacagagggcatgacccacacccaggccgtgaacctgctgaagaatgccagcggcagcattgagatgcaggtggtggccggaggagatgtgtctgtggtgacaggccaccagcaggagcccgccagcagcagcctgtccttcaccggcctgaccagcagcagcatcttccaggatgacctgggccccccccagtgcaagagcatcaccctggagcggggcccagatggcctgggcttcagcatcgtgggcggctacggcagcccccacggggacctgcccatctacgtgaagacagtgtttgccaagggagctgcctctgaagatggccgcctgaagagaggagaccagatcatcgctgtgaatggccagagcctggagggcgtgacccatgaggaggccgtggccatcctgaagaggaccaagggcaccgtgaccctgatggtgctgtcctag

SEQ ID NO: 93703 - DNA, 2303 bp, Artificial Sequence
  derived and/or modified sequence
aataaagatgcagtgaatcagatggccgtatgtcctggaaatgcagtagaacctttgccttctaactcagaaaatcttcaaaataaggagacagagccaactgttactacttctgatgcagctgtggacctcagttcatttaaaaatgtgcaacatctggagcttcccaaggatcaggggggtttgggtattgctatcagcgaagaagatacactcagtggagtcatcataaagagcttaacagagcatggggtagcagccacggatggacgactcaaagtcggagatcagatactggctgtagatgatgaaattgttgttggttaccctattgaaaagtttattagccttctgaagacagcaaagatgacagtaaaacttaccatccatgctgagaatccagattcccaggctgttccttcagcagctggtgcagccagtggagaaaaaaagaacagctcccagtctctgatggtcccacagtctggctccccagaaccggagtccatccgaaatacaagcagatcatcaacaccagcaatttttgcttctgatcctgcaacctgccccattatccctggctgcgaaacaaccatcgagatttccaaagggcgaacagggctgggcctgagcatcgttgggggttcagacacgctgctggtgaatggaattgacttgagaaaggccacacatgatgaagcaatcaatgtcctgagacagacgccacagagagtgcgcctgacactctacagagatgaggccccatacaaagaggaggaagtgtgtgacaccctcactattgagctgcagaagaagccgggaaaaggcctaggattaagtattgttggtaaaagaaacgatactggagtatttgtgtcagacattgtcaaaggaggaattgcagatgccgatggaagactgatgcagggagaccagatattaatggtgaatggggaagacgttcgtaatgccacccaagaagcggttgccgctttgctaaagtgttccctaggcacagtaaccttggaagttggaagaatcaaagctggtccattccattcagagaggaggccatctcaaagcagccaggtgagtgaaggcagcctgtcatctttcacttttccactctctggatccagtacatctgagtcactggaaagtagctcaaagaagaatgcattggcatctgaaatacagggattaagaacagtcgaaatgaaaaagggccctactgactcactgggaatcagcattgctggaggagtaggcagcccacttggtgatgtgcctatatttattgcaatgatgcacccaactggagttgcagcacagacccaaaaactcagagttggggataggattgtcaccatctgtggcacatccactgagggcatgactcacacccaagcagttaacctactgaaaaatgcatctggctccattgaaatgcaggtggttgctggaggagacgtgagtgtggtcacaggtcatcagcaggagcctgcaagttccagtctttctttcactgggctgacgtcaagcagtatatttcaggatgatttaggacctcctcaatgtaagtctattacactagagcgaggaccagatggcttaggcttcagtatagttggaggatatggcagccctcatggagacttacccatttatgttaaaacagtgtttgcaaagggagcagcctctgaagacggacgtctgaaaaggggcgatcagatcattgctgtcaatgggcagagtctagaaggagtcacccatgaagaagctgttgccatccttaaacggacaaaaggcactgtcactttgatggttctctcttgaattggctgccagaattgaaccaacccaacccctagctcacctcctactgtaaagagaatgcactggtcctgacaatttttatgctgtgttcagccgggtcttcaaaactgtaggggggaaataacacttaagtttctttttctcatctagaaatgctttccttactgacaacctaacatcatttttcttttcttcttgcattttgtgaacttaaagagaaggaatatttgtgtaggtgaatctcgtttttatttgtggagatatctaatgttttgtagtcacatgggcaagaattattacatgctaagctggttagtataaagaaagataattctaaagctaaccaaagaaaatggcttcagtaaattaggatgaaaaatgaaaatataaaataaagaagaaaatctcggggagtttaaaaaaaatgcctcaatttggcaatctacctcctctccccaccccaaact

SEQ ID NO: 93704 - DNA, 6262 bp, Artificial Sequence
  derived and/or modified sequence
tgctgttaatcatttcagagaagaacactgaactttgaaaaaaatgttggaagccattgacaaaaatcgggccctgcatgcagcagagcgcttgcaaaccaagctgcgagaacgtggggatgtagcaaatgaagacaaactgagccttctgaagtcagtcctgcagagccctctcttcagtcagattctgagccttcagacttctgtacagcagctgaaagaccaggtaaatattgcaacttcagcaacttcaaatattgaatatgcccacgttcctcatctcagcccagctgtgattcctactctgcaaaatgaatcgtttttattatccccaaacaatgggaatctggaagcacttacaggacctggtattccacacattaatgggaaacctgcttgtgatgaatttgatcagcttatcaaaaatatggcccagggtcgccatgtagaagtttttgagctcctcaaacctccatctggaggccttgggtttagtgttgtgggactaagaagtgaaaacagaggagagctgggaatatttgttcaagagatacaagagggcagtgtggcccatagagatggaagattgaaagaaactgatcaaattcttgctatcaatggacaggctcttgatcagacaattacacatcagcaggctatcagcatcctgcagaaagccaaagatactgtccagctagttattgccagaggctcattgcctcagcttgtcagccccatagtttcccgttctccatctgcagccagcacaatttcagctcactctaatccggttcactggcaacacatggaaacgattgaattggtgaatgatggatctggtttgggatttggcatcataggaggaaaagcaactggtgtgatagtaaaaaccattctgcctggaggagtagctgatcagcatgggcgtttatgcagtggagaccacattctaaagattggtgacacagatctagcaggaatgagcagtgagcaagtagcacaagtccttaggcaatgtggaaatagagttaagttgatgattgcaagaggtgccatagaagaacgtacagcacccactgctttgggcatcaccctctcctcatccccaacttcaacaccagagttgcgggttgatgcttctactcagaaaggtgaagaaagtgagacatttgatgtagaactcactaaaaatgtccaaggattaggaattaccattgctggctacattggagataaaaaattggaaccttcaggaatctttgtaaagagcattacaaaaagcagtgccgttgagcatgatggaagaatccaaattggagaccaaattatagcagtagatggcacaaaccttcagggttttactaatcagcaagcagtagaggtattgcgacatacaggacaaactgtgctcctgacactaatgaggagaggaatgaagcaggaagccgagctcatgtcaagggaagacgtcacaaaagatgcagatttgtctcctgttaatgccagcataatcaaagaaaattatgaaaaagatgaagattttttatcttcgacgagaaacaccaacatattaccaactgaagaagaagggtatccattactgtcagctgagatagaagaaatagaagatgcacaaaaacaagaagctgctctgctgacaaaatggcaaaggattatgggaattaactatgaaatagtggtggcccatgtgagcaagtttagtgagaacagtggattggggataagcctggaagcgacagtgggacatcattttatccgatctgttctaccagagggtcctgttggacacagcgggaagctcttcagtggagacgagctattggaagtaaatggcataactttacttggggaaaatcaccaagatgtggtgaatatcttaaaagaactgcctatagaagtgacaatggtgtgctgtcgtcgaactgtgccacccaccacccaatcagaattggatagcctggacttatgtgatattgagctaacagaaaagcctcacgtagatctaggtgagttcatcgggtcatcagagacagaggatccagtgctggcgatgactgatgcgggtcagagtacagaagaggttcaagcacctttggccatgtgggaggctggcattcagcacatagagctggagaaagggagcaaaggacttggttttagcattttagattatcaggatccaattgatccagcaagcactgtgattataattcgttctttggtgcctggcggcattgctgaaaaggatggacgacttcttcctggtgaccgactcatgtttgtaaacgatgttaacttggaaaacagcagtcttgaggaagctgtagaagcactgaagggagcaccgtcagggactgtgagaataggagttgctaagcctttacccctttcaccagaagaaggttatgtttctgctaaggaggattcctttctctacccaccacactcctgtgaggaagcagggctggctgacaaacccctcttcagggctgacttggctctggtgggcacaaatgatgctgacttagtagatgaatccacatttgagtctccatactctcctgaaaatgacagcatctactctactcaagcctctattttatctcttcatggcagttcttgtggtgatggcctgaactatggttcttcccttccatcatctcctcctaaggatgttattgaaaattcttgtgatccagtacttgatctgcatatgtctctggaggaactatatacccagaatctcctgcaaagacaggatgagaatacaccttcggtggacataagtatggggcctgcttctggctttactataaatgactacacacctgcaaatgctattgaacaacaatatgaatgtgaaaacacaatagtgtggactgaatctcatttaccaagtgaagttatatcaagtgcagaacttccttctgtgctacccgattcagctggaaagggctctgagtacctgcttgaacagagctccctggcctgtaatgctgagtgtgtcatgcttcaaaatgtatctaaagaatcttttgaaaggactattaatatagcaaaaggcaattctagcctaggaatgacagttagtgctaataaagatggcttggggatgatcgttcgaagcattattcatggaggtgccattagtcgagatggccggattgccattggggactgcatcttgtccattaatgaagagtctaccatcagtgtaaccaatgcccaggcacgagctatgttgagaagacattctctcattggccctgacataaaaattacttatgtgcctgcagaacatttggaagagttcaaaataagcttgggacaacaatctggaagagtaatggcactggatattttttcttcatacactggcagagacattccagaattaccagagcgagaagagggagagggtgaagaaagcgaacttcaaaacacagcatatagcaattggaatcagcccaggcgggtggaactctggagagaaccaagcaaatccttaggcatcagcattgttggtggacgagggatggggagtcggctaagcaatggagaagtgatgaggggcattttcatcaaacatgttctggaagatagtccagctggcaaaaatggaaccttgaaacctggagatagaatcgtagaggtggatggaatggacctcagagatgcaagccatgaacaagctgtggaagccattcggaaagcaggcaaccctgtagtctttatggtacagagcattataaacagaccaagggcacccagtcagtcagagtcagagccagagaaggctccattgtgcagtgtgcccccaccccctccttcagcctttgccgaaatgggtagtgatcacacacagtcatctgcaagcaaaatctcacaagatgtggacaaagaggatgagtttggttacagctggaaaaatatcagagagcgttatggaaccctaacaggcgagctgcatatgattgaactggagaaaggtcatagtggtttgggcctaagtcttgctgggaacaaagaccgatccaggatgagtgtcttcatagtggggattgatccaaatggagctgcaggaaaagatggtcgattgcaaattgcagatgagcttctagagatcaatggtcagattttatatggaagaagtcatcagaatgcctcatcaatcattaaatgtgccccttctaaagtgaaaataatttttatcagaaataaagatgcagtgaatcagatggccgtatgtcctggaaatgcagtagaacctttgccttctaactcagaaaatcttcaaaataaggagacagagccaactgttactacttctgatgcagctgtggacctcagttcatttaaaaatgtgcaacatctggagcttcccaaggatcaggggggtttgggtattgctatcagcgaagaagatacactcagtggagtcatcataaagagcttaacagagcatggggtagcagccacggatggacgactcaaagtcggagatcagatactggctgtagatgatgaaattgttgttggttaccctattgaaaagtttattagccttctgaagacagcaaagatgacagtaaaacttaccatccatgctgagaatccagattcccaggctgttccttcagcagctggtgcagccagtggagaaaaaaagaacagctcccagtctctgatggtcccacagtctggctccccagaaccggagtccatccgaaatacaagcagatcatcaacaccagcaatttttgcttctgatcctgcaacctgccccattatccctggctgcgaaacaaccatcgagatttccaaagggcgaacagggctgggcctgagcatcgttgggggttcagacacgctgctgggtgccattattatccatgaagtttatgaagaaggagcagcatgtaaagatggaagactctgggctggagatcagatcttagaggtgaatggaattgacttgagaaaggccacacatgatgaagcaatcaatgtcctgagacagacgccacagagagtgcgcctgacactctacagagatgaggccccatacaaagaggaggaagtgtgtgacaccctcactattgagctgcagaagaagccgggaaaaggcctaggattaagtattgttggtaaaagaaacgatactggagtatttgtgtcagacattgtcaaaggaggaattgcagatgccgatggaagactgatgcagggagaccagatattaatggtgaatggggaagacgttcgtaatgccacccaagaagcggttgccgctttgctaaagtgttccctaggcacagtaaccttggaagttggaagaatcaaagctggtccattccattcagagaggaggccatctcaaagcagccaggtgagtgaaggcagcctgtcatctttcacttttccactctctggatccagtacatctgagtcactggaaagtagctcaaagaagaatgcattggcatctgaaatacagggattaagaacagtcgaaatgaaaaagggccctactgactcactgggaatcagcattgctggaggagtaggcagcccacttggtgatgtgcctatatttattgcaatgatgcacccaactggagttgcagcacagacccaaaaactcagagttggggataggattgtcaccatctgtggcacatccactgagggcatgactcacacccaagcagttaacctactgaaaaatgcatctggctccattgaaatgcaggtggttgctggaggagacgtgagtgtggtcacaggtcatcagcaggagcctgcaagttccagtctttctttcactgggctgacgtcaagcagtatatttcaggatgatttaggacctcctcaatgtaagtctattacactagagcgaggaccagatggcttaggcttcagtatagttggaggatatggcagccctcatggagacttacccatttatgttaaaacagtgtttgcaaagggagcagcctctgaagacggacgtctgaaaaggggcgatcagatcattgctgtcaatgggcagagtctagaaggagtcacccatgaagaagctgttgccatccttaaacggacaaaaggcactgtcactttgatggttctctcttgaattggctgccagaattgaaccaacccaacccctagctcacctcctactgtaaagagaatgcactggtcctgacaatttttatgctgtgttcagccgggtcttcaa

SEQ ID NO: 93705 - DNA, 6114 bp, Artificial Sequence
  derived and/or modified sequence
atgctggaggccatcgacaagaaccgggccctgcacgccgccgagcgtttgcaaacaaagctgcgggaacgaggcgacgtggccaatgaagataagctgtccctgctgaagagcgtgctgcagtcaccgcttttttctcagattctgtctcttcagacaagtgtccagcagttgaaggatcaggttaacatcgccaccagcgcaacctcaaatattgaatatgcacacgtgccacatctgtctcctgccgtcattcctacgctccaaaatgagtcattcctattgtcacccaacaatgggaacctcgaggccctgaccggtcctggaattccccatattaacggaaaacccgcgtgcgacgaattcgatcaactgattaagaatatggcccaggggaggcatgttgaagtattcgagcttctgaagccaccttcagggggcttgggattctcagtggtgggccttcggtccgagaatcgcggggagctcggcatcttcgtccaagaaattcaagagggctcagtggcgcatcgcgacggacgcctcaaggagacagatcagatcctagctattaacggccaagcgctggatcagactattacgcaccagcaggctataagtatactgcagaaagccaaggacaccgttcaactggtgatcgcacgcggcagcctgccacagctggtctcgcctatcgtcagccggagcccttccgccgcaagcacaatcagtgcgcactctaaccccgtccactggcagcacatggaaactattgagctggtcaatgatggaagtggactcggctttggcatcataggcggaaaagccaccggggtaatcgtgaagaccatcctgccaggcggggtcgcagaccagcatggccggttgtgttcaggcgaccacatattgaaaattggtgataccgatcttgcgggaatgagctctgaacaggtcgcacaagttctgaggcagtgcggcaaccgggtgaaactcatgatagcccgcggggcaatagaggagcggaccgcccctacagcattaggtataactttatcttcctcgcctaccagcacccctgagctgagagtggatgccagcacccagaagggggaggagagtgaaacattcgatgttgagctgaccaagaatgtgcagggactagggattacaattgcgggctatatcggtgacaagaaactggagcccagtggtatattcgttaaaagcatcactaagtcttcagccgtggaacacgatggtcgcatacagatcggcgatcagattattgcagtggacggaacaaacctacagggtttcaccaaccagcaggcagtggaggtgctgcggcacacaggccagaccgtactgctgaccttaatgagacggggcatgaaacaggaggccgagctgatgagtcgagaagatgtgacgaaggatgcagacttgtctcctgtgaatgcctccatcataaaggagaactatgagaaggatgaagactttctgagctcaacccggaacactaatattctgcccacagaggaggagggctatcctctcctgtctgcagagatagaggagatcgaggacgcccagaaacaggaagcagccctgctgaccaagtggcagcgaataatgggcatcaactacgaaattgtcgttgctcatgtgtccaaattcagcgaaaatagcggactgggcatttcgctggaggcaacagtgggccatcattttattcggagcgtccttccggagggccctgtgggccactccggcaaactgttctcaggcgacgagctgctagaggtgaatggcattacactcctgggggagaaccaccaagatgtagtaaacatcctcaaggagctgcccatagaagtaaccatggtctgttgccggcgcaccgttccacctactacccaatccgagctcgatagcttagacctgtgtgatatcgaattgacggagaaacctcacgtggatttgggcgagtttatcggctctagcgagaccgaggatcctgtcctggctatgacagatgcaggacagtctactgaagaagttcaggcaccactcgccatgtgggaagccggtatccagcatattgagctggagaaaggcagtaaagggctgggctttagcatcttagattaccaggatcccatcgaccccgcgtccaccgtgattataattcggtccctggtgcctggaggcatagcggagaaagacgggaggctgttgcccggggaccggctaatgttcgttaatgatgtcaatctggaaaacagctcactggaagaagcggttgaagccctgaagggtgctccatcaggtaccgtgagaatcggggttgccaaaccccttccgctgtcccctgaggaggggtatgtatctgccaaggaagacagttttctctatccaccacacagttgtgaagaagcaggcttggccgataagccactgtttcgcgccgacctagccctagtcgggactaatgacgcggatctggttgacgaatcaaccttcgagtccccctactccccagaaaatgactccatctatagcactcaggccagtatcctgtcattgcacggcagctcctgcggggatggactgaattacggttcttccctcccctctagtccgccgaaagatgtgatcgaaaattcctgcgaccctgtgctggacctccacatgtcattggaggaactctatacccaaaatctattacagaggcaggacgaaaacaccccctcagtggatatttcaatggggccggcctccggtttcacgataaacgactataccccggcaaatgccatcgagcagcagtatgagtgtgaaaacaccatagtctggaccgaaagtcacctaccgtctgaggtgatctcatctgcagagctgccctcagtgctgcctgattccgctgggaaaggatcagaatatttactagagcagtccagtctcgcctgcaacgctgagtgcgtcatgttacaaaatgtcagtaaggagagctttgagcgtacaattaacatagccaaaggcaatagtagcctgggcatgacagtctccgctaacaaggacgggctgggtatgatcgtgcgatcaatcattcacggcggggctatttctcgggacgggagaattgccataggagattgcattctgagcatcaatgaggaaagcacgattagcgtaaccaacgcgcaggcacgggctatgcttcgaagacattcacttatcgggcctgacattaagatcacctatgttcctgctgagcacttggaggagtttaaaatctctcttggacaacagtcgggccgggtaatggctctggatattttcagcagctacacgggtagggatatcccagagctgcccgagcgggaggaaggagaaggcgaagaatccgagttgcagaacacggcttactccaactggaatcagcctcggcgggtggagctgtggcgcgagccgagtaaatctctgggaatatctatcgtcgggggaagggggatgggcagtcgactaagtaatggtgaggtaatgaggggaatcttcataaaacacgttcttgaagactccccagccgggaaaaacggaactctaaagcccggcgataggatcgttgaggtggatgggatggacctgcgagacgccagtcacgaacaggccgtggaggcgattcgaaaggccggaaaccctgtggtgttcatggtgcagtcaattataaatcgcccccgcgctccctctcagtctgagtcagaacccgagaaggctcctttgtgctcagtgcctccaccacccccttctgctttcgctgagatgggctcggaccacacgcagtccagcgcaagcaagatcagtcaggatgttgataaagaagatgagttcggctactcctggaagaatataagggaaaggtacggcactttgactggggagttacacatgatagagcttgagaagggacactctgggctgggcctttcgctggctggcaataaggacaggtctcgaatgtctgtattcatagttggcatcgatccaaatggcgccgccggaaaggacgggcgtctgcagatcgcagatgagcttttggagattaatgggcaaattctgtatggacgcagccaccagaatgctagtagcatcatcaaatgtgctccatcaaaagtgaaaattattttcatacggaacaaggacgccgtgaatcagatggccgtgtgccccgggaatgctgttgagcccttgcctagcaacagcgaaaatctccagaacaaggaaaccgaaccaacagtgaccacgagcgatgccgctgtcgacctttcatcgtttaagaatgtgcaacatctggagctcccgaaagatcaaggtgggctggggatcgcaatcagtgaggaagataccctgtcaggcgtgatcatcaagtccttaaccgaacatggagtggccgccactgatggtaggctaaaggtcggagaccagatcctcgctgtcgacgatgaaatcgtggtgggttacccaatcgaaaaatttattagcttgcttaagactgcaaaaatgacggtgaaactgactattcatgccgagaaccccgactcccaggcagtgcctagtgccgctggagcagcatccggcgagaagaagaacagctcccaatctctgatggtccctcagagcggaagtccggagcccgagtccattagaaatacctcaaggtcatctacgcccgcaatcttcgcatcagaccccgccacctgtcccataatccccggctgtgagactaccattgaaataagcaaaggccgtacgggcctgggactgtccattgtcgggggttcggataccctcctaggggccatcatcattcacgaggtctatgaggaaggcgccgcctgtaaggatggacgtctttgggccggagaccagatcttagaggtgaacgggattgaccttaggaaggccacacacgacgaggccatcaacgtcttgcggcagactccccagagagtacgtcttactctatacagagacgaggcgccctacaaagaggaagaggtctgtgatacactcacaatcgaactgcagaagaaacccgggaagggcttggggctgtctatcgtgggcaagcgaaacgacactggggtatttgtgtccgatatcgtgaaggggggcatcgcagatgccgatgggcgcctgatgcagggagatcagatcctcatggtcaacggcgaggatgttcggaatgcaactcaggaagcggtggccgccctgttgaagtgttctttagggacagtcactctcgaggtcgggaggatcaaggcagggcctttccactcagaaaggcgtcctagccagtcatctcaggtgagtgaagggagcctttcttccttcacctttcctctctctgggtcttctactagcgaatcgctagagtccagttctaagaaaaatgccctggccagcgaaattcaaggattgaggacagtcgagatgaagaaagggcctaccgattctcttgggatatctatcgccggaggagtgggatctccactgggtgacgtgccaatctttatcgctatgatgcacccaactggagtagccgctcaaacacaaaagttgcgagtgggagaccggattgtgacaatttgcgggacttctaccgagggaatgactcacacacaggccgttaatctccttaagaatgctagcggcagcattgagatgcaggtcgtcgctgggggcgatgtttctgttgtgacaggtcaccagcaggagcccgccagctccagcctcagcttcacgggactgacttcatcatctattttccaggacgatctgggtccgccacagtgtaagagtatcactttagagcgagggccggacgggttgggattcagcattgtcggtggctacggcagcccacatggggacctgccaatctatgtcaaaacagtttttgcaaagggcgctgcatcagaggatggccgactgaagagaggcgatcagattatcgctgtgaatgggcagtcgctggagggagtcacccacgaggaagctgttgccattttaaagcgaaccaagggaacggttaccttaatggttctgtcctag

SEQ ID NO: 93706 - DNA, 6113 bp, Artificial Sequence
  derived and/or modified sequence
atgctggaggcaattgataaaaatcgagcccttcatgcagccgagcggttacagacgaagctgcgagagagaggggacgtggcaaatgaagacaaactgtctctcctcaagagtgttctccagagtccactattttcacaaattttgagtttgcagaccagtgtccaacagctaaaagatcaagtgaatattgcgacatccgccactagtaatatcgaatacgcccacgttccccacctgtccccggcagttattccaactctccaaaatgagagcttcctgttgtcacctaataacggtaacctggaagccctcaccggaccaggcataccccacattaatggaaaaccagcatgcgacgagttcgatcagctgattaagaacatggcgcagggcaggcacgtcgaagttttcgaactgctgaagcccccaagtggaggcctggggttttcggttgtgggcctccgttctgagaatcgaggggagcttggaatctttgtgcaggagatccaggagggttctgtggcgcatagggacgggcgtttaaaagagaccgaccagattctagcaattaatgggcaggcactagaccagacaatcacccaccagcaggccatttctatcctgcaaaaggcaaaggatacagtgcagcttgtcatagcgagaggctcactccctcaactggtatcgcctattgtgtcacgcagcccgtctgccgcatctactatctcagctcacagcaacccagtgcactggcagcatatggagaccatagagctggttaatgatggatcaggccttgggttcggtataattggcggtaaggccactggggtcattgtcaagacaattttgccaggaggcgttgcggatcagcacggaagattatgcagcggggatcatattctgaagataggggatactgaccttgccggaatgagttctgagcaagtcgcacaagttctgaggcagtgtggcaaccgggtaaaactcatgatcgctcgcggagccatcgaggagcgcacagctcctacagcgttagggattacactgagctcctctccaacttcgaccccggagctccgggttgacgcctcaactcaaaagggcgaagaaagtgaaacattcgacgtggagcttactaaaaacgtccaagggctgggcatcactattgccggatatatcggggataagaaacttgaacctagtggtatcttcgtgaagtcgattactaaatcctccgccgttgagcatgatggaagaatccagataggcgaccagatcattgccgtggatggaaccaatctgcaggggtttaccaatcaacaggccgtggaagtgttaaggcacaccggccagacagtgctgctcactctgatgcggaggggtatgaagcaggaggccgagctgatgtccagagaggacgtgacaaaggacgcagacctgtctcccgtgaacgcttcgataattaaagaaaactatgagaaagacgaagactttctatcttccacccgaaataccaatattcttcccacggaagaggaaggctacccattgctcagcgctgagatcgaagaaattgaggacgcccagaagcaggaagcagcactgcttaccaaatggcagagaattatggggatcaattacgagattgttgtcgcccatgtctctaagttctcagagaattccggactgggtatcagcctggaggcaaccgtcggacaccacttcatccgatcagtgttacccgagggcccagtcggtcactccgggaagctgttcagcggggacgagctgctggaagtgaatggcattaccctgctcggagagaaccatcaggacgtggtaaacatcctgaaagaactgccaatcgaggttaccatggtgtgttgccgcaggaccgttcctcctacaactcagagtgagttagattctctcgacttgtgtgacattgaattgaccgagaaacctcacgtagatctgggagaatttataggtagcagcgaaacggaagatcccgtgctagccatgacagatgccggacagtcaactgaggaagtgcaagcccctctggccatgtgggaggcagggattcagcacatcgaacttgagaaaggctccaaaggactgggcttcagcatcctggattatcaggatcccatcgatccggcttccacagtaataattatcagaagtctggtgcctggtggcatagctgagaaggatgggcgtcttctcccaggcgatcgcctgatgtttgtgaacgatgttaacctggaaaacagctcgcttgaagaagcagtcgaggccttgaagggagccccatctggaactgtgcgcataggggtggccaagcctttgccgctctcccccgaggagggatatgtgtcagcaaaggaggacagctttctgtatcctcctcatagctgcgaggaagcaggcttagccgacaaacctctgttccgtgccgacctggccctggtgggaaccaatgacgcggatttggtagacgagtctacatttgagtcaccatattcacccgagaacgattccatctatagtacccaggctagcatcctgtctctgcatggaagctcctgcggggatgggctcaattacgggtccagcctcccttcttctcctccgaaagatgtaatcgaaaatagctgtgaccccgtgctggacctccacatgtcccttgaagaattgtacacccagaacctcctgcagaggcaagatgagaacaccccctccgtggacatctcaatgggcccagcttccggttttacaattaatgactacacaccggctaacgccatcgagcagcagtatgagtgcgagaatacgattgtttggacggaaagtcatctccccagtgaagtcatcagctccgcagaactgcccagtgtcttgcccgatagcgcaggaaaaggctcagagtatctgttggagcagtccagtctggcttgcaatgccgaatgtgtaatgctccagaacgtgagtaaagagtccttcgagcgtaccatcaatattgcgaaaggcaattcatctttgggaatgacagtgtctgctaacaaggacggacttggtatgatcgtacgatctataattcatgggggagctatctccagggatggtagaattgccatcggagactgcattttgagcataaatgaggagtccaccatttccgttacaaatgcccaggcacgagcaatgctgcgcagacactctttgatcggcccagacatcaagatcacatacgtgccagccgagcacttagaggagtttaagatctcgctggggcaacagtccgggagagtgatggcactggatattttcagtagctataccggccgagacatcccagagcttcccgaacgggaagagggtgagggtgaagaaagtgagctgcagaatactgcttactcaaactggaaccagccgaggcgcgtggagttatggcgtgagccatccaagtcactcggcatatcaatcgttggcggaaggggcatgggctcgcgtctttcgaatggggaggtcatgcgcggtatattcattaagcacgtcttggaggattcccccgctggcaaaaacgggacgttgaagccaggggaccggatagtggaggttgatgggatggacctgcgagacgctagtcatgagcaggccgtcgaagctatccgcaaggccggtaatccggtagtcttcatggtgcagtcaatcatcaatcgcccacgcgctccctcacagagtgagtccgagcctgagaaggcccctctttgttctgtgcctcctccaccaccttccgcttttgcggagatgggcagcgatcatactcagagttccgcaagtaaaattagccaggacgttgacaaggaggatgaattcggctatagctggaagaacatccgggagcggtacggaacactcacgggggaactgcacatgatcgagctggagaaaggccactcaggcctgggcctctccctcgccggaaacaaagaccgctctagaatgtccgttttcatcgtgggaatagatcccaacggtgccgctggcaaagacgggaggcttcaaatcgctgatgagcttctggagataaacggacagatcctgtacggcaggtcccatcagaacgcctcgagtatcatcaagtgcgcccctagcaaggtcaagatcatcttcatccggaataaggatgcggtgaatcagatggccgtgtgccccggaaacgcggtggagccccttccaagcaatagcgaaaatctccagaataaagagacagagcccaccgttacaacaagcgatgcagccgtggatttaagctcctttaaaaatgttcagcatttagagcttcccaaagaccagggaggattgggaattgctatcagtgaggaagacaccctgtctggcgtgattatcaagtcactcactgagcacggcgtggccgcaaccgacggaagactcaaggtgggggaccaaattcttgccgtggacgacgaaattgtggtcggctatcctatagagaaattcatttctctgctgaagaccgcgaaaatgacggtgaagctgacaatccatgcagagaaccccgactcgcaggctgttccctccgctgccggtgccgctagtggggagaagaagaactcttctcagtccctgatggtcccgcaaagcggcagtcctgagcccgagtctattaggaatacctctcggtctagcactcccgcaattttcgcctctgacccagctacgtgtccgattatccccggttgtgagactaccatagagatctctaaaggacgcacaggtcttggactctcaatcgtagggggttcagacaccctgctgggggctattatcatccatgaagtttacgaagagggggctgcttgcaaggacggtagactttgggcgggagatcaaatcctggaagtaaacggaatcgacctgcgcaaggccacccacgacgaggccatcaacgttcttcggcagacaccccagagagtgcgactgaccctatatcgggatgaagctccatataaagaagaagaagtgtgtgatactctgaccatagaactgcaaaaaaagccaggcaagggcttaggtctgtcaatagtggggaagcggaacgacactggggtgtttgtatcagacatcgtgaaagggggtattgcagacgcggacggacgtctcatgcagggagatcagatattgatggtgaatggtgaagacgtgagaaatgccactcaggaagccgtggccgctttgctcaaatgctctttgggcaccgtcacactggaggtaggccgaatcaaggccggacctttccattctgagagaaggccctctcagtcttcccaggtcagtgaagggtcgttatcttcctttaccttccccttgtcagggagcagtacctcggagagcctggaaagtagctccaaaaaaaatgccttggcctccgagatccaggggctgcgaacagtagaaatgaagaagggacctacggactctctgggtatctccattgcaggaggggtgggaagccctctcggcgatgttcccatcttcattgccatgatgcatcccacaggggtggcagctcagacacagaagttgcgagtaggggatagaattgtgaccatatgtgggactagtacagaaggaatgacccatacccaggccgtcaacctgcttaagaatgcaagtggttctatagaaatgcaagtggtcgccggaggcgatgtttcagtggtgacaggtcatcagcaggagcccgcttccagctctctgtcttttacgggtctgacctctagctctattttccaggatgatctaggcccaccacagtgtaagtcgatcaccttggaacggggaccagatggtttgggtttctccattgttggcggttacggaagtcctcacggcgatctccccatttatgtgaaaactgtgttcgctaagggcgctgcttccgaagatgggcgactgaagagaggcgaccaaattatcgccgtcaacgggcaatccttagagggggtgacgcacgaggaggctgtcgccatcttgaaacgcaccaaggggaccgtgactttgatggtgctctcata

SEQ ID NO: 93707 - DNA, 6114 bp, Artificial Sequence
  derived and/or modified sequence
atgctggaggccatcgacaagaacagagccctgcacgccgccgagagactgcagaccaagctgagagagagaggcgacgtggccaacgaggacaagctgagcctgctgaagagcgtgctgcagagccccctgttcagccagatcctgagcctgcagaccagcgtgcagcagctgaaggaccaggtgaacatcgccaccagcgccaccagcaacatcgagtacgcccacgtgccccacctgagccccgccgtgatccccaccctgcagaacgagagcttcctgctgagccccaacaacggcaacctggaggccctgaccggccccggcatcccccacatcaacggcaagcccgcctgcgacgagttcgaccagctgatcaagaacatggcccagggcagacacgtggaggtgttcgagctgctgaagccccccagcggcggcctgggcttcagcgtggtgggcctgagaagcgagaacagaggcgagctgggcatcttcgtgcaggagatccaggagggcagcgtggcccacagagacggcagactgaaggagaccgaccagatcctggccatcaacggccaggccctggaccagaccatcacccaccagcaggccatcagcatcctgcagaaggccaaggacaccgtgcagctggtgatcgccagaggcagcctgccccagctggtgagccccatcgtgagcagaagccccagcgccgccagcaccatcagcgcccacagcaaccccgtgcactggcagcacatggagaccatcgagctggtgaacgacggcagcggcctgggcttcggcatcatcggcggcaaggccaccggcgtgatcgtgaagaccatcctgcccggcggcgtggccgaccagcacggcagactgtgcagcggcgaccacatcctgaagatcggcgacaccgacctggccggcatgagcagcgagcaggtggcccaggtgctgagacagtgcggcaacagagtgaagctgatgatcgccagaggcgccatcgaggagagaaccgcccccaccgccctgggcatcaccctgagcagcagccccaccagcacccccgagctgagagtggacgccagcacccagaagggcgaggagagcgagaccttcgacgtggagctgaccaagaacgtgcagggcctgggcatcaccatcgccggctacatcggcgacaagaagctggagcccagcggcatcttcgtgaagagcatcaccaagagcagcgccgtggagcacgacggcagaatccagatcggcgaccagatcatcgccgtggacggcaccaacctgcagggcttcaccaaccagcaggccgtggaggtgctgagacacaccggccagaccgtgctgctgaccctgatgagaagaggcatgaagcaggaggccgagctgatgagcagagaggacgtgaccaaggacgccgacctgagccccgtgaacgccagcatcatcaaggagaactacgagaaggacgaggacttcctgagcagcaccagaaacaccaacatcctgcccaccgaggaggagggctaccccctgctgagcgccgagatcgaggagatcgaggacgcccagaagcaggaggccgccctgctgaccaagtggcagagaatcatgggcatcaactacgagatcgtggtggcccacgtgagcaagttcagcgagaacagcggcctgggcatcagcctggaggccaccgtgggccaccacttcatcagaagcgtgctgcccgagggccccgtgggccacagcggcaagctgttcagcggcgacgagctgctggaggtgaacggcatcaccctgctgggcgagaaccaccaggacgtggtgaacatcctgaaggagctgcccatcgaggtgaccatggtgtgctgcagaagaaccgtgccccccaccacccagagcgagctggacagcctggacctgtgcgacatcgagctgaccgagaagccccacgtggacctgggcgagttcatcggcagcagcgagaccgaggaccccgtgctggccatgaccgacgccggccagagcaccgaggaggtgcaggcccccctggccatgtgggaggccggcatccagcacatcgagctggagaagggcagcaagggcctgggcttcagcatcctggactaccaggaccccatcgaccccgccagcaccgtgatcatcatcagaagcctggtgcccggcggcatcgccgagaaggacggcagactgctgcccggcgacagactgatgttcgtgaacgacgtgaacctggagaacagcagcctggaggaggccgtggaggccctgaagggcgcccccagcggcaccgtgagaatcggcgtggccaagcccctgcccctgagccccgaggagggctacgtgagcgccaaggaggacagcttcctgtaccccccccacagctgcgaggaggccggcctggccgacaagcccctgttcagagccgacctggccctggtgggcaccaacgacgccgacctggtggacgagagcaccttcgagagcccctacagccccgagaacgacagcatctacagcacccaggccagcatcctgagcctgcacggcagcagctgcggcgacggcctgaactacggcagcagcctgcccagcagcccccccaaggacgtgatcgagaacagctgcgaccccgtgctggacctgcacatgagcctggaggagctgtacacccagaacctgctgcagagacaggacgagaacacccccagcgtggacatcagcatgggccccgccagcggcttcaccatcaacgactacacccccgccaacgccatcgagcagcagtacgagtgcgagaacaccatcgtgtggaccgagagccacctgcccagcgaggtgatcagcagcgccgagctgcccagcgtgctgcccgacagcgccggcaagggcagcgagtacctgctggagcagagcagcctggcctgcaacgccgagtgcgtgatgctgcagaacgtgagcaaggagagcttcgagagaaccatcaacatcgccaagggcaacagcagcctgggcatgaccgtgagcgccaacaaggacggcctgggcatgatcgtgagaagcatcatccacggcggcgccatcagcagagacggcagaatcgccatcggcgactgcatcctgagcatcaacgaggagagcaccatcagcgtgaccaacgcccaggccagagccatgctgagaagacacagcctgatcggccccgacatcaagatcacctacgtgcccgccgagcacctggaggagttcaagatcagcctgggccagcagagcggcagagtgatggccctggacatcttcagcagctacaccggcagagacatccccgagctgcccgagagagaggagggcgagggcgaggagagcgagctgcagaacaccgcctacagcaactggaaccagcccagaagagtggagctgtggagagagcccagcaagagcctgggcatcagcatcgtgggcggcagaggcatgggcagcagactgagcaacggcgaggtgatgagaggcatcttcatcaagcacgtgctggaggacagccccgccggcaagaacggcaccctgaagcccggcgacagaatcgtggaggtggacggcatggacctgagagacgccagccacgagcaggccgtggaggccatcagaaaggccggcaaccccgtggtgttcatggtgcagagcatcatcaacagacccagagcccccagccagagcgagagcgagcccgagaaggcccccctgtgcagcgtgcccccccccccccccagcgccttcgccgagatgggcagcgaccacacccagagcagcgccagcaagatcagccaggacgtggacaaggaggacgagttcggctacagctggaagaacatcagagagagatacggcaccctgaccggcgagctgcacatgatcgagctggagaagggccacagcggcctgggcctgagcctggccggcaacaaggacagaagcagaatgagcgtgttcatcgtgggcatcgaccccaacggcgccgccggcaaggacggcagactgcagatcgccgacgagctgctggagatcaacggccagatcctgtacggcagaagccaccagaacgccagcagcatcatcaagtgcgcccccagcaaggtgaagatcatcttcatcagaaacaaggacgccgtgaaccagatggccgtgtgccccggcaacgccgtggagcccctgcccagcaacagcgagaacctgcagaacaaggagaccgagcccaccgtgaccaccagcgacgccgccgtggacctgagcagcttcaagaacgtgcagcacctggagctgcccaaggaccagggcggcctgggcatcgccatcagcgaggaggacaccctgagcggcgtgatcatcaagagcctgaccgagcacggcgtggccgccaccgacggcagactgaaggtgggcgaccagatcctggccgtggacgacgagatcgtggtgggctaccccatcgagaagttcatcagcctgctgaagaccgccaagatgaccgtgaagctgaccatccacgccgagaaccccgacagccaggccgtgcccagcgccgccggcgccgccagcggcgagaagaagaacagcagccagagcctgatggtgccccagagcggcagccccgagcccgagagcatcagaaacaccagcagaagcagcacccccgccatcttcgccagcgaccccgccacctgccccatcatccccggctgcgagaccaccatcgagatcagcaagggcagaaccggcctgggcctgagcatcgtgggcggcagcgacaccctgctgggcgccatcatcatccacgaggtgtacgaggagggcgccgcctgcaaggacggcagactgtgggccggcgaccagatcctggaggtgaacggcatcgacctgagaaaggccacccacgacgaggccatcaacgtgctgagacagaccccccagagagtgagactgaccctgtacagagacgaggccccctacaaggaggaggaggtgtgcgacaccctgaccatcgagctgcagaagaagcccggcaagggcctgggcctgagcatcgtgggcaagagaaacgacaccggcgtgttcgtgagcgacatcgtgaagggcggcatcgccgacgccgacggcagactgatgcagggcgaccagatcctgatggtgaacggcgaggacgtgagaaacgccacccaggaggccgtggccgccctgctgaagtgcagcctgggcaccgtgaccctggaggtgggcagaatcaaggccggccccttccacagcgagagaagacccagccagagcagccaggtgagcgagggcagcctgagcagcttcaccttccccctgagcggcagcagcaccagcgagagcctggagagcagcagcaagaagaacgccctggccagcgagatccagggcctgagaaccgtggagatgaagaagggccccaccgacagcctgggcatcagcatcgccggcggcgtgggcagccccctgggcgacgtgcccatcttcatcgccatgatgcaccccaccggcgtggccgcccagacccagaagctgagagtgggcgacagaatcgtgaccatctgcggcaccagcaccgagggcatgacccacacccaggccgtgaacctgctgaagaacgccagcggcagcatcgagatgcaggtggtggccggcggcgacgtgagcgtggtgaccggccaccagcaggagcccgccagcagcagcctgagcttcaccggcctgaccagcagcagcatcttccaggacgacctgggccccccccagtgcaagagcatcaccctggagagaggccccgacggcctgggcttcagcatcgtgggcggctacggcagcccccacggcgacctgcccatctacgtgaagaccgtgttcgccaagggcgccgccagcgaggacggcagactgaagagaggcgaccagatcatcgccgtgaacggccagagcctggagggcgtgacccacgaggaggccgtggccatcctgaagagaaccaagggcaccgtgaccctgatggtgctgagctag

SEQ ID NO: 93708 - protein, 2008 aa, Artificial Sequence
  derived and/or modified sequence
MLEAIDKNRALHAAERLQTKLRERGDVANEDKLSLLKSVLQSPLFSQILSLQTSVQQLKDQVNIATSATSNIEYAHVPHLSPAVIPTLQNESFLLSPNNGNLEALTGPGIPHINGKPACDEFDQLIKNMAQGRHVEVFELLKPPSGGLGFSVVGLRSENRGELGIFVQEIQEGSVAHRDGRLKETDQILAINGQALDQTITHQQAISILQKAKDTVQLVIARGSLPQLVSPIVSRSPSAASTISAHSNPVHWQHMETIELVNDGSGLGFGIIGGKATGVIVKTILPGGVADQHGRLCSGDHILKIGDTDLAGMSSEQVAQVLRQCGNRVKLMIARGAIEERTAPTALGITLSSSPTSTPELRVDASTQKGEESETFDVELTKNVQGLGITIAGYIGDKKLEPSGIFVKSITKSSAVEHDGRIQIGDQIIAVDGTNLQGFTNQQAVEVLRHTGQTVLLTLMRRGMKQEAELMSREDVTKDADLSPVNASIIKENYEKDEDFLSSTRNTNILPTEEEGYPLLSAEIEEIEDAQKQEAALLTKWQRIMGINYEIVVAHVSKFSENSGLGISLEATVGHHFIRSVLPEGPVGHSGKLFSGDELLEVNGITLLGENHQDVVNILKELPIEVTMVCCRRTVPPTTQSELDSLDLCDIELTEKPHVDLGEFIGSSETEDPVLAMTDAGQSTEEVQAPLAMWEAGIQHIELEKGSKGLGFSILDYQDPIDPASTVIIIRSLVPGGIAEKDGRLLPGDRLMFVNDVNLENSSLEEAVEALKGAPSGTVRIGVAKPLPLSPEEGYVSAKEDSFLYPPHSCEEAGLADKPLFRADLALVGTNDADLVDESTFESPYSPENDSIYSTQASILSLHGSSCGDGLNYGSSLPSSPPKDVIENSCDPVLDLHMSLEELYTQNLLQRQDENTPSVDISMGPASGFTINDYTPANAIEQQYECENTIVWTESHLPSEVISSAELPSVLPDSAGKGSEYLLEQSSLACNAECVMLQNVSKESFERTINIAKGNSSLGMTVSANKDGLGMIVRSIIHGGAISRDGRIAIGDCILSINEESTISVTNAQARAMLRRHSLIGPDIKITYVPAEHLEEFKISLGQQSGRVMALDIFSSYTGRDIPELPEREEGEGEESELQNTAYSNWNQPRRVELWREPSKSLGISIVGGRGMGSRLSNGEVMRGIFIKHVLEDSPAGKNGTLKPGDRIVEVDGMDLRDASHEQAVEAIRKAGNPVVFMVQSIINRPRAPSQSESEPEKAPLCSVPPPPPSAFAEMGSDHTQSSASKISQDVDKEDEFGYSWKNIRERYGTLTGELHMIELEKGHSGLGLSLAGNKDRSRMSVFIVGIDPNGAAGKDGRLQIADELLEINGQILYGRSHQNASSIIKCAPSKVKIIFIRNKDAVNQMAVCPGNAVEPLPSNSENLQNKETEPTVTTSDAAVDLSSFKNVQHLELPKDQGGLGIAISEEDTLSGVIIKSLTEHGVAATDGRLKVGDQILAVDDEIVVGYPIEKFISLLKTAKMTVKLTIHAENPDSQAVPSAAGAASGEKKNSSQSLMVPQSGSPEPESIRNTSRSSTPAIFASDPATCPIIPGCETTIEISKGRTGLGLSIVGGSDTLLGAIIIHEVYEEGAACKDGRLWAGDQILEVNGIDLRKATHDEAINVLRQTPQRVRLTLYRDEAPYKEEEVCDTLTIELQKKPGKGLGLSIVGKRNDTGVFVSDIVKGGIADADGRLMQGDQILMVNGEDVRNATQEAVAALLKVSEGSLSSFTFPLSGSSTSESLESSSKKNALASEIQGLRTVEMKKGPTDSLGISIAGGVGSPLGDVPIFIAMMHPTGVAAQTQKLRVGDRIVTICGTSTEGMTHTQAVNLLKNASGSIEMQVVAGGDVSVVTGHQQEPASSSLSFTGLTSSSIFQDDLGPPQCKSITLERGPDGLGFSIVGGYGSPHGDLPIYVKTVFAKGAASEDGRLKRGDQIIAVNGQSLEGVTHEEAVAILKRTKGTVTLMVLS

SEQ ID NO: 93709 - DNA, 6027 bp, Artificial Sequence
  derived and/or modified sequence
atgcttgaggccatcgacaaaaaccgcgcactccacgctgccgaaagacttcagactaagttgcgcgagcggggcgacgtggccaatgaggacaagctgtctctgttaaaatctgtgctgcagtcccccctattttcacagatactgtcactccagacatctgttcagcagctcaaagaccaagttaacatcgccactagcgcgacatccaatattgagtacgcccatgtgcctcatcttagtccagcagtcatccctaccctgcaaaatgagagttttctcctgtcacccaataatggtaatttggaagcactaactggccctggaatcccccatattaacggcaaaccggcatgcgacgagtttgatcaactaatcaaaaacatggcccaagggagacacgtggaagttttcgagctgttaaaacctccctccggaggccttggattttcagtggtgggcctgcggagcgaaaacaggggagagctcgggattttcgtgcaggagatacaagagggcagtgtcgctcacagggatggacggctaaaggagactgatcagatccttgcaatcaacggtcaggccctggatcagacaataacacatcaacaagccatcagcatcctacagaaagccaaggatacggtacaacttgtcatcgccagaggcagcttaccccagctggtgtcccccatagtgagtagatcacccagtgccgctagcacaatcagcgcccattccaatcccgtacattggcaacatatggaaaccatagaactcgtaaacgacggctcggggttaggtttcggcataatagggggcaaggctacgggggtgattgtgaaaaccattctgccgggaggagtggccgaccagcacgggcgcctgtgctcgggggatcatatcctcaagatcggcgatacagatttggcaggcatgtcctccgagcaggttgcacaggtccttcgccagtgcggaaatcgagtgaaactgatgattgcccgaggcgccatcgaagagcggacggctcctactgccttaggtatcactctgtctagctccccaaccagtacacctgaacttcgtgtcgatgcctcgacacagaagggggaggagtccgagactttcgacgtggagcttacaaagaatgttcagggattgggaatcaccattgcaggctatataggcgacaagaagctcgaaccatccggtatcttcgttaagtcaattactaagagttccgctgtagagcacgacggccgtatccaaattggcgaccagatcatagctgtagatgggacaaatctgcaggggtttaccaatcagcaagccgtcgaagtattgaggcacaccggacaaaccgttctcctgaccctcatgcgacgaggcatgaagcaagaggcagaactgatgagcagggaagatgtcaccaaggatgccgatctcagtccagtgaatgcgtccataattaaagagaactacgagaaagacgaagactttttgagctcaacacgaaatacaaatattctccctaccgaggaagaaggctatcccctcctgagtgccgagattgaagaaattgaagacgctcagaagcaagaagcggccctgcttacgaaatggcagcgtatcatggggattaattatgaaattgttgtcgcccacgtcagtaaattctctgagaacagtggactgggaatctccctcgaagccacagttggccatcattttatcaggtccgtcttgcccgagggcccagtgggccattctggtaagctgttctctggagatgagctcctagaggtgaatgggatcaccctgctgggagagaaccatcaggatgtggtgaatatcctcaaggaattgccaatagaagtaacaatggtatgctgccgccgcacagttcctcccacgacccagtcggagctggatagcctcgatctgtgcgatatcgaattgacagagaaacctcatgttgatttgggcgagttcatcggtagcagcgagaccgaagatccagtcctggccatgacagacgcaggccagtcaacagaagaagtccaggcgccgctcgctatgtgggaggccggtatccaacacatcgagttggagaaggggtccaagggccttggcttcagtatcctggattatcaggaccctatcgaccctgcttccaccgtcatcatcattaggtccttggtacctggaggcatcgctgagaaagatggccggttactacctggtgatcggctcatgttcgtgaatgatgtcaatttggagaattcaagcctcgaagaggctgtggaggcactgaagggagctccatccggaacggttagaatcggagtggcaaaacctcttccactgtcacctgaagagggctatgtcagcgcgaaggaagactcatttctgtatcccccccatagttgcgaagaagcggggttagccgacaaacccctgttcagagctgacctggccttggtaggtaccaacgatgcagatcttgtggatgaaagcacctttgagagcccttacagcccggagaacgacagcatttattctacacaggctagtatactatccctccacggatcgtcatgtggcgatggattgaactacggttcaagcttgccatcttctcctccgaaggatgttatcgagaactcatgcgaccccgtgctggaccttcatatgtccttggaagagctttacacccagaatctcttgcagcggcaggacgagaacacaccatctgtggatatcagcatgggtccggccagtggtttcaccattaatgattacacacccgctaatgctatcgagcagcagtatgaatgcgaaaacactattgtatggacggagtcccatctcccctccgaggtgataagctctgcggaattgccaagtgtcctcccggactctgctggtaaaggctctgaatatctcctcgaacagagttccttggcatgcaacgccgaatgcgtgatgctccagaacgtgagcaaagagtcgtttgaaaggactatcaatatagctaagggaaattcttccttgggcatgaccgtaagcgccaacaaggacggactgggtatgattgtcagatccatcatacatggcggcgctatcagcagagatggacgcatcgctataggcgactgtatcctgagcattaacgaggaatccaccattagcgtaaccaatgcccaggccagggctatgctacgacgacactcgctcataggtcctgacataaagattacatacgtccccgccgaacacctcgaagaatttaaaatcagccttggccagcagtccggccgggtcatggcacttgacatattctcatcctacacaggaagagacatccctgagctgccagagagggaggagggggagggggaggagagcgaactccaaaacaccgcatacagtaactggaatcaaccaaggcgcgtggaactctggcgagagccctccaagagcctgggtatcagcatcgtgggtggaaggggtatggggagtcggctttcaaatggagaggttatgaggggcatcttcattaagcacgtgttggaggactccccagcaggcaaaaacggtactttaaagccgggagatcggattgtggaagtggacggcatggatctgcgagacgcctctcacgaacaggccgttgaggcaattcgtaaagccgggaatcctgtggtgtttatggtgcagtcaataattaacagacccagggccccatcccaaagtgagtcggagccagaaaaggcaccattgtgctccgttcctccccctcctcccagcgcattcgcagagatgggctctgatcacacccagtcctcagcttccaagattagccaagacgttgacaaggaggatgaattcgggtattcatggaaaaacatcagggaacggtacggcacactcacaggcgagttacacatgattgaactggaaaaaggccattccggtctcggcctctccctggccggcaacaaagacaggtctcggatgagcgtgttcatagtgggaattgaccccaacggagcggccggaaaagatgggcggctgcaaattgctgatgaacttttagagattaatgggcagatattgtacggtcgctcacatcagaacgcctctagcatcattaagtgtgcgccatctaaagtgaagatcatctttatacggaacaaagacgccgtcaaccagatggccgtctgccctgggaatgctgtggagcctctgccctctaactctgaaaaccttcaaaacaaggagaccgagcctaccgtcaccacgtccgatgctgccgttgatctgtcctcatttaaaaacgtccagcacctcgagctgcccaaggatcagggagggctggggatcgcaatctccgaggaagacactttgtcaggcgttatcatcaaaagtttgaccgaacacggtgttgccgctacggacggtagactgaaggttggagaccaaatcctcgccgtggatgacgagattgtggtcggttaccctatcgaaaagtttatcagcttacttaagaccgccaagatgaccgtgaaactgaccatacatgcagagaaccctgacagccaagctgtaccctcagccgccggggctgccagtggagagaaaaaaaactcctcgcagagcctgatggtcccacagagcgggtccccagaaccggaatctattcgaaacacctcaagatcctcaacccccgcaatattcgcttccgaccccgccacctgccccatcattcctggttgtgagacgactatagaaatcagtaaaggccgcaccggtctgggactgtcaatcgtgggtggctcagacaccctcctgggcgcaatcatcattcatgaagtgtatgaagagggcgcagcgtgcaaggatggccggttgtgggcgggagaccagatcttagaggtgaatggaatagatctgcgaaaagccacacacgacgaggccattaacgtgctgaggcagacacctcaaagagttaggctcacattgtacagagacgaggctccgtacaaggaggaagaagtatgcgacaccctcacaatcgagctccagaaaaaacctggaaagggcctggggctctctatcgttggcaagaggaacgacactggagtcttcgtgagtgatatcgttaaaggcggtatcgcggacgccgacgggcggctaatgcagggtgaccagatcctcatggtcaacggggaggatgtccgaaatgcaactcaagaggctgttgcagctttattgaaggtgtctgagggctcactgtcctccttcactttcccactgagtgggagttccacctccgaaagcctagagtcgtcctcaaaaaaaaatgctctcgcgtccgaaattcaggggttgcggaccgttgagatgaaaaagggaccgacggatagtctcggaatttcaatcgctggcggagtcgggagccctcttggagatgtgcccattttcatcgccatgatgcacccaaccggggtcgcggctcagacacaaaagcttcgcgtcggagataggatcgtcacaatctgtggaacaagtaccgagggcatgactcacacccaggccgtgaaccttctgaaaaacgccagcggctcgatcgaaatgcaggtcgttgctggcggcgatgtcagtgtggttactggtcatcagcaggaaccagcttcttcctcgctgtccttcactggcctgacctcatcctcaatctttcaggatgacctaggccctccccagtgcaagagtatcaccctggaaagaggaccagatgggttggggtttagcatagtgggaggctacgggtctcctcatggcgatctgcccatctacgtgaagacagtgttcgcgaagggcgcagccagcgaggacggacggctgaaacggggggatcagattatcgcggtgaatgggcagagcttagagggagttacacacgaggaggctgtagcaatactcaagcggactaagggtacagtgacgcttatggttctctcgtag

SEQ ID NO: 93710 - DNA, 6027 bp, Artificial Sequence
  derived and/or modified sequence
atgctggaggccatcgacaagaacagagccctgcatgctgctgagcggctgcagaccaagctgcgggagagaggagatgtggccaatgaagacaagctgagcctgctgaagtctgtgctgcagagccccctcttcagccagatcctgagcctgcagacctctgtgcagcagctgaaggaccaggtgaacatcgccaccagcgccaccagcaacatcgagtatgcccacgtgccccacctgagccctgctgtgatccccaccctgcagaatgaaagcttcctgctgagccccaacaatggaaacctggaggccctgaccggccctggcatcccccacatcaacgggaagccagcctgtgatgaatttgaccagctgatcaagaacatggcccagggccgccacgtggaggtgtttgagctgctgaagcccccatctgggggcctgggcttctctgtggtgggcctgcggtctgagaacagaggagagctgggcatctttgtgcaggagatccaggagggctctgtggcccacagagatggccgcctgaaggagacagaccagatcctggccatcaatggccaggccctggaccagaccatcacccaccagcaggccatcagcatcctgcagaaggccaaggacacagtgcagctggtgattgcccggggcagcctgccccagctggtgagccccatcgtgagccgcagccccagcgctgccagcaccatcagcgcccacagcaaccctgtgcactggcagcacatggagaccatcgagctggtgaatgatggcagcggcctgggcttcggcatcatcggcggcaaggccactggagtcatcgtgaagaccatcctgcccggcggcgtggccgaccagcacggccgcctgtgcagcggggaccacatcctgaagattggagacacagacctggccggcatgagcagcgagcaggtggcccaggtgctgcggcagtgtggcaacagagtgaagctgatgattgcccggggggccatcgaggagaggacagcccccacagccctgggcatcaccctgagcagcagccccaccagcaccccagagctgcgggtggatgccagcacccagaagggggaggagagcgagacctttgatgtggagctgaccaagaatgtgcagggcctgggcatcaccatcgccggctacatcggggacaagaagctggagcccagcggcatctttgtgaagagcatcaccaagagcagcgctgtggagcatgatggccgcatccagatcggggaccagatcatcgctgtggatggcaccaacctgcagggcttcaccaaccagcaggccgtggaggtgctgcggcacacaggccagacagtgctgctgaccctgatgagaagaggcatgaagcaggaggccgagctgatgagccgggaggatgtgaccaaggatgctgacctgagccctgtgaatgccagcatcatcaaggagaactatgagaaggatgaggacttcctgagcagcaccaggaacaccaacatcctgcccacagaggaggagggctaccccctgctgtctgctgagattgaggagattgaagatgcccagaagcaggaggccgccctgctgaccaagtggcagaggatcatgggcatcaactatgaaattgtggtggcccacgtgtccaagttctctgaaaattctggcctgggcatcagcctggaggccaccgtgggccaccacttcatccgctctgtgctgcctgagggccctgtgggccacagcggcaagctgttctctggagatgagctgctggaggtgaatggcatcaccctgctgggggagaaccaccaggatgtggtgaacatcctgaaggagctgcccatcgaggtgaccatggtgtgctgcagaagaacagtgccccccaccacccagagcgagctggacagcctggacctgtgtgacatcgagctgacagagaagccccacgtggacctgggggagttcatcggcagcagcgagacagaagatcctgtgctggccatgacagatgctggccagagcacagaggaggtgcaggcccccctggccatgtgggaggccggcatccagcacatcgagctggagaagggcagcaagggcctgggcttcagcatcctggactaccaggaccccattgatcctgccagcaccgtcatcatcatccgcagcctggtgcctgggggcattgctgagaaggatggccgcctgctgcccggggaccggctgatgtttgtgaatgatgtgaacctggagaacagcagcctggaggaggccgtggaggccctgaagggggcccccagcggcaccgtgagaattggagtggccaagcccctgcccctgagccctgaggagggctacgtgtctgccaaggaggacagcttcctgtacccaccccacagctgtgaggaggccggcctggccgacaagcccctcttccgggctgacctggccctggtgggcaccaatgatgctgacctggtggatgagagcacctttgagagcccctacagcccagaaaatgacagcatctacagcacccaggccagcatcctgagcctgcacggcagcagctgtggagatggcctgaactacggcagcagcctgcccagcagcccccccaaggatgtgattgagaacagctgtgaccctgtgctggacctgcacatgagcctggaggagctgtacacccagaacctgctgcagaggcaggatgagaacacccccagcgtggacatctccatgggccctgccagcggcttcaccatcaatgactacaccccagccaatgccatcgagcagcagtatgaatgtgagaacaccatcgtgtggacagagagccacctgcccagcgaggtgatcagcagcgctgagctgcccagcgtgctgcctgacagcgctggaaaaggaagtgagtacctgctggagcagagcagcctggcctgcaatgcagaatgtgtgatgctgcagaatgtgtccaaggagagctttgagaggaccatcaacatcgccaagggcaacagcagcctgggcatgacagtgtctgccaacaaggatggcctgggcatgattgtgcgcagcatcatccacggcggggccatcagcagagatggccgcatcgccatcggggactgcatcctgagcatcaatgaggagagcaccatctctgtgaccaatgcccaggcccgggccatgctgcggcggcacagcctcatcggccctgacatcaagatcacctacgtgcctgctgagcacctggaggagttcaagatcagcctgggccagcagagcggccgggtgatggccctggacatcttcagcagctacacaggccgggacatccctgagctgcctgagcgggaggagggggagggggaggagagcgagctgcagaacacagcctacagcaactggaaccagccccggcgggtggagctgtggagggagcccagcaagagcctgggcatcagcatcgtgggcggccggggcatgggcagccggctgagcaatggagaggtgatgaggggcatcttcatcaagcacgtgctggaggacagccctgctgggaagaatggcaccctgaagccaggggaccgcatcgtggaggtggatggcatggacctgagagatgccagccatgagcaggccgtggaggccatcaggaaggccggcaaccctgtggtgttcatggtgcagagcatcatcaaccggccccgggcccccagccagagcgagagcgagcctgagaaggcccccctgtgcagcgtgcccccacctccacccagcgcctttgctgagatgggcagtgaccacacccagagcagcgccagcaagatcagccaggatgtggacaaggaggatgaatttggctacagctggaagaacatccgggagagatatggcaccctgaccggggagctgcacatgattgagctggagaagggccacagcggcctgggcctgagcctggccggcaacaaggacaggagcaggatgtctgtgttcatcgtgggcatcgaccccaacggggctgctgggaaggatggccgcctgcagattgctgatgagctgctggagatcaatggccagatcctgtatggccgcagccaccagaatgccagcagcatcatcaagtgtgcccccagcaaggtgaagatcatcttcatccggaacaaggatgctgtgaaccagatggctgtgtgccctggaaatgctgtggagcccctgcccagcaacagcgagaacctgcagaacaaggagacagagcccaccgtgaccaccagtgatgctgctgtggacctgagcagcttcaagaatgtgcagcacctggagctgcccaaggaccagggcggcctgggcatcgccatcagcgaggaggacaccctgtctggagtcatcatcaagagcctgacagaacatggagtggccgccacagatggccgcctgaaggtgggggaccagatcctggccgtggatgatgaaattgtggtgggctaccccatcgagaagttcatcagcctgctgaagacagccaagatgacagtgaagctgaccatccatgctgagaacccagacagccaggccgtgcccagcgctgctggagctgccagcggggagaagaagaacagcagccagagcctgatggtgccccagagcggcagccctgagcctgagagcatccggaacaccagccgcagcagcaccccagccatctttgccagtgaccctgccacctgccccatcatccctggctgtgagaccaccatcgagatcagcaaaggaagaacaggcctgggcctgagcatcgtgggcggcagtgacaccctgctgggcgccatcatcatccacgaggtgtatgaggagggcgccgcctgcaaggatggccgcctgtgggccggggaccagatcctggaggtgaatggcatcgacctgaggaaggccacccatgatgaggccatcaacgtgctgcggcagaccccccagagggtgcggctgaccctgtacagagatgaggccccctacaaggaggaggaggtgtgtgacaccctgaccatcgagctgcagaagaagccaggcaagggcctgggcctgagcatcgtgggcaagagaaatgacaccggggtgtttgtgtctgacatcgtgaagggcggcattgctgatgctgatggccgcctgatgcagggcgaccagatcctgatggtgaatggagaagatgtgagaaatgccacccaggaggccgtggccgccctgctgaaggtgtctgagggcagcctgagcagcttcaccttccccctgagcggcagcagcaccagcgagagcctggagagcagcagcaagaagaatgccctggccagcgagatccagggcctgaggacagtggagatgaagaagggccccacagacagcctgggcatcagcattgctgggggcgtgggcagccccctgggagatgtgcccatcttcatcgccatgatgcaccccaccggggtggccgcccagacccagaagctgcgggtgggggacagaattgtgaccatctgtggcaccagcacagagggcatgacccacacccaggccgtgaacctgctgaagaatgccagcggcagcattgagatgcaggtggtggccggaggagatgtgtctgtggtgacaggccaccagcaggagcccgccagcagcagcctgtccttcaccggcctgaccagcagcagcatcttccaggatgacctgggccccccccagtgcaagagcatcaccctggagcggggcccagatggcctgggcttcagcatcgtgggcggctacggcagcccccatggagacctgcccatctacgtgaagacagtgtttgccaagggggccgcctctgaagatggccgcctgaagagaggagaccagatcatcgctgtgaatggccagagcctggagggcgtgacccatgaggaggccgtggccatcctgaagaggaccaagggcaccgtgaccctgatggtgctgtcctag

SEQ ID NO: 93711 - DNA, 6176 bp, Artificial Sequence
  derived and/or modified sequence
tgctgttaatcatttcagagaagaacactgaactttgaaaaaaatgttggaagccattgacaaaaatcgggccctgcatgcagcagagcgcttgcaaaccaagctgcgagaacgtggggatgtagcaaatgaagacaaactgagccttctgaagtcagtcctgcagagccctctcttcagtcagattctgagccttcagacttctgtacagcagctgaaagaccaggtaaatattgcaacttcagcaacttcaaatattgaatatgcccacgttcctcatctcagcccagctgtgattcctactctgcaaaatgaatcgtttttattatccccaaacaatgggaatctggaagcacttacaggacctggtattccacacattaatgggaaacctgcttgtgatgaatttgatcagcttatcaaaaatatggcccagggtcgccatgtagaagtttttgagctcctcaaacctccatctggaggccttgggtttagtgttgtgggactaagaagtgaaaacagaggagagctgggaatatttgttcaagagatacaagagggcagtgtggcccatagagatggaagattgaaagaaactgatcaaattcttgctatcaatggacaggctcttgatcagacaattacacatcagcaggctatcagcatcctgcagaaagccaaagatactgtccagctagttattgccagaggctcattgcctcagcttgtcagccccatagtttcccgttctccatctgcagccagcacaatttcagctcactctaatccggttcactggcaacacatggaaacgattgaattggtgaatgatggatctggtttgggatttggcatcataggaggaaaagcaactggtgtgatagtaaaaaccattctgcctggaggagtagctgatcagcatgggcgtttatgcagtggagaccacattctaaagattggtgacacagatctagcaggaatgagcagtgagcaagtagcacaagtccttaggcaatgtggaaatagagttaagttgatgattgcaagaggtgccatagaagaacgtacagcacccactgctttgggcatcaccctctcctcatccccaacttcaacaccagagttgcgggttgatgcttctactcagaaaggtgaagaaagtgagacatttgatgtagaactcactaaaaatgtccaaggattaggaattaccattgctggctacattggagataaaaaattggaaccttcaggaatctttgtaaagagcattacaaaaagcagtgccgttgagcatgatggaagaatccaaattggagaccaaattatagcagtagatggcacaaaccttcagggttttactaatcagcaagcagtagaggtattgcgacatacaggacaaactgtgctcctgacactaatgaggagaggaatgaagcaggaagccgagctcatgtcaagggaagacgtcacaaaagatgcagatttgtctcctgttaatgccagcataatcaaagaaaattatgaaaaagatgaagattttttatcttcgacgagaaacaccaacatattaccaactgaagaagaagggtatccattactgtcagctgagatagaagaaatagaagatgcacaaaaacaagaagctgctctgctgacaaaatggcaaaggattatgggaattaactatgaaatagtggtggcccatgtgagcaagtttagtgagaacagtggattggggataagcctggaagcgacagtgggacatcattttatccgatctgttctaccagagggtcctgttggacacagcgggaagctcttcagtggagacgagctattggaagtaaatggcataactttacttggggaaaatcaccaagatgtggtgaatatcttaaaagaactgcctatagaagtgacaatggtgtgctgtcgtcgaactgtgccacccaccacccaatcagaattggatagcctggacttatgtgatattgagctaacagaaaagcctcacgtagatctaggtgagttcatcgggtcatcagagacagaggatccagtgctggcgatgactgatgcgggtcagagtacagaagaggttcaagcacctttggccatgtgggaggctggcattcagcacatagagctggagaaagggagcaaaggacttggttttagcattttagattatcaggatccaattgatccagcaagcactgtgattataattcgttctttggtgcctggcggcattgctgaaaaggatggacgacttcttcctggtgaccgactcatgtttgtaaacgatgttaacttggaaaacagcagtcttgaggaagctgtagaagcactgaagggagcaccgtcagggactgtgagaataggagttgctaagcctttacccctttcaccagaagaaggttatgtttctgctaaggaggattcctttctctacccaccacactcctgtgaggaagcagggctggctgacaaacccctcttcagggctgacttggctctggtgggcacaaatgatgctgacttagtagatgaatccacatttgagtctccatactctcctgaaaatgacagcatctactctactcaagcctctattttatctcttcatggcagttcttgtggtgatggcctgaactatggttcttcccttccatcatctcctcctaaggatgttattgaaaattcttgtgatccagtacttgatctgcatatgtctctggaggaactatatacccagaatctcctgcaaagacaggatgagaatacaccttcggtggacataagtatggggcctgcttctggctttactataaatgactacacacctgcaaatgctattgaacaacaatatgaatgtgaaaacacaatagtgtggactgaatctcatttaccaagtgaagttatatcaagtgcagaacttccttctgtgctacccgattcagctggaaagggctctgagtacctgcttgaacagagctccctggcctgtaatgctgagtgtgtcatgcttcaaaatgtatctaaagaatcttttgaaaggactattaatatagcaaaaggcaattctagcctaggaatgacagttagtgctaataaagatggcttggggatgatcgttcgaagcattattcatggaggtgccattagtcgagatggccggattgccattggggactgcatcttgtccattaatgaagagtctaccatcagtgtaaccaatgcccaggcacgagctatgttgagaagacattctctcattggccctgacataaaaattacttatgtgcctgcagaacatttggaagagttcaaaataagcttgggacaacaatctggaagagtaatggcactggatattttttcttcatacactggcagagacattccagaattaccagagcgagaagagggagagggtgaagaaagcgaacttcaaaacacagcatatagcaattggaatcagcccaggcgggtggaactctggagagaaccaagcaaatccttaggcatcagcattgttggtggacgagggatggggagtcggctaagcaatggagaagtgatgaggggcattttcatcaaacatgttctggaagatagtccagctggcaaaaatggaaccttgaaacctggagatagaatcgtagaggtggatggaatggacctcagagatgcaagccatgaacaagctgtggaagccattcggaaagcaggcaaccctgtagtctttatggtacagagcattataaacagaccaagggcacccagtcagtcagagtcagagccagagaaggctccattgtgcagtgtgcccccaccccctccttcagcctttgccgaaatgggtagtgatcacacacagtcatctgcaagcaaaatctcacaagatgtggacaaagaggatgagtttggttacagctggaaaaatatcagagagcgttatggaaccctaacaggcgagctgcatatgattgaactggagaaaggtcatagtggtttgggcctaagtcttgctgggaacaaagaccgatccaggatgagtgtcttcatagtggggattgatccaaatggagctgcaggaaaagatggtcgattgcaaattgcagatgagcttctagagatcaatggtcagattttatatggaagaagtcatcagaatgcctcatcaatcattaaatgtgccccttctaaagtgaaaataatttttatcagaaataaagatgcagtgaatcagatggccgtatgtcctggaaatgcagtagaacctttgccttctaactcagaaaatcttcaaaataaggagacagagccaactgttactacttctgatgcagctgtggacctcagttcatttaaaaatgtgcaacatctggagcttcccaaggatcaggggggtttgggtattgctatcagcgaagaagatacactcagtggagtcatcataaagagcttaacagagcatggggtagcagccacggatggacgactcaaagtcggagatcagatactggctgtagatgatgaaattgttgttggttaccctattgaaaagtttattagccttctgaagacagcaaagatgacagtaaaacttaccatccatgctgagaatccagattcccaggctgttccttcagcagctggtgcagccagtggagaaaaaaagaacagctcccagtctctgatggtcccacagtctggctccccagaaccggagtccatccgaaatacaagcagatcatcaacaccagcaatttttgcttctgatcctgcaacctgccccattatccctggctgcgaaacaaccatcgagatttccaaagggcgaacagggctgggcctgagcatcgttgggggttcagacacgctgctgggtgccattattatccatgaagtttatgaagaaggagcagcatgtaaagatggaagactctgggctggagatcagatcttagaggtgaatggaattgacttgagaaaggccacacatgatgaagcaatcaatgtcctgagacagacgccacagagagtgcgcctgacactctacagagatgaggccccatacaaagaggaggaagtgtgtgacaccctcactattgagctgcagaagaagccgggaaaaggcctaggattaagtattgttggtaaaagaaacgatactggagtatttgtgtcagacattgtcaaaggaggaattgcagatgccgatggaagactgatgcagggagaccagatattaatggtgaatggggaagacgttcgtaatgccacccaagaagcggttgccgctttgctaaaggtgagtgaaggcagcctgtcatctttcacttttccactctctggatccagtacatctgagtcactggaaagtagctcaaagaagaatgcattggcatctgaaatacagggattaagaacagtcgaaatgaaaaagggccctactgactcactgggaatcagcattgctggaggagtaggcagcccacttggtgatgtgcctatatttattgcaatgatgcacccaactggagttgcagcacagacccaaaaactcagagttggggataggattgtcaccatctgtggcacatccactgagggcatgactcacacccaagcagttaacctactgaaaaatgcatctggctccattgaaatgcaggtggttgctggaggagacgtgagtgtggtcacaggtcatcagcaggagcctgcaagttccagtctttctttcactgggctgacgtcaagcagtatatttcaggatgatttaggacctcctcaatgtaagtctattacactagagcgaggaccagatggcttaggcttcagtatagttggaggatatggcagccctcatggagacttacccatttatgttaaaacagtgtttgcaaagggagcagcctctgaagacggacgtctgaaaaggggcgatcagatcattgctgtcaatgggcagagtctagaaggagtcacccatgaagaagctgttgccatccttaaacggacaaaaggcactgtcactttgatggttctctcttgaattggctgccagaattgaaccaacccaacccctagctcacctcctactgtaaagagaatgcactggtcctgacaatttttatgctgtgttcagccgggtcttcaaa

SEQ ID NO: 93712 - DNA, 6027 bp, Artificial Sequence
  derived and/or modified sequence
atgctggaggccatcgacaagaaccgggccctgcacgccgccgagcgcctacaaacaaaattaagagagaggggtgacgtggctaatgaggataaactcagtctcctgaaatcagtgctccaaagtcccctcttctcgcaaattctgtccctccaaacatcggttcagcagctgaaggatcaggtgaacattgcaacctccgccacctctaacattgaatacgcccacgttccgcatctatcaccagccgtgatccccactcttcagaatgagtcttttctcctgtcccctaataacgggaatctggaagcgctgacaggacccggcatcccacatatcaatggcaagcccgcttgcgatgagttcgaccaattaataaaaaatatggcccagggaagacatgtggaggtttttgagctgttaaaacctccttcaggtggattaggcttctccgtagttggtctgaggtctgagaatcgcggggagctcggaatattcgtccaggaaatccaggaaggctctgtggctcacagggacggcagacttaaggaaaccgatcagatcttagccatcaatggacaggcactcgaccaaacgatcacacaccaacaggccatcagcatactgcagaaggccaaagacaccgtccagctggtgatcgccagaggctctttgccacagcttgtgtcccctatagtttcccgtagcccttctgctgcctccacaattagcgctcactctaatcccgtacactggcagcacatggagactatcgagttggttaatgatgggtcagggctgggcttcggaatcatcggaggcaaggccactggtgtgatcgtgaaaacaattctccccgggggcgtggcggaccagcatggccgcctgtgcagcggcgaccacatcctgaagattggcgatactgacttggccggcatgagctcagaacaggtagcccaggtcctccgacaatgcggcaaccgggtcaagcttatgatagctcgtggtgcgatcgaggagcgaacggcccccactgccctagggatcaccttgtctagctccccaaccagcacgccagagctccgagtggacgccagtactcaaaagggcgaggaatctgagacatttgacgtggagttgacaaagaatgtgcaagggttgggcatcacgatcgccggttatatcggggacaagaaactggaaccgtccggtatctttgtgaagtccattaccaaatcgagcgcggtcgagcacgatgggagaattcagattggtgaccagatcatcgctgtcgatggaactaacctgcagggatttactaatcagcaggccgtagaggttttgaggcacaccggtcagacagtgctcctcactctgatgcgacgaggcatgaagcaggaagccgaactgatgtcccgggaggacgtgacaaaggacgcggatctgtcacccgtcaatgcatctatcatcaaagaaaattacgaaaaagatgaagacttcctatcgtccaccaggaatactaacattcttccgacagaagaggaggggtaccctctgctgtccgccgagatcgaggaaatcgaagacgcacagaaacaagaggcagctttgctcaccaagtggcagcgtatcatgggcatcaattatgagattgttgtagcgcatgtcagcaaattctccgagaacagcggcttagggatcagtctagaggcaactgtgggtcaccattttatcaggtccgtactccctgaaggaccagtcggtcattcaggcaaattgttcagtggggatgaactattggaggtgaacggcattacactcctgggagagaatcaccaagatgttgtgaatattctaaaagagttgcccatagaagtgacaatggtatgctgccgccgaacagttcccccaactacacagagcgaactcgattctctagacctgtgtgacatcgagctgaccgaaaaaccacacgtagaccttggtgaatttataggatcttccgaaaccgaggatccagtactcgctatgacagacgctggacagtcaacagaggaggtccaggcccccctggccatgtgggaggccggcatacagcacattgagctggaaaaaggttcaaaagggctaggcttctcgatcctagattaccaggacccaattgaccccgctagtactgtgattatcattagaagtctcgttccaggcggcatagccgagaaggatggccgattgctccctggagatcggttaatgttcgtgaacgacgtcaatttagagaattctagcctggaggaggcggtcgaagcgctgaagggggccccaagcgggactgtcaggatcggggtggctaaacccttaccactctcccctgaagaaggatacgtatcagcgaaggaggattcttttctttatcctcctcactcgtgcgaggaggcggggttagcagacaagccactttttagagccgacctggcgctggtgggcactaacgacgctgatctcgtggatgagtctacgttcgagtctccatatagccctgagaacgactcgatatatagtactcaagccagcatactgtcacttcacggcagctcttgcggagatgggctgaactacgggtctagcctacctagcagtccccctaaggacgtaatcgagaacagctgcgatccagttctcgacctccacatgtcactggaggagctttacacccaaaatctgctgcagaggcaggacgagaacactcctagcgttgatatcagcatgggacctgcctccggtttcaccataaatgattacacccccgctaacgccatcgaacagcagtacgaatgcgagaataccatcgtctggaccgagagtcatctcccatccgaagtgataagcagcgccgaactcccgtcggtcctgcctgattccgctgggaaggggtcggaatacctcctggaacaatcttcattggcctgcaatgcagagtgcgttatgcttcaaaatgtgtctaaggagtcttttgaacgcactataaatatagccaagggcaacagttctctcggcatgaccgtatcggccaataaggatgggctgggaatgattgtgcgatctattatccatggtggagccatcagtagggacggccgcatcgcgatcggagattgcatcctgtctattaatgaagagagcacaatctcagtgacaaacgcccaggccagggccatgttgcgtagacacagcctgatcggacctgacataaagatcacatatgtgcccgccgagcacttggaagaatttaagatctccctgggccaacaatctggacgcgtaatggccctcgacatattctcatcttacacaggcagggacattccggagttgccagaaagagaggaaggggagggtgaagaatccgagttgcagaacacggcgtacagcaactggaatcaaccccgacgtgtggaactgtggcgggaaccatctaaatcactgggaatctccattgtggggggcaggggaatgggttccaggttgtctaatggcgaagttatgcgcggcattttcatcaagcacgtgttggaagatagccccgctggaaagaatggaaccctgaagcccggggatagaatcgtggaggtagacggaatggacctgagggacgcctctcacgaacaagccgtggaagctattagaaaagcgggcaatcccgtcgtttttatggtgcagagcatcataaacaggcctcgcgcgccttcccagtctgagtcagagccagaaaaggctccactgtgcagcgtgcctcctcctccccctagtgccttcgctgagatggggagtgaccacactcaaagcagtgccagtaagatcagtcaggacgttgacaaggaggatgaatttggatatagctggaagaacattcgcgagcggtatggcacattgactggcgagctacatatgattgagttagaaaagggtcatagcggactcgggctgtctctggccggcaataaggaccgctctcggatgtcagtattcatcgtcggcattgatcctaatggtgcagctggcaaagacggcaggctgcagatcgctgatgagctattggagatcaacggtcaaatactgtacggccgaagccatcaaaatgcgagctctatcatcaagtgtgctccttccaaagtcaaaatcatcttcatcaggaataaggacgccgttaatcagatggcagtatgccctggcaacgctgttgagcctctgcctagcaattccgagaacctgcagaataaggagactgaacccaccgtaacgacctcagacgctgcagtggacctttcttcttttaagaatgtacaacaccttgaactgcctaaggaccagggcggcctgggaattgcaatctccgaggaagacacattatcgggggtgatcatcaagtcacttacggagcacggagtggccgccacagacggcagactgaaagtgggagatcagatccttgcggtggatgacgaaatcgtggtggggtatccaattgagaagttcatctctctcctaaaaacagcaaaaatgaccgtcaaactgaccatacacgccgagaatccggacagccaggccgtgccaagcgccgccggtgccgcctccggtgagaaaaagaacagctctcaatcattgatggtaccccagtcggggagtcccgaaccagagtctatacgcaacacctctcgatctagtacccctgccatttttgcatctgacccagcaacctgcccaattattccggggtgcgagactacgattgagatctcaaaaggaagaacggggctgggtttgagtattgtgggcggaagcgacaccctcttgggggccatcatcatccatgaggtgtacgaagagggggctgcctgtaaggatggccgtttgtgggcaggcgatcagatcctcgaagtgaacggtatcgacctacgcaaggccacacacgacgaagcgattaatgtgctccgacagacaccacagagagtgcgtttgacgttgtatagggacgaagccccatacaaagaagaagaggtctgcgatacacttaccatcgaattgcaaaaaaaacccgggaaaggactcggtttgtctatagtgggtaagcgcaacgacacaggcgtgtttgtatccgatatcgtgaaggggggtatcgctgacgctgacggccgcctcatgcaaggcgatcagatccttatggttaacggtgaagatgtgcgcaatgcaactcaggaagccgtggccgctctcctcaaggtgagcgaagggtcgctaagcagctttacgtttccactctccgggagctccacaagtgaatcactggagtctagttccaagaaaaacgcactggcttccgagatacaaggcctgcgcactgttgaaatgaagaagggcccgaccgattcattgggtattagcatagccggcggcgtgggctctcctctgggagacgtgcctatatttatcgccatgatgcacccaacgggcgttgctgcccagacacagaagctcagagtcggcgacagaatcgtgactatatgtggaacctctactgaaggtatgactcatactcaggctgtgaacctcctgaaaaatgccagtgggagcattgaaatgcaggtggtcgccgggggcgacgtgtctgtcgtgactggccaccagcaggaaccagccagctcaagcctgtctttcactggactcacctcctcctcaatatttcaagatgacctggggcctccccagtgtaaaagtattacgctagagagaggacccgatggactggggttcagcattgtgggcggctatgggagcccccatggggacctgcctatttacgttaaaactgtgttcgccaaaggtgccgccagcgaagacgggcgattaaagcgtggcgatcaaatcattgccgtcaacggacaatcccttgagggcgttacgcacgaagaggccgtggcaattctcaagcgcacaaagggcacagtgacactgatggtactcagttag

SEQ ID NO: 93713 - DNA, 6026 bp, Artificial Sequence
  derived and/or modified sequence
atgctggaagctattgataaaaatcgggctctacacgccgctgaacggctccagactaagctccgggagcggggagacgtcgcgaacgaagacaagttgtcactgctcaaaagcgtcctccaaagtcctctgttctcgcaaattctttccttgcagaccagtgtgcaacagctcaaggaccaggttaacattgctacttccgccacgagcaatattgagtacgcccatgtccctcacctgagtccagcggtgattccgacgctgcagaatgaatcatttcttctgagccccaacaatggcaacctggaggccctaaccggacccggtatccctcatatcaatggaaagccggcatgtgacgagttcgaccaactgatcaagaacatggcacagggacggcacgtggaggtgttcgaattgctgaagccacctagtggagggctaggctttagtgtggtgggcctccggtccgaaaataggggagagctgggaatcttcgtacaagagatccaggaggggtctgtggcccaccgagacggtcgcttgaaggagaccgatcaaatcttagcaatcaacggacaggccctggaccagaccataactcaccaacaagctatcagtattttacagaaagccaaggacactgttcaactggtcattgcaagaggctcactcccccagttagtgagccccatcgtgtcccggagcccatctgcagccagcaccatctcagcccactccaacccagtgcattggcagcatatggaaacaattgagctggtaaatgacgggtctgggcttggtttcggcattatagggggaaaagctaccggcgtaatcgtgaagactatcctgcccggtggcgtggcggaccagcatggtaggctctgctctggcgaccacatcctgaagattggcgataccgacctcgcagggatgtcctccgaacaggtcgcacaggtgctgcggcagtgtggtaacagagttaagttgatgatcgcaagaggagctatagaagaacgcacggcgccaacggcactgggaataacactctcatccagccccacatcaacccctgagcttagggtagacgcatccacgcagaaaggagaggaaagcgaaacgtttgacgtggagctgactaaaaacgtgcagggcctggggattacaattgccggatatatcggtgataaaaagctcgaaccctctgggatcttcgtcaaatccattaccaaaagcagcgccgtggagcacgacggaaggatacagatcggcgaccagatcattgctgtagatggaaccaacttacagggctttactaatcagcaggctgtggaggtgctccgacacaccggccaaacagtgctgttaaccctcatgcgcaggggtatgaagcaggaagccgagctgatgtctcgggaggacgttacaaaggacgccgacctttcacccgtgaacgcttcaatcatcaaggaaaattatgagaaggatgaggatttcctctcttctaccaggaacaccaatattttgccaaccgaggaagaaggataccctctgctgagcgcggagatcgaagagatagaagatgcgcaaaagcaggaggctgccctcctgaccaaatggcaaagaatcatgggtatcaattacgagatcgtagtagcacatgtctccaagttcagcgaaaactctggcctgggaatctcccttgaggccacggtcgggcatcattttatccgctctgtactgcctgaaggtccagtgggacattcaggtaaactgttcagcggcgatgagctcttggaagtcaacggaattacattgctcggcgagaatcatcaggacgtcgtcaatattctaaaggaactgcctatagaggtgacaatggtgtgctgtagacgcacagtgccacctacaacgcagtctgagctggattccctggacctgtgcgacattgaacttaccgagaagccacacgtggatctcggggaattcatcggcagttccgagacggaagaccccgtgctggccatgacagacgccggacagtctacagaggaggtgcaggcaccccttgccatgtgggaggctggcattcaacacatcgaattggagaagggatcgaaggggttagggtttagtatacttgattaccaggaccctattgaccctgccagcacagtgatcatcatccggagtctggtgccaggagggatcgcagagaaagacggccgactgctccctggagatcgtctgatgttcgtaaatgacgtaaacttggaaaattcctcactcgaagaggcagtggaagccttaaagggggcaccttcaggaaccgtgagaatcggcgtcgccaagccccttccactctccccggaagaggggtacgtgtcagctaaagaggactcttttctgtacccgcctcacagttgcgaagaagctggactggctgataagccactctttagagctgatctcgctctcgtcggtacgaacgacgcggatttagttgatgagagcacgttcgagagtccatacagccctgaaaacgatagtatttacagcacccaagccagtattctgtctctgcacggctcaagttgcggggacggcctgaactatggctcctccctgccctcttcacctccaaaggatgtcatcgagaacagctgcgatcctgtacttgacctccacatgtctcttgaagagttatatacccagaatctgcttcagcgccaggacgagaacaccccgagcgtggacattagcatgggcccagcctccgggttcaccattaatgactatacacccgctaatgctatcgagcagcagtatgagtgcgaaaatacgatcgtgtggacagagtcccacttgccgtctgaggttatcagcagtgctgagctccctagtgtgctccctgactcggcaggcaagggctccgaataccttttggagcaatcaagccttgcatgcaacgccgagtgcgtcatgttgcagaacgtttccaaagaaagcttcgaaaggaccattaacatcgcgaaaggaaactcatctctggggatgacggtctctgctaataaggacgggcttgggatgattgtacgcagtatcattcacgggggagccatctcccgcgatggccgtattgctattggagactgtatactttcaatcaatgaagaaagtactatctccgtgacaaacgcccaggcccgtgctatgctcaggaggcactctctcattggccctgatatcaagatcacgtatgtccccgctgagcatcttgaggaattcaagataagcttgggccagcagtcaggcagagtgatggccctagacatttttagcagttacaccggacgggacattccagagcttccggaaagggaggagggggaaggagaagaatctgaactgcagaatactgcttactccaactggaatcagccacgtcgcgttgagctctggagagaacccagcaaatcactgggcatttctatcgtgggcggtagaggcatggggtcaagattaagcaacggcgaggtcatgagggggatctttattaagcacgtacttgaggactcccctgcagggaaaaacgggactctcaagcccggtgatcggatcgtggaagttgatgggatggacttgagagatgcaagtcacgaacaggctgtggaggccattcgaaaggctgggaatcctgtggtttttatggtccaatccataatcaacaggccaagagcaccctcccagtcagagtccgagcctgaaaaagcaccgttatgcagtgtgccaccgccacccccaagcgctttcgccgagatgggcagtgaccacactcaatcgtctgcatccaagataagccaagacgttgacaaggaagacgagttcggatatagttggaaaaacatacgcgagagatatggaacactgacaggcgagcttcacatgattgaactggagaaggggcacagcgggttaggcctcagcttagcaggcaacaaggacagatctcggatgagtgtgttcattgtgggtattgatcccaacggagcggcaggaaaagatgggaggctgcagatcgccgatgaattgctcgagatcaatggtcaaattttgtacggccgatctcaccaaaacgcctcaagtatcatcaagtgcgcaccttccaaagtcaagatcattttcattagaaataaagatgctgtgaatcagatggccgtgtgcccgggaaacgccgtagaacccctcccttccaattctgaaaacctccagaataaagaaactgagcccacagtgacaacatctgacgccgctgtggatctgagtagcttcaagaatgttcagcacctcgagttgccaaaagatcagggcggtttgggtatcgctattagtgaggaagataccctgagtggagttattataaagagtctgacagagcacggggtggctgccaccgatggaaggttgaaggtcggcgaccagatcctggccgtcgacgatgagattgtggtggggtatcccatagaaaaattcatttcgttactgaaaactgccaagatgacagtgaaactgaccattcacgccgagaaccccgacagccaagccgtaccatctgccgcaggcgctgcctctggcgaaaaaaagaatagcagccaatcactgatggtgccccagagtggaagcccagaaccggaaagcatccgaaacacttcccgcagctccactccggctatcttcgcttcagatcccgctacttgccctataattccaggatgcgaaacaaccatagagattagcaagggtcgtaccggcctcggcctgtctattgtcggtgggtctgacaccctgttgggtgcaatcattatccatgaagtctatgaggagggcgctgcctgcaaggatggtagattgtgggccggtgatcagatcctggaagttaacggtattgatctgcggaaggcaacccatgacgaagcaatcaatgtcctccggcagactcctcagagagtgaggctgacactctacagagatgaagccccatacaaggaggaagaggtgtgcgataccttaacaattgagcttcagaaaaaaccgggaaaaggcctgggattgagcatcgtgggcaagagaaatgacacaggcgtgttcgtctctgatatcgtgaaagggggaattgccgatgctgatggacgcctgatgcaaggcgatcagattcttatggtcaacggcgaggatgtgaggaatgccacacaggaggccgtggctgcgttactgaaagtatccgaggggtcgcttagcagtttcaccttcccgctatccggaagcagtaccagcgagagtctggagagtagctccaagaagaatgcattagcatccgagattcaaggactgagaacagtggagatgaaaaagggccctacagactcgttagggatctccattgctggtggcgtgggcagtcccctcggagatgtccctatttttattgccatgatgcaccctacaggagttgccgctcagactcagaaacttcgggtcggcgaccgaattgtgactatctgtggaaccagcaccgaggggatgacccacacacaagccgtgaaccttctgaagaatgctagcggcagcatcgagatgcaggttgtggccggaggagatgtgagtgtagtgacaggacaccagcaggagcccgcttcaagtagcctgtctttcacaggtctgaccagcagcagcatttttcaggatgatctgggtccgccacagtgtaagtcgattacactggaaagaggcccagatgggctcggctttagcattgtggggggatacggctccccccacggggacctaccaatttacgtcaaaaccgttttcgcaaaaggcgcagctagcgaggacgggcgtctaaaacgcggtgaccagatcattgcagtaaacggccaatctctggagggcgtaacgcatgaggaagcagtagccatcctgaagcgaaccaaagggactgtaacactgatggtcctgtcata

SEQ ID NO: 93714 - DNA, 6027 bp, Artificial Sequence
  derived and/or modified sequence
atgctggaggccatcgacaagaacagagccctgcacgccgccgagagactgcagaccaagctgagagagagaggcgacgtggccaacgaggacaagctgagcctgctgaagagcgtgctgcagagccccctgttcagccagatcctgagcctgcagaccagcgtgcagcagctgaaggaccaggtgaacatcgccaccagcgccaccagcaacatcgagtacgcccacgtgccccacctgagccccgccgtgatccccaccctgcagaacgagagcttcctgctgagccccaacaacggcaacctggaggccctgaccggccccggcatcccccacatcaacggcaagcccgcctgcgacgagttcgaccagctgatcaagaacatggcccagggcagacacgtggaggtgttcgagctgctgaagccccccagcggcggcctgggcttcagcgtggtgggcctgagaagcgagaacagaggcgagctgggcatcttcgtgcaggagatccaggagggcagcgtggcccacagagacggcagactgaaggagaccgaccagatcctggccatcaacggccaggccctggaccagaccatcacccaccagcaggccatcagcatcctgcagaaggccaaggacaccgtgcagctggtgatcgccagaggcagcctgccccagctggtgagccccatcgtgagcagaagccccagcgccgccagcaccatcagcgcccacagcaaccccgtgcactggcagcacatggagaccatcgagctggtgaacgacggcagcggcctgggcttcggcatcatcggcggcaaggccaccggcgtgatcgtgaagaccatcctgcccggcggcgtggccgaccagcacggcagactgtgcagcggcgaccacatcctgaagatcggcgacaccgacctggccggcatgagcagcgagcaggtggcccaggtgctgagacagtgcggcaacagagtgaagctgatgatcgccagaggcgccatcgaggagagaaccgcccccaccgccctgggcatcaccctgagcagcagccccaccagcacccccgagctgagagtggacgccagcacccagaagggcgaggagagcgagaccttcgacgtggagctgaccaagaacgtgcagggcctgggcatcaccatcgccggctacatcggcgacaagaagctggagcccagcggcatcttcgtgaagagcatcaccaagagcagcgccgtggagcacgacggcagaatccagatcggcgaccagatcatcgccgtggacggcaccaacctgcagggcttcaccaaccagcaggccgtggaggtgctgagacacaccggccagaccgtgctgctgaccctgatgagaagaggcatgaagcaggaggccgagctgatgagcagagaggacgtgaccaaggacgccgacctgagccccgtgaacgccagcatcatcaaggagaactacgagaaggacgaggacttcctgagcagcaccagaaacaccaacatcctgcccaccgaggaggagggctaccccctgctgagcgccgagatcgaggagatcgaggacgcccagaagcaggaggccgccctgctgaccaagtggcagagaatcatgggcatcaactacgagatcgtggtggcccacgtgagcaagttcagcgagaacagcggcctgggcatcagcctggaggccaccgtgggccaccacttcatcagaagcgtgctgcccgagggccccgtgggccacagcggcaagctgttcagcggcgacgagctgctggaggtgaacggcatcaccctgctgggcgagaaccaccaggacgtggtgaacatcctgaaggagctgcccatcgaggtgaccatggtgtgctgcagaagaaccgtgccccccaccacccagagcgagctggacagcctggacctgtgcgacatcgagctgaccgagaagccccacgtggacctgggcgagttcatcggcagcagcgagaccgaggaccccgtgctggccatgaccgacgccggccagagcaccgaggaggtgcaggcccccctggccatgtgggaggccggcatccagcacatcgagctggagaagggcagcaagggcctgggcttcagcatcctggactaccaggaccccatcgaccccgccagcaccgtgatcatcatcagaagcctggtgcccggcggcatcgccgagaaggacggcagactgctgcccggcgacagactgatgttcgtgaacgacgtgaacctggagaacagcagcctggaggaggccgtggaggccctgaagggcgcccccagcggcaccgtgagaatcggcgtggccaagcccctgcccctgagccccgaggagggctacgtgagcgccaaggaggacagcttcctgtaccccccccacagctgcgaggaggccggcctggccgacaagcccctgttcagagccgacctggccctggtgggcaccaacgacgccgacctggtggacgagagcaccttcgagagcccctacagccccgagaacgacagcatctacagcacccaggccagcatcctgagcctgcacggcagcagctgcggcgacggcctgaactacggcagcagcctgcccagcagcccccccaaggacgtgatcgagaacagctgcgaccccgtgctggacctgcacatgagcctggaggagctgtacacccagaacctgctgcagagacaggacgagaacacccccagcgtggacatcagcatgggccccgccagcggcttcaccatcaacgactacacccccgccaacgccatcgagcagcagtacgagtgcgagaacaccatcgtgtggaccgagagccacctgcccagcgaggtgatcagcagcgccgagctgcccagcgtgctgcccgacagcgccggcaagggcagcgagtacctgctggagcagagcagcctggcctgcaacgccgagtgcgtgatgctgcagaacgtgagcaaggagagcttcgagagaaccatcaacatcgccaagggcaacagcagcctgggcatgaccgtgagcgccaacaaggacggcctgggcatgatcgtgagaagcatcatccacggcggcgccatcagcagagacggcagaatcgccatcggcgactgcatcctgagcatcaacgaggagagcaccatcagcgtgaccaacgcccaggccagagccatgctgagaagacacagcctgatcggccccgacatcaagatcacctacgtgcccgccgagcacctggaggagttcaagatcagcctgggccagcagagcggcagagtgatggccctggacatcttcagcagctacaccggcagagacatccccgagctgcccgagagagaggagggcgagggcgaggagagcgagctgcagaacaccgcctacagcaactggaaccagcccagaagagtggagctgtggagagagcccagcaagagcctgggcatcagcatcgtgggcggcagaggcatgggcagcagactgagcaacggcgaggtgatgagaggcatcttcatcaagcacgtgctggaggacagccccgccggcaagaacggcaccctgaagcccggcgacagaatcgtggaggtggacggcatggacctgagagacgccagccacgagcaggccgtggaggccatcagaaaggccggcaaccccgtggtgttcatggtgcagagcatcatcaacagacccagagcccccagccagagcgagagcgagcccgagaaggcccccctgtgcagcgtgcccccccccccccccagcgccttcgccgagatgggcagcgaccacacccagagcagcgccagcaagatcagccaggacgtggacaaggaggacgagttcggctacagctggaagaacatcagagagagatacggcaccctgaccggcgagctgcacatgatcgagctggagaagggccacagcggcctgggcctgagcctggccggcaacaaggacagaagcagaatgagcgtgttcatcgtgggcatcgaccccaacggcgccgccggcaaggacggcagactgcagatcgccgacgagctgctggagatcaacggccagatcctgtacggcagaagccaccagaacgccagcagcatcatcaagtgcgcccccagcaaggtgaagatcatcttcatcagaaacaaggacgccgtgaaccagatggccgtgtgccccggcaacgccgtggagcccctgcccagcaacagcgagaacctgcagaacaaggagaccgagcccaccgtgaccaccagcgacgccgccgtggacctgagcagcttcaagaacgtgcagcacctggagctgcccaaggaccagggcggcctgggcatcgccatcagcgaggaggacaccctgagcggcgtgatcatcaagagcctgaccgagcacggcgtggccgccaccgacggcagactgaaggtgggcgaccagatcctggccgtggacgacgagatcgtggtgggctaccccatcgagaagttcatcagcctgctgaagaccgccaagatgaccgtgaagctgaccatccacgccgagaaccccgacagccaggccgtgcccagcgccgccggcgccgccagcggcgagaagaagaacagcagccagagcctgatggtgccccagagcggcagccccgagcccgagagcatcagaaacaccagcagaagcagcacccccgccatcttcgccagcgaccccgccacctgccccatcatccccggctgcgagaccaccatcgagatcagcaagggcagaaccggcctgggcctgagcatcgtgggcggcagcgacaccctgctgggcgccatcatcatccacgaggtgtacgaggagggcgccgcctgcaaggacggcagactgtgggccggcgaccagatcctggaggtgaacggcatcgacctgagaaaggccacccacgacgaggccatcaacgtgctgagacagaccccccagagagtgagactgaccctgtacagagacgaggccccctacaaggaggaggaggtgtgcgacaccctgaccatcgagctgcagaagaagcccggcaagggcctgggcctgagcatcgtgggcaagagaaacgacaccggcgtgttcgtgagcgacatcgtgaagggcggcatcgccgacgccgacggcagactgatgcagggcgaccagatcctgatggtgaacggcgaggacgtgagaaacgccacccaggaggccgtggccgccctgctgaaggtgagcgagggcagcctgagcagcttcaccttccccctgagcggcagcagcaccagcgagagcctggagagcagcagcaagaagaacgccctggccagcgagatccagggcctgagaaccgtggagatgaagaagggccccaccgacagcctgggcatcagcatcgccggcggcgtgggcagccccctgggcgacgtgcccatcttcatcgccatgatgcaccccaccggcgtggccgcccagacccagaagctgagagtgggcgacagaatcgtgaccatctgcggcaccagcaccgagggcatgacccacacccaggccgtgaacctgctgaagaacgccagcggcagcatcgagatgcaggtggtggccggcggcgacgtgagcgtggtgaccggccaccagcaggagcccgccagcagcagcctgagcttcaccggcctgaccagcagcagcatcttccaggacgacctgggccccccccagtgcaagagcatcaccctggagagaggccccgacggcctgggcttcagcatcgtgggcggctacggcagcccccacggcgacctgcccatctacgtgaagaccgtgttcgccaagggcgccgccagcgaggacggcagactgaagagaggcgaccagatcatcgccgtgaacggccagagcctggagggcgtgacccacgaggaggccgtggccatcctgaagagaaccaagggcaccgtgaccctgatggtgctgagctag

SEQ ID NO: 93715 - protein, 1003 aa, Artificial Sequence
  derived and/or modified sequence
MYGASGGRAKPERKSGAKEEAGPGGAGGGGSRVELLVFGYACKLFRDDERALAQEQGQHLIPWMGDHKILIDRYDGRGHLHDLSEYDAEYSTWNRDYQLSEEEARIEALCDEERYLALHTDLLEEEARQEEEYKRLSEALAEDGSYNAVGFTYGSDYYDPSEPTEEEEPSKQREKNEAENLEENEEPFVAPLGLSVPSDVELPPTAKMHAIIERTASFVCRQGAQFEIMLKAKQARNSQFDFLRFDHYLNPYYKFIQKAMKEGRYTVLAENKSDEKKKSGVSSDNEDDDDEEDGNYLHPSLFASKKCNRLEELMKPLKVVDPDHPLAALVRKAQADSSTPTPHNADGAPVQPSQVEYTADSTVAAMYYSYYMLPDGTYCLAPPPPGIDVTTYYSTLPAGVTVSNSPGVTTTAPPPPGTTPLPPPTTAETSSGATSTTTTTSALAPVAAIIPPPPDVQPVIDKLAEYVARNGLKFETSVRAKNDQRFEFLQPWHQYNAYYEFKKQFFLQKEGGDSMQAVSAPEEAPTDSAPEKPSDAGEDGAPEDAAEVGARAGSGGKKEASSSKTVPDGKLVKASFAPISFAIKAKENDLLPLEKNRVKLDDDSDDDEESKEGQESSSSAANTNPAVAPPCVVVEEKKPQLTQEELEAKQAKQKLEDRLAAAAREKLAQASKESKEKQLQAERKRKAALFLQTLKNPLPEAEAGKIEESPFSVEESSTTPCPLLTGGRPLPTLEVKPPDRPSSKSKDPPREEEKEKKKKKHKKRSRTRSRSPKYHSSSKSRSRSHSKAKHSLPSAYRTVRRSRVTASPGTLRAEPCQSSASVTAAAEPGSYQAASTTTRFDSASSFEGKPGKTSRSRSRSPRRRAHSPERRREERSVPTAYRVSRSPGASRKRTRSRSPHEKKKKRRSRSRTKSKARSQSVSPSKQAAPRPAAPAAHSAHSASVSPVESRGSSQERSRGVSQEKEAQISSAIVSSVQSKITQDLMAKVRAMLAASKNLQTSAS

SEQ ID NO: 93716 - protein, 547 aa, Artificial Sequence
  derived and/or modified sequence
MGDHKILIDRYDGRGHLHDLSEYDAEYSTWNRDYQLSEEEARIEALCDEERYLALHTDLLEEEARQEEEYKRLSEALAEDGSYNAVGFTYGSDYYDPSEPTEEEEPSKQREKNEAENLEENEEPFVAPLGLSVPSDVELPPTAKMHAIIERTASFVCRQGAQFEIMLKAKQARNSQFDFLRFDHYLNPYYKFIQKAMKEGRYTVLAENKSDEKKKSGVSSDNEDDDDEEDGNYLHPSLFASKKCNRLEELMKPLKVVDPDHPLAALVRKAQADSSTPTPHNADGAPVQPSQVEYTADSTVAAMYYSYYMLPDGTYCLAPPPPGIDVTTYYSTLPAGVTVSNSPGVTTTAPPPPGTTPLPPPTTAETSSGATSTTTTTSALAPVAAIIPPPPDVQPVIDKLAEYVARNGLKFETSVRAKNDQRFEFLQPWHQYNAYYEFKKQFFLQKEGGDSMQAVSAPEEAPTDSAPEKPSDAGEDGAPEDAAEVGARAGSGGKKEASSSKTVPDGKLVKASFAPISFAIKAKENDLLPLEKNRKKRKKRKRKSTKK

SEQ ID NO: 93717 - DNA, 3012 bp, Artificial Sequence
  derived and/or modified sequence
atgtacggtgcctccggtggacgtgcaaaacccgaacgcaaaagtggagcgaaagaggaagctggcccaggaggggcaggaggtggcgggagtagggtcgaattgctggtgtttggttacgcatgcaaactgttccgagacgatgagcgtgccctggctcaggagcagggtcaacacctgattccttggatgggcgaccacaaaattctcatcgatcgatacgatggaaggggccatctccacgatctgagcgagtacgatgcggaatattcaacttggaatagagactaccagttaagtgaagaggaagcgagaattgaggccttgtgtgatgaagaaaggtaccttgctctacatactgaccttctggaagaagaggcacggcaggaggaagagtataagaggctctcggaggccctggccgaggacggatcttacaacgccgtgggctttacctacggctctgactactatgacccctcagagccaactgaagaggaagagcctagtaagcaaagggaaaagaatgaagccgaaaacttagaggaaaatgaagagccgttcgtcgctcctctggggttatccgtacccagcgatgtagagctaccacctaccgctaaaatgcacgcaattattgagaggaccgcctcctttgtgtgtaggcagggtgctcaattcgagatcatgttaaaagccaaacaggcccgcaactctcagttcgattttctacgattcgatcactatctgaacccttactataagtttattcaaaaagccatgaaggaaggaaggtacactgtgctggccgaaaacaagagtgatgaaaagaagaaaagcggggtttcaagcgataacgaggatgatgacgatgaggaggacgggaactacctccaccctagtctcttcgccagcaaaaagtgtaatcggctcgaagagctcatgaagcctcttaaagtggttgatccagatcacccccttgccgctctcgttcggaaggcccaggctgactcgtccacgccaactccccataatgcagatggcgccccggttcagcccagtcaggtagagtacacagctgattccactgtcgcagcaatgtactatagttattacatgctcccggacggtacttactgtctggccccccctcccccgggcattgatgtcactacctactacagcacactgccagccggtgtcaccgtttctaattccccaggggttaccacgacagccccacccccacctggtactacgcccctgccaccccccaccacagcggagacctccagcggggccactagcacaacgacgactacgtccgcccttgcacccgtcgccgccatcatacccccaccacccgatgtgcagccagttatagacaaactggccgaatatgtggcccgcaacggtctgaagttcgaaacctcggtccgcgccaagaacgaccagcgttttgagtttttgcagccctggcaccagtacaatgcttactatgagttcaagaagcaatttttcctccagaaggaaggcggagactcaatgcaagcggtaagcgcacctgaggaggcccctaccgattcggccccagagaaaccatcggacgctggcgaggatggcgcccctgaggatgctgccgaagtgggtgcgcgagctggctcagggggtaagaaggaagcaagttcttctaaaacagtcccagatggaaaactagtgaaagccagctttgcacctatcagttttgccatcaaagcaaaagaaaacgatttgcttcctctggagaagaatcgggtgaagctggacgatgattccgacgatgatgaagaatctaaggaaggtcaggaatctagcagttccgctgccaacaccaatccggccgttgcgcctccttgtgtggttgttgaggagaaaaagcctcagcttacgcaggaggaactggaggctaagcaagccaagcaaaaactagaggatcggcttgcggcagcggcccgtgaaaagttagcccaggccagtaaagagtccaaggaaaagcagctccaggccgaacgaaaacggaaagcagccctgtttttacagactttgaaaaatcccctgccagaggccgaggcagggaaaatcgaagagagtccgttttccgtggaagaaagtagcaccacgccgtgtccgctgcttacaggtggtcgtccactgcctaccctcgaggttaagccccctgatagacccagcagcaagtctaaagacccacctcgggaggaagagaaagaaaagaagaaaaagaagcataagaaacgctcaagaacacgtagcaggtctccaaagtaccactccagttccaaaagtagatcccgcagccactctaaagccaagcatagcttgccttccgcctataggaccgtgagaagaagccgcgtgacagcttctcccggaaccctcagggccgaaccatgccagtccagcgcatcagtaacagcagcagctgaaccaggaagctaccaggcagccagcactactaccagatttgactccgcgtcaagcttcgaggggaaacctggtaagactagtcgttctaggtcccggagccctagaagacgcgctcactcgccagagcggaggagagaggagcgatccgtgccaaccgcctatcgcgtcagccgcagcccgggagctagtcgcaagcgaacgaggtctcgctcccctcatgaaaagaaaaagaaacgtcggtcgcgctccagaactaaaagcaaggcacgcagtcagtcagtctccccatccaagcaggccgccccacggcccgccgcgcctgccgcacactcagctcattccgcctccgtaagccccgtggagagtagggggtcctcgcaggagcgaagccgcggagtgtcccaggaaaaggaggcacagatttcttcagccatcgtttcctcggtccagagcaagatcactcaggatttaatggccaaggtgagagctatgctggcggcctccaaaaatctgcagaccagcgcatcctag

SEQ ID NO: 93718 - DNA, 3012 bp, Artificial Sequence
  derived and/or modified sequence
atgtacggggccagcggcggccgggccaagccagagaggaagagcggggccaaggaggaggccggccctggaggagctgggggcggcggcagccgggtggagctgctggtgtttggctacgcctgcaagctgttcagagatgatgagcgggccctggcccaggagcagggccagcacctgatcccctggatgggagaccacaagatcctgattgacagatatgatggccggggccacctgcatgacctgtctgaatatgatgctgagtacagcacctggaacagagactaccagctgtctgaggaggaggcccgcatcgaggccctgtgtgatgaggagcgctacctggccctgcacacagacctgctggaggaggaggcccggcaggaggaggagtacaagaggctgtctgaggccctggccgaggatggcagctacaatgctgtgggcttcacctacggcagtgactactatgaccccagcgagcccacagaggaggaggagcccagcaagcagcgggagaagaatgaagctgagaacctggaggagaatgaggagccctttgtggcccccctgggcctgtctgtgcccagtgatgtggagctgcccccaacagccaagatgcacgccatcatcgagaggacagccagctttgtgtgccggcagggcgcccagtttgagatcatgctgaaggccaagcaggccaggaacagccagtttgacttcctgcgctttgaccactacctgaacccctactacaagttcatccagaaggccatgaaggagggccgctacacagtgctggccgagaacaagagtgatgagaagaagaagtctggagtgtccagtgacaatgaagatgatgatgatgaggaggatggcaactacctgcaccccagcctgtttgccagcaagaagtgcaaccggctggaggagctgatgaagcccctgaaggtggtggaccctgaccaccccctggccgccctggtgaggaaggcccaggccgacagcagcacccccaccccccacaatgctgatggagcccctgtgcagcccagccaggtggagtacacagctgacagcacagtggccgccatgtactacagctactacatgctgcctgatggcacctactgcctggcccctcctcctcctggcattgatgtgaccacctactacagcaccctgcctgctggggtgacagtgagcaacagccctggggtgaccaccacagcccctcctcctcctggcaccacccccctgcccccacccaccacagctgagaccagcagcggggccaccagcaccaccaccaccaccagcgccctggcccctgtggccgccatcatccccccacctccagatgtgcagcccgtcatcgacaagctggccgagtatgtggccagaaatggcctgaagtttgagacctctgtgcgggccaagaatgaccagagatttgagttcctgcagccctggcaccagtacaatgcctactatgagttcaagaagcagttcttcctgcagaaggagggcggggacagcatgcaggccgtgtctgcccctgaggaggcccccacagacagcgcccctgagaagcccagtgatgctggggaggatggagccccagaagatgctgctgaggtgggcgcccgggccggcagcggcggcaagaaggaggccagcagcagcaagacagtgcctgatggcaagctggtgaaggccagctttgcccccatcagctttgccatcaaggccaaggaaaatgacctgctgcccctggagaagaacagagtgaagctggatgatgacagtgatgatgatgaggagagcaaggagggccaggagagcagcagcagcgctgccaacaccaacccagctgtggccccaccctgtgtggtggtggaggagaagaagccccagctgacccaggaggagctggaggccaagcaggccaagcagaagctggaggaccggctggccgccgccgcccgggagaagctggcccaggccagcaaggagagcaaggagaagcagctgcaggccgagaggaagaggaaggccgccctcttcctgcagaccctgaagaaccccctgcctgaggccgaggccggcaagattgaggagagccccttctctgtggaggagagcagcaccaccccctgccccctgctgactggaggccggcccctgcccaccctggaggtgaagcccccagaccggcccagcagcaagagcaaggaccccccccgggaggaggagaaggagaagaagaagaagaagcacaagaagaggagcaggaccaggagccgcagccccaagtaccacagcagcagcaagagccgcagccgcagccacagcaaggccaagcacagcctgcccagcgcctacagaacagtgcggcgcagccgggtgacagccagccctggcaccctgcgggcagagccctgccagagcagcgcctctgtgacagctgctgctgagcccggcagctaccaggccgccagcaccaccaccaggtttgacagcgccagcagctttgagggcaagccaggcaagaccagccgcagccgcagccgcagccccaggagaagagcccacagccctgagaggagaagagaggagaggtctgtgcccacagcctacagagtgagccgcagccctggggccagcaggaagaggaccaggagccgcagcccccatgagaagaagaagaagaggaggagccgcagcaggaccaagagcaaggcccggagccagagcgtgagccccagcaagcaggccgcccccaggcctgctgccccagctgcccacagcgcccacagcgcctctgtgtcccctgtggagagccggggcagcagccaggagaggagcagaggagtgtcccaggagaaggaggcccagatcagcagcgccatcgtgtcctctgtgcagagcaagatcacccaggacctgatggccaaggtgcgggccatgctggccgccagcaagaacctgcagaccagcgccagctag

SEQ ID NO: 93719 - DNA, 3012 bp, Artificial Sequence
  derived and/or modified sequence
atgtacggcgccagcggcggccgggccaagcccgagcggaagagcggggctaaggaggaagctggtccagggggagccggtggcgggggctctcgcgtagagctcctggttttcgggtatgcttgcaagctgttccgggatgacgaacgggcactggcgcaggagcaagggcagcacctcattccatggatgggcgatcacaagatcctgatagatcgctatgatggtaggggtcacctccacgatttatcggaatacgatgctgagtattctacgtggaatcgcgactatcagctgagtgaagaggaagcccgcatcgaggcactgtgcgacgaggagagatatttagccctacacaccgatcttctcgaagaggaggccagacaggaggaagagtacaaaaggctttctgaggcactggccgaagacggtagttacaatgcagtcggctttacctacggatccgactattatgatcccagtgagcctacagaagaagaggagccaagcaagcagcgggagaaaaatgaagcagagaatctggaggagaacgaggaaccattcgtcgctcctctcggcctcagcgtgccaagcgacgtggagctgcctcctactgccaaaatgcacgccattatagaaaggactgcgagcttcgtctgccgccagggggctcagttcgaaatcatgctaaaggccaagcaggcgagaaacagccagtttgattttttacgatttgatcattatttgaacccgtattataaattcattcagaaggcgatgaaagagggacgctacaccgtcctggccgaaaacaagagtgacgaaaaaaaaaagtcaggcgtgagttcagataatgaggacgacgacgatgaggaggatggtaattacctgcatcctagcttgttcgcctctaagaaatgtaacagactggaggagctgatgaagccgctaaaggtggtagatcccgaccacccattggcggccctcgttagaaaggcccaggcagattcctccacgcctaccccacataacgccgacggagccccagttcagcccagtcaggtggagtatactgccgactcgaccgtagcagcgatgtattactcttactatatgctgcccgatgggacttactgtctcgctccccctccaccagggatcgatgtcaccacgtactactcgactttgccagctggagtgaccgtgtctaattccccgggggttactaccacggctccccctcctcccggtacgaccccacttcctccccccacaacggcggagacaagtagcggagccacttcaacgacaaccaccactagcgcactggcacctgtagccgcgatcataccacccccacccgatgttcagcctgtcatcgataagttggctgaatacgtggcacgaaacggcctgaaattcgagacctctgtgcgggccaagaacgatcaacgttttgagtttctccagccatggcatcagtacaacgcatactacgagttcaaaaaacagttttttctgcagaaagaaggcggcgattctatgcaggccgtatccgctccagaagaagcacctaccgattctgccccagagaaaccctcagatgccggggaagatggcgcgccagaggatgctgctgaggtcggtgcaagagccggttcgggaggtaagaaggaggcttcatcctcgaagacagttccggacggcaagctcgtgaaggcctcttttgctcccataagcttcgcaatcaaagcaaaggagaatgacttgctgccattagagaaaaaccgcgtgaagctggacgatgattcggatgatgacgaagagtccaaagagggccaggaatcctctagcagcgcagccaacacaaatcccgctgtcgcacctccctgcgtggtggtagaggaaaagaagccccagttgacacaggaagagctagaggcgaaacaggctaaacagaaactagaggacaggttggctgcagctgcccgagagaagctggctcaggcatccaaggagagcaaagagaagcagctccaggccgagcgcaaacgaaaagctgcactttttcttcagacgctgaaaaaccccctgccagaagcagaggctggcaaaatcgaggaatcgcctttttcagttgaagaaagctcgaccactccttgtccactgcttactggcggacgacctttaccaactcttgaagtgaaacccccggatcgcccatccagtaaatcgaaagaccctccccgggaggaagaaaaggagaaaaaaaagaaaaagcataaaaagcgatctcgcaccaggtctcggagtcccaaatatcacagctccagtaagtctagatctcgaagccattcaaaggccaagcattcactcccatccgcttatagaaccgtcagaagaagcagagtcactgcttctcccggaacgctgagagcagagccgtgtcaatcctccgccagcgtgaccgcggctgctgagcctgggtcctatcaagccgctagcactacaaccaggtttgatagcgcctccagtttcgaggggaagcccgggaaaacatctaggagtaggtcccggtcccctcgtagacgggctcacagccccgagagacggagagaggagcgctccgttcctactgcataccgcgtgagcagatccccgggtgcgtccagaaaaagaacacggagccgttcaccccacgaaaaaaagaaaaaaagaaggtccaggtcaaggactaagtcaaaagcacgatcccagagtgtgtccccctctaaacaggccgcaccaagacccgccgccccagccgcccacagcgcacactccgcaagcgttagcccagtggagtccagaggctcttctcaggagcgatcgaggggtgtgagtcaagaaaaagaggcccagatttcctcagctatagtgagttccgttcaatcaaaaattacacaggatctgatggccaaggtgcgggccatgctggccgccagcaagaacctgcagacaagcgcctcatag

SEQ ID NO: 93720 - DNA, 3219 bp, Artificial Sequence
  derived and/or modified sequence
cggggtctttgactgaaggggtaggccaagtggaggtatcagggacgtcgcgcggcacagaagaggaccagcctggacgccggggacgctgtcatgtacggcgcgagcgggggccgcgccaaacccgagaggaaaagcggcgcgaaggaggaggccgggccaggcggtgccggcggtgggggcagccgagtggagctcttggttttcggctatgcctgcaagctgttccgggacgacgagcgggccctggctcaggaacagggacagcacctcatcccctggatgggggaccacaagatcctcatcgacagatatgatggacgtggtcacctgcatgacctttctgagtacgatgctgagtattccacgtggaacagagattatcagctgtctgaagaggaggcgcgaatagaggccctgtgtgatgaagagaggtatttagccttgcatacggacttgcttgaggaggaggcaaggcaagaggaagaatacaagcgattgagtgaagcactagcagaggatgggagctacaatgccgtggggttcacttacggtagcgactattacgacccgtcagagccgacggaggaggaggagccttccaaacagagagaaaaaaatgaggccgaaaatttagaggaaaatgaagagcccttcgttgcccccttaggattgagcgtcccgtctgacgtggagttgccaccaaccgctaaaatgcacgccatcatcgagcgcacggccagcttcgtgtgcaggcagggagcacagtttgagatcatgctgaaggccaagcaggcccggaactcccagtttgactttctgcgcttcgaccactacctcaacccctactataagttcatccagaaagccatgaaagagggacgctacactgtcctggcagaaaacaaaagtgacgagaaaaaaaaatcaggagtcagctctgacaatgaagatgatgatgatgaagaagatgggaattaccttcatccctctctctttgcctccaagaagtgtaaccgccttgaagagctgatgaagcccttgaaggtagtggacccagatcatcccctcgcagcacttgttcgtaaggcacaggctgacagttccactcccaccccacacaacgcagacggtgcgcctgtgcagccctcccaggtggagtacacggcagactcgaccgtggcagccatgtattacagctactacatgctaccggacggcacttactgcctggcgccgccccctcccggaatcgacgtgactacttactacagcacccttcctgctggcgtgaccgtgtctaactcccctggagtgacgaccaccgccccaccacctcctgggaccacaccactaccgcccccaaccacagcagagactagcagcggggccacctccacaaccaccaccacaagtgcacttgcccccgtggccgccatcatccccccgccccccgacgtccagcccgtgattgacaagctggccgagtatgtcgccaggaacggcctgaagttcgagaccagtgttcgtgccaagaatgatcaaagatttgagttcctgcagccgtggcaccagtataatgcttattatgagtttaagaagcagttcttcctccagaaagaagggggcgatagcatgcaggctgtgtctgcaccagaagaggctcccacagactctgctcccgagaagccaagtgatgctggggaggatggcgcgcctgaagacgcagccgaggtgggagcacgggcaggctcaggcgggaagaaggaggcatcgtccagtaagaccgtcccggacgggaagctggtgaaagcttcctttgctccaataagctttgcaatcaaggccaaagaaaatgatctgcttcccctggaaaaaaatcgtgttaagctagatgatgacagtgatgatgatgaagaaagcaaagaaggccaagaaagttctagtagtgctgcaaacactaacccagcagttgccccaccctgtgtagttgttgaggagaagaagcctcaacttacccaggaggagctagaagcaaagcaagcaaagcaaaagctggaagatcgcctcgcagctgctgcccgggaaaagctggcccaggcgtctaaggagtcaaaagagaaacagcttcaagcagaacgtaaaaggaaagcggcgttatttttacagaccctcaaaaatcctctgccggaagcagaagctgggaaaattgaggagagtcctttcagtgtcgaggaatccagcactacgccctgccctctactgactggaggcaggcctctgcctactttagaagttaaaccacccgataggccttcgagcaaaagcaaagatccaccgagagaagaagagaaagaaaagaaaaagaaaaagcacaaaaaaagatctcgaacaagatcacgttctcccaagtaccattcgtcatccaagtccaggtctagatcacactcaaaagcaaagcattctcttcccagtgcctatcggacagtgcggcggtcgagagtcacagcctccccagggacgctgcgcgcggagccctgtcagagcagcgcgtcagtgacagcggcagccgagccaggaagttatcaggcagcctcgaccaccaccagatttgactccgcgagctcttttgagggaaaacctggtaaaacgtcaaggtcccgctcccggtcccctcggaggagagcccactcccctgagagacggagggaagagaggagtgtgcccactgcctaccgcgtgagccgcagccctggggccagtaggaagcggacccgctccagaagtccccacgagaagaagaagaagaggcggtcccggtcgcggaccaagtccaaggccaggtctcagtcggtgtcacccagcaagcaggcagcgccccggcccgcggcccccgcggcccactcggcgcactcagccagcgtctcccctgtggagagtcggggctccagccaggagcgctccaggggagtctctcaggaaaaagaagcccagatctcttcagcaatcgtttcttccgtgcagagcaaaatcactcaggatctcatggccaaagtcagagcgatgcttgcagcttccaaaaacctgcaaaccagcgcttcctgagacggggccagcggaggcagagccgggaggctgcgtgggcttctgggcaggctcacgcagacgccggccacaccatccacctggccgcctccatggacccttggtggcttttgt

SEQ ID NO: 93721 - DNA, 3012 bp, Artificial Sequence
  derived and/or modified sequence
atgtacggggcaagcggcggaagagcaaaacccgagcggaaaagtggagctaaggaggaagctggaccgggaggcgctggcggtggcggaagcagggtggaattacttgttttcggctatgcatgcaaactgtttcgagacgacgagagagctctcgctcaagagcagggccaacacctgataccttggatgggcgaccacaagatactgattgaccggtacgacgggcgagggcaccttcacgatctgagtgagtatgacgctgagtacagcacgtggaaccgcgattatcagctcagtgaggaagaagctcgcattgaggccttgtgcgatgaggagaggtatctggcattgcatacagatctcctggaggaggaggctaggcaggaggaggaatataagcgattgagcgaagccctggctgaggacggatcatacaatgctgtcgggttcacctacgggtcggactattatgatcctagtgagcccactgaagaagaggaaccttcaaaacagagggaaaagaacgaggctgaaaatctcgaagagaacgaggaacccttcgtcgctcctctgggtctgagcgtgcccagcgacgtagaactgccgccaaccgcaaagatgcatgctataatcgagagaaccgcctcttttgtttgccggcagggggctcagttcgaaatcatgctgaaggcgaaacaggccaggaacagtcagttcgacttcctgaggttcgatcattacctcaacccatactacaaatttatccaaaaggctatgaaggaggggcgttacacggtgctggccgagaacaaatcagatgaaaagaaaaagagcggggtgagtagcgataatgaggatgatgacgacgaagaggacggaaactacttgcacccctctctgttcgcatctaaaaaatgtaataggctagaggaactaatgaaacccctgaaagtggtggaccctgatcatcccttggcggcattggtgcgcaaagcccaggctgatagcagtacacccaccccacacaatgccgatggagccccagtacagccatctcaagtggagtatacagctgactccactgtggccgcaatgtattatagctactacatgctgccggacggcacatactgccttgctccccctcctccaggcatcgacgttacgacatactatagcactctacccgctggagtgacagtaagtaacagtccaggtgtcactaccacggctccgcctcctcccggaaccacacccttgccacccccaactaccgctgaaacttcatctggggctacgagtaccacgactaccacaagtgccttggcacccgtggccgcaatcatccccccaccccctgatgtgcaacccgtgattgataagttggctgaatatgtggctaggaatggcctgaagttcgagacaagcgttcgcgcaaaaaatgatcagcgctttgagttcctccagccctggcatcagtacaatgcctattacgagttcaagaaacagttcttcctccagaaagaaggaggagactccatgcaggccgtctctgccccagaggaggcccctactgattccgccccagaaaaaccctctgacgcaggcgaggatggcgcacccgaggacgctgccgaagtgggcgcacgcgctggctccggtggcaaaaaagaggcaagcagttcaaaaaccgtgccggatggaaagctggtgaaagctagtttcgctccaataagtttcgccattaaagccaaagagaacgaccttctgcctctggaaaagaatagggtgaagttagatgatgattctgatgatgacgaggagtccaaagagggacaggagtcttcctcatccgctgctaacacaaatcccgctgtagctcctccgtgtgtggttgtggaggaaaagaagccccagctgactcaggaagaattggaggctaagcaggcaaagcagaaactcgaagacagactggctgccgcagcgagggagaagctggctcaggcctctaaagaatctaaagagaagcagctgcaggccgagcgcaaacgaaaggccgcactatttcttcagactctcaagaatcccctccccgaggccgaagccggaaagatcgaggaaagcccctttagcgttgaagagtctagcacgactccgtgccccctccttactgggggacggcctctcccaacgctagaggtcaagcctcccgaccgaccgagctcaaagagcaaagatccgccaagagaagaagaaaaggagaagaagaagaagaagcacaaaaaacggtccagaactcgctccaggtcaccaaagtaccattcatcatccaagagtcggtcccggagccactccaaagccaagcactccctgccatctgcgtaccgtaccgtgcggcgttcacgggtgacagcctcccccggaacattgcgagccgagccgtgtcagtccagcgcttcggtgacagctgcagccgaacccggaagctaccaagccgctagtactacaactcggttcgattctgccagcagtttcgagggtaaaccgggaaaaacgtcaagatctaggagcaggtcaccgagacgccgagcgcattctcccgaacgtcgtagagaggagaggtcagtccccacagcatatcgcgtatcccgttcacctggcgcatcgaggaagaggactaggtctcgcagcccccatgaaaagaagaagaagaggcgtagcagaagccgaaccaagtcaaaggctcgttctcagtcagttagcccctctaaacaggcggcacccagaccagctgccccagcagcacacagcgcacacagcgcctccgtctctccagtggaatcgaggggctcgagtcaggagagaagcagaggagtatctcaggaaaaagaagcccaaatctcatccgctattgtgtcttctgttcagtccaaaatcacccaagacctaatggccaaagtccgcgcaatgcttgctgcaagcaaaaatttgcagacctcagcatcctag

SEQ ID NO: 93722 - DNA, 3012 bp, Artificial Sequence
  derived and/or modified sequence
atgtacggcgccagcggcggcagagccaagcccgagagaaagagcggcgccaaggaggaggccggccccggcggcgccggcggcggcggcagcagagtggagctgctggtgttcggctacgcctgcaagctgttcagagacgacgagagagccctggcccaggagcagggccagcacctgatcccctggatgggcgaccacaagatcctgatcgacagatacgacggcagaggccacctgcacgacctgagcgagtacgacgccgagtacagcacctggaacagagactaccagctgagcgaggaggaggccagaatcgaggccctgtgcgacgaggagagatacctggccctgcacaccgacctgctggaggaggaggccagacaggaggaggagtacaagagactgagcgaggccctggccgaggacggcagctacaacgccgtgggcttcacctacggcagcgactactacgaccccagcgagcccaccgaggaggaggagcccagcaagcagagagagaagaacgaggccgagaacctggaggagaacgaggagcccttcgtggcccccctgggcctgagcgtgcccagcgacgtggagctgccccccaccgccaagatgcacgccatcatcgagagaaccgccagcttcgtgtgcagacagggcgcccagttcgagatcatgctgaaggccaagcaggccagaaacagccagttcgacttcctgagattcgaccactacctgaacccctactacaagttcatccagaaggccatgaaggagggcagatacaccgtgctggccgagaacaagagcgacgagaagaagaagagcggcgtgagcagcgacaacgaggacgacgacgacgaggaggacggcaactacctgcaccccagcctgttcgccagcaagaagtgcaacagactggaggagctgatgaagcccctgaaggtggtggaccccgaccaccccctggccgccctggtgagaaaggcccaggccgacagcagcacccccaccccccacaacgccgacggcgcccccgtgcagcccagccaggtggagtacaccgccgacagcaccgtggccgccatgtactacagctactacatgctgcccgacggcacctactgcctggccccccccccccccggcatcgacgtgaccacctactacagcaccctgcccgccggcgtgaccgtgagcaacagccccggcgtgaccaccaccgccccccccccccccggcaccacccccctgcccccccccaccaccgccgagaccagcagcggcgccaccagcaccaccaccaccaccagcgccctggcccccgtggccgccatcatcccccccccccccgacgtgcagcccgtgatcgacaagctggccgagtacgtggccagaaacggcctgaagttcgagaccagcgtgagagccaagaacgaccagagattcgagttcctgcagccctggcaccagtacaacgcctactacgagttcaagaagcagttcttcctgcagaaggagggcggcgacagcatgcaggccgtgagcgcccccgaggaggcccccaccgacagcgcccccgagaagcccagcgacgccggcgaggacggcgcccccgaggacgccgccgaggtgggcgccagagccggcagcggcggcaagaaggaggccagcagcagcaagaccgtgcccgacggcaagctggtgaaggccagcttcgcccccatcagcttcgccatcaaggccaaggagaacgacctgctgcccctggagaagaacagagtgaagctggacgacgacagcgacgacgacgaggagagcaaggagggccaggagagcagcagcagcgccgccaacaccaaccccgccgtggcccccccctgcgtggtggtggaggagaagaagccccagctgacccaggaggagctggaggccaagcaggccaagcagaagctggaggacagactggccgccgccgccagagagaagctggcccaggccagcaaggagagcaaggagaagcagctgcaggccgagagaaagagaaaggccgccctgttcctgcagaccctgaagaaccccctgcccgaggccgaggccggcaagatcgaggagagccccttcagcgtggaggagagcagcaccaccccctgccccctgctgaccggcggcagacccctgcccaccctggaggtgaagccccccgacagacccagcagcaagagcaaggacccccccagagaggaggagaaggagaagaagaagaagaagcacaagaagagaagcagaaccagaagcagaagccccaagtaccacagcagcagcaagagcagaagcagaagccacagcaaggccaagcacagcctgcccagcgcctacagaaccgtgagaagaagcagagtgaccgccagccccggcaccctgagagccgagccctgccagagcagcgccagcgtgaccgccgccgccgagcccggcagctaccaggccgccagcaccaccaccagattcgacagcgccagcagcttcgagggcaagcccggcaagaccagcagaagcagaagcagaagccccagaagaagagcccacagccccgagagaagaagagaggagagaagcgtgcccaccgcctacagagtgagcagaagccccggcgccagcagaaagagaaccagaagcagaagcccccacgagaagaagaagaagagaagaagcagaagcagaaccaagagcaaggccagaagccagagcgtgagccccagcaagcaggccgcccccagacccgccgcccccgccgcccacagcgcccacagcgccagcgtgagccccgtggagagcagaggcagcagccaggagagaagcagaggcgtgagccaggagaaggaggcccagatcagcagcgccatcgtgagcagcgtgcagagcaagatcacccaggacctgatggccaaggtgagagccatgctggccgccagcaagaacctgcagaccagcgccagctag

SEQ ID NO: 93723 - protein, 378 aa, Artificial Sequence
  derived and/or modified sequence
MYAQGTEDSRTLEELTSTSVEHIIVNPNAAYDKFKDKRVGTKGLDFSDRIGKTKRTGYESGEYEMLGEGLGVKETPQQKYQRLLHEVQELTTEVEKIKTTVKESATEEKLTPVLLAKQLAALKQQLVASHLEKLLGPDAAINLTDPDGALAKRLLLQLEATKNSKGGSGGKTTGTPPDSSLVTYELHSRPEQDKFSQAAKVAELEKRLTELETAVRCDQDAQNPLSAGLQGACLMETVELLQAKVSALDLAVLDQVEARLQSVLGKVNEIAKHKASVEDADTQSKVHQLYETIQRWSPIASTLPELVQRLVTIKQLHEQAMQFGQLLTHLDTTQQMIANSLKDNTTLLTQVQTTMRENLATVEGNFASIDERMKKLGK

SEQ ID NO: 93724 - protein, 401 aa, Artificial Sequence
  derived and/or modified sequence
MADPKYADLPGIARNEPDVYETSDLPEDDQAEFDAEELTSTSVEHIIVNPNAAYDKFKDKRVGTKGLDFSDRIGKTKRTGYESGEYEMLGEGLGVKETPQQKYQRLLHEVQELTTEVEKIKTTVKESATEEKLTPVLLAKQLAALKQQLVASHLEKLLGPDAAINLTDPDGALAKRLLLQLEATKNSKGGSGGKTTGTPPDSSLVTYELHSRPEQDKFSQAAKVAELEKRLTELETAVRCDQDAQNPLSAGLQGACLMETVELLQAKVSALDLAVLDQVEARLQSVLGKVNEIAKHKASVEDADTQSKVHQLYETIQRWSPIASTLPELVQRLVTIKQLHEQAMQFGQLLTHLDTTQQMIANSLKDNTTLLTQVQTTMRENLATVEGNFASIDERMKKLGK

SEQ ID NO: 93725 - DNA, 1206 bp, Artificial Sequence
  derived and/or modified sequence
atggcagaccctaagtatgccgatttgcccggcatagcacggaacgagcccgacgtatacgaaacatctgacctgcccgaggacgaccaggcagagtttgacgctgaggagctgacttccacctctgtggagcacatcatcgtgaatccaaatgccgcgtacgacaagttcaaagacaagcgggtcggaacgaagggactggacttctctgaccggattggcaagactaagagaacagggtacgagagcggtgagtacgaaatgctcggcgagggtcttggtgtcaaggaaacgccacagcagaagtaccagcggctgcttcatgaagtgcaggaactgaccaccgaggtcgagaaaatcaagacaaccgtgaaggaaagtgcaacagaggagaaattaactcctgtgttgcttgcaaaacagctcgcagcattaaagcagcagttagtcgcatctcacctcgagaagctcctgggccctgatgctgcaattaacctgactgaccccgacggcgctttggcgaagcggctccttctgcagctcgaagcaaccaagaactccaaagggggcagtggaggaaagacaactgggactccccccgacagttcactcgttacatatgagctgcattctagaccggagcaagacaagttttctcaggctgccaaagtggcagagctcgaaaagcgccttacggagctggagactgccgttcgttgtgatcaagatgcgcagaacccactttctgccggtctgcagggagcttgtttgatggaaaccgtcgagctccttcaagctaaggtctcagctctggatcttgctgtgctggaccaggtggaggccaggctgcagtctgttctcggcaaggtgaacgagatcgccaaacataaagccagtgttgaagacgcggacactcagtctaaggtgcatcaactctatgaaacaatccagaggtggtctccaattgcaagtacactccccgagctggtgcagcgtctcgtgacaattaagcagctgcacgaacaggccatgcaattcgggcagctccttacccacctggatacgacacagcaaatgattgccaatagcttgaaggataatacaacactgctaacccaagtgcaaacaactatgcgcgaaaacttggccacagtcgaggggaactttgcctcaatagatgagagaatgaaaaagttgggcaagtag

SEQ ID NO: 93726 - DNA, 1206 bp, Artificial Sequence
  derived and/or modified sequence
atggctgaccccaagtatgctgacctgcccggcatcgccagaaatgaaccagatgtgtatgagaccagtgacctgcctgaagatgaccaggccgagtttgatgctgaggagctgaccagcacctctgtggagcacatcatcgtgaaccccaatgctgcctatgacaagttcaaggacaagagggtgggcaccaagggcctggacttcagtgacagaattggcaagaccaagaggacaggctatgaaagtggagaatatgagatgctgggggagggcctgggcgtgaaggagaccccccagcagaagtaccagaggctgctgcacgaggtgcaggagctgaccacagaggtggagaagatcaagaccaccgtgaaggagagcgccacagaggagaagctgacccctgtgctgctggccaagcagctggccgccctgaagcagcagctggtggccagccacctggagaagctgctgggcccagatgctgccatcaacctgacagatcctgatggagccctggccaagaggctgctgctgcagctggaggccaccaagaacagcaagggcggcagcggcggcaagaccaccggcaccccaccagacagcagcctggtgacctatgagctgcacagcaggcctgagcaggacaagttcagccaggccgccaaggtggccgagctggagaagaggctgacagagctggagacagctgtgcgctgtgaccaggatgcccagaaccccctgtctgctggcctgcagggcgcctgcctgatggagaccgtggagctgctgcaggccaaggtgtctgccctggacctggccgtgctggaccaggtggaggcccggctgcagagcgtgctgggcaaggtgaatgaaattgccaagcacaaggcctctgtggaggatgctgacacccagagcaaggtgcaccagctgtatgagaccatccagcgctggagccccatcgccagcaccctgcctgagctggtgcagaggctggtgaccatcaagcagctgcacgagcaggccatgcagtttggccagctgctgacccacctggacaccacccagcagatgattgccaacagcctgaaggacaacaccaccctgctgacccaggtgcagaccaccatgagggagaacctggccaccgtggagggcaactttgccagcattgatgagaggatgaagaagctgggcaagtag

SEQ ID NO: 93727 - DNA, 1206 bp, Artificial Sequence
  derived and/or modified sequence
atggccgaccccaagtacgccgacctgcccggcatcgcccggaacgagcctgacgtgtacgaaacttcagatcttcccgaggacgaccaggctgagttcgatgcggaggaattgacctcgacatcagtggaacacatcatagtgaacccgaatgccgcttacgataagttcaaggataaaagggtcggtactaaaggcttggacttcagtgaccggatcggaaagacaaaacgtactggttacgaatctggcgaatacgagatgctgggtgagggcctgggagtgaaggagactccacagcagaagtaccagagactgctccatgaggtccaggagctgacaactgaggtagagaaaataaagacgaccgttaaagaatctgctaccgaggaaaaactaacccccgttttgctggcaaagcagttagcagctctgaaacagcaactcgtggcttcacacctcgaaaaactacttggtccggacgcagccataaatctgacggaccccgatggggctctggcgaaacggttactgctccagcttgaggctacaaaaaactctaaaggtggctccggagggaagactaccggaacacctcccgactcctccctcgtcacatacgaacttcattcccggcccgaacaggataaattctcacaggccgcaaaagtggccgagttggagaagcgcttgacggaactggagactgccgtgaggtgtgatcaagatgctcaaaaccccttaagtgcgggtcttcaaggggcttgtcttatggagactgtagagctgctacaagcaaaggtgagtgccctggatctggccgtgctggatcaggtggaggcccgactccagtctgtcctgggcaaagtgaatgagatcgccaagcacaaggcaagtgttgaagatgcggacacccagagcaaggttcatcagttatatgaaactatccaaaggtggagccccattgccagtaccctccctgaactggtgcagcggttagttacaattaagcagctccatgaacaggccatgcagtttggccagctactcacccatctggacactactcaacagatgatcgcaaatagtctgaaggataataccactctgttaacacaggttcagactaccatgcgcgaaaatctggctacagtcgaagggaactttgcttccatcgacgagaggatgaagaaattagggaaatag

SEQ ID NO: 93728 - DNA, 1206 bp, Artificial Sequence
  derived and/or modified sequence
atggctgaccccaagtacgccgacctgcctgggatagcaaggaatgaacccgatgtctacgaaacttcagacttacctgaggatgaccaagctgaatttgacgcagaggagcttacctctacttcagttgagcacattatcgtcaaccctaatgccgcttacgacaaatttaaagataagcgcgttgggaccaagggtctggatttttcagacagaattgggaagactaaaaggactggttatgaaagcggtgagtacgagatgctgggggaaggactcggtgtgaaagagacaccacagcagaagtaccagcggctcctgcacgaggtccaggaacttaccacagaggtagaaaagatcaagaccaccgttaaagaaagcgcgacagaagagaagctgacacccgtgctcctggccaagcagttagctgccctgaaacagcaacttgtggctagccacttggagaaactgcttgggcctgatgccgctatcaatctcacggaccctgatggtgctctggccaagcgcttgcttctccagttggaggccacaaagaactctaaaggtggcagcggcggaaagacaacaggcaccccccctgactccagtctcgtgacatatgagctccactcacgtccagagcaggacaagttctctcaggccgctaaggtcgccgaactggagaagcgacttactgagttagagacagcagtgcggtgcgaccaggatgcacagaaccctttgtcagccggtttgcagggcgcttgtcttatggagaccgtggaactcctccaggcaaaagtgagcgcgctggacttggccgtcctcgatcaggttgaagcacgcttgcagtcagtcctgggtaaagtcaacgaaattgccaaacataaggcgtccgtggaagacgctgacacccagagcaaagtgcaccagctgtacgaaaccattcagcggtggagccccatcgcaagcacgcttcccgagcttgtgcagcgacttgtgaccattaaacaactgcatgaacaggccatgcagtttgggcagctcctcactcatttggataccactcagcagatgatcgcgaattctctcaaagacaacactacattgttgacacaagttcagaccactatgcgggaaaatctggcaacagtggaaggcaacttcgcctccatcgacgagcgcatgaaaaaactgggtaaatag

SEQ ID NO: 93729 - DNA, 1206 bp, Artificial Sequence
  derived and/or modified sequence
atggccgaccccaagtacgccgacctgcccggcatcgccagaaacgagcccgacgtgtacgagaccagcgacctgcccgaggacgaccaggccgagttcgacgccgaggagctgaccagcaccagcgtggagcacatcatcgtgaaccccaacgccgcctacgacaagttcaaggacaagagagtgggcaccaagggcctggacttcagcgacagaatcggcaagaccaagagaaccggctacgagagcggcgagtacgagatgctgggcgagggcctgggcgtgaaggagaccccccagcagaagtaccagagactgctgcacgaggtgcaggagctgaccaccgaggtggagaagatcaagaccaccgtgaaggagagcgccaccgaggagaagctgacccccgtgctgctggccaagcagctggccgccctgaagcagcagctggtggccagccacctggagaagctgctgggccccgacgccgccatcaacctgaccgaccccgacggcgccctggccaagagactgctgctgcagctggaggccaccaagaacagcaagggcggcagcggcggcaagaccaccggcaccccccccgacagcagcctggtgacctacgagctgcacagcagacccgagcaggacaagttcagccaggccgccaaggtggccgagctggagaagagactgaccgagctggagaccgccgtgagatgcgaccaggacgcccagaaccccctgagcgccggcctgcagggcgcctgcctgatggagaccgtggagctgctgcaggccaaggtgagcgccctggacctggccgtgctggaccaggtggaggccagactgcagagcgtgctgggcaaggtgaacgagatcgccaagcacaaggccagcgtggaggacgccgacacccagagcaaggtgcaccagctgtacgagaccatccagagatggagccccatcgccagcaccctgcccgagctggtgcagagactggtgaccatcaagcagctgcacgagcaggccatgcagttcggccagctgctgacccacctggacaccacccagcagatgatcgccaacagcctgaaggacaacaccaccctgctgacccaggtgcagaccaccatgagagagaacctggccaccgtggagggcaacttcgccagcatcgacgagagaatgaagaagctgggcaagtag

SEQ ID NO: 93730 - DNA, 2061 bp, Artificial Sequence
  derived and/or modified sequence
aatcctaggcggcgtcccctggccattacctcattccctggcctcgttctccccaatcccggcctctccaggggtgtggcagcagggctgttctcgcgacttttgctttacccttctgctgtgctactgctgtcgcgagacttcctgctcatctgccgctccctttgccgccgccttagcccgggacccgaacccagcctctcccctacccgaacaccggccccggctccaccgaggcccgggtcccccagcccgtctcgccgccgccatggcggaccctaaatacgccgaccttcccggcattgccaggaatgagccagatgtttatgaaactagcgacctacctgaggatgatcaagcggagttcgatgcggaggagctgacaagcacaagtgtggaacacatcattgtcaatcctaatgctgcctatgacaagttcaaggacaagagagtggggacaaagggacttgatttctcagatcgtattggaaaaaccaagaggacaggatatgaatctggagaatatgagatgcttggagagggtctgggagtgaaggagacaccccagcaaaagtaccagcgcctactgcatgaggtccaagagctgacaactgaagttgaaaaaatcaagacgacagtgaaggagtcagccacagaggagaagctgacccctgtgttgctggctaaacagctggcagccctgaagcagcagctggttgcttcccacctggagaagctgctgggaccagatgctgcaatcaaccttaccgaccccgatggcgccctggctaagcgcctactactgcagctggaagcaacaaagaacagcaaagggggatcagggggaaaaaccactgggacccccccagatagcagccttgtcacttatgaactacattctcggcctgagcaggacaagttctctcaagctgccaaagtcgcagaacttgaaaagcgcctgacagagctggagacagctgtacgttgtgatcaggatgctcagaatcccctttctgcaggtctacagggagcctgtctcatggagactgtagagctgttgcaagcaaaggtgagcgccctagaccttgcagttttggatcaagtggaggctcggctacagagtgtcctgggaaaggtgaacgagattgccaagcataaagcctctgtagaagatgcagatacacaaagcaaggtgcaccagctatatgaaactatacagcgctggagccccattgcctccaccctccctgagctggtgcagagacttgtcaccatcaagcagctgcacgagcaagccatgcagtttggtcagctcctgacacacttggataccacccagcagatgattgctaattccttgaaggacaataccaccctcttgacccaggtgcagacaaccatgcgtgaaaacctggccacagttgaggggaactttgccagcattgatgaacggatgaagaagctgggaaagtgagcacatttgggagctggagaacaggggttatccctacccctgtgaactctgttaacagcttacatagggtttcccctttactataactctagcatccccatcccatttgacactgggggcaagggttcttcttgcatgtggggtttatacccctcccctgatgaatacagagtggtagctaggggttggttatcatcagaaggtggtctcccctcaggcctgggggataaggacgtgggcccagccacatgccaactcatgtccaatactgctttgcctggtgtggggaaggattgggtcttgtcccccaacacagcttctgtggctgactgtaatactgtacaactgtttctgaccattaaatgctgttgtactctgtgtggcctctgctgtgtttcctggggaggaagcagcactaggatatagatattcattcgtcataacaggcaatctaagccactctatactacaagagatggatttaaattgtaacctgttcttaccaaagaactaaataaaaaatgagtacagagccagagccagagtttcaaaatattctcatctgttaaattaagagtgtctcccat

SEQ ID NO: 93731 - protein, 642 aa, Artificial Sequence
  derived and/or modified sequence
MSSKRPASPYGEADGEVAMVTSRQKVEEEESDGLPAFHLPLHVSFPNKPHSEEFQPVSLLTQETCGHRTPTSQHNTMEVDGNKVMSSFAPHNSSTSPQKAEEGGRQSGESLSSTALGTPERRKGSLADVVDTLKQRKMEELIKNEPEETPSIEKLLSKDWKDKLLAMGSGNFGEIKGTPESLAEKERQLMGMINQLTSLREQLLAAHDEQKKLAASQIEKQRQQMELAKQQQEQIARQQQQLLQQQHKINLLQQQIQVQGQLPPLMIPVFPPDQRTLAAAAQQGFLLPPGFSYKAGCSDPYPVQLIPTTMAAAAAATPGLGPLQLQQLYAAQLAAMQVSPGGKLPGIPQGNLGAAVSPTSIHTDKSTNSPPPKSKEKTTLESLTQQLAVKQNEEGKFSHAMMDFNLSGDSDGSAGVSESRIYRESRGRGSNEPHIKRPMNAFMVWAKDERRKILQAFPDMHNSNISKILGSRWKAMTNLEKQPYYEEQARLSKQHLEKYPDYKYKPRPKRTCLVDGKKLRIGEYKAIMRNRRQEMRQYFNVGQQAQIPIATAGVVYPGAIAMAGMPSPHLPSEHSSVSSSPEPGMPVIQSTYGVKGEEPHIKEEIQAEDINGEIYDEYDEEEDDPDVDYGSDSENHIAGQAN

SEQ ID NO: 93732 - DNA, 1929 bp, Artificial Sequence
  derived and/or modified sequence
atgagcagcaagagacccgccagcccctacggcgaggccgacggcgaggtggccatggtgaccagcagacagaaggtggaggaggaggagagcgacggcctgcccgccttccacctgcccctgcacgtgagcttccccaacaagccccacagcgaggagttccagcccgtgagcctgctgacccaggagacctgcggccacagaacccccaccagccagcacaacaccatggaggtggacggcaacaaggtgatgagcagcttcgccccccacaacagcagcaccagcccccagaaggccgaggagggcggcagacagagcggcgagagcctgagcagcaccgccctgggcacccccgagagaagaaagggcagcctggccgacgtggtggacaccctgaagcagagaaagatggaggagctgatcaagaacgagcccgaggagacccccagcatcgagaagctgctgagcaaggactggaaggacaagctgctggccatgggcagcggcaacttcggcgagatcaagggcacccccgagagcctggccgagaaggagagacagctgatgggcatgatcaaccagctgaccagcctgagagagcagctgctggccgcccacgacgagcagaagaagctggccgccagccagatcgagaagcagagacagcagatggagctggccaagcagcagcaggagcagatcgccagacagcagcagcagctgctgcagcagcagcacaagatcaacctgctgcagcagcagatccaggtgcagggccagctgccccccctgatgatccccgtgttcccccccgaccagagaaccctggccgccgccgcccagcagggcttcctgctgccccccggcttcagctacaaggccggctgcagcgacccctaccccgtgcagctgatccccaccaccatggccgccgccgccgccgccacccccggcctgggccccctgcagctgcagcagctgtacgccgcccagctggccgccatgcaggtgagccccggcggcaagctgcccggcatcccccagggcaacctgggcgccgccgtgagccccaccagcatccacaccgacaagagcaccaacagccccccccccaagagcaaggagaagaccaccctggagagcctgacccagcagctggccgtgaagcagaacgaggagggcaagttcagccacgccatgatggacttcaacctgagcggcgacagcgacggcagcgccggcgtgagcgagagcagaatctacagagagagcagaggcagaggcagcaacgagccccacatcaagagacccatgaacgccttcatggtgtgggccaaggacgagagaagaaagatcctgcaggccttccccgacatgcacaacagcaacatcagcaagatcctgggcagcagatggaaggccatgaccaacctggagaagcagccctactacgaggagcaggccagactgagcaagcagcacctggagaagtaccccgactacaagtacaagcccagacccaagagaacctgcctggtggacggcaagaagctgagaatcggcgagtacaaggccatcatgagaaacagaagacaggagatgagacagtacttcaacgtgggccagcaggcccagatccccatcgccaccgccggcgtggtgtaccccggcgccatcgccatggccggcatgcccagcccccacctgcccagcgagcacagcagcgtgagcagcagccccgagcccggcatgcccgtgatccagagcacctacggcgtgaagggcgaggagccccacatcaaggaggagatccaggccgaggacatcaacggcgagatctacgacgagtacgacgaggaggaggacgaccccgacgtggactacggcagcgacagcgagaaccacatcgccggccaggccaactag

SEQ ID NO: 93733 - DNA, 1929 bp, Artificial Sequence
  derived and/or modified sequence
atgtcttctaaacgccctgcctctccctacggcgaagccgacggcgaggtggcgatggtgacgagccggcagaaggttgaagaagaagaatctgacggcctccctgcctttcacttgccgcttcatgtatcgtttcccaacaagcctcactctgaagagttccagccggtgtcactattgactcaggagacctgtggacacaggactccaacctctcagcataacacaatggaggtggacgggaacaaagtaatgagttcattcgctcctcataacagcagtacaagtccgcagaaggccgaagaggggggaaggcagtccggagagtcactgtcttccaccgcattaggcacccccgagcggcgcaaaggttccctcgcagatgtggtggatacccttaagcagagaaagatggaggaactgatcaagaatgagcctgaggagacccccagcattgagaaactgctgtctaaagactggaaggataaattactggccatgggctcgggtaactttggagaaatcaaaggcacccctgaatcactggccgagaaggagcgacagcttatgggcatgatcaaccagttgaccagtttgcgtgagcagctcctggcagctcacgatgaacagaaaaaacttgcagcttctcaaatcgagaaacaacgccaacagatggaactggctaagcagcagcaagagcaaattgctcgacagcagcagcaactcttgcaacaacagcataagatcaacctcctgcaacagcagattcaagttcaaggccaactgcccccattaatgatcccagtgttccctcctgaccaaaggacattagccgcggcggcccagcagggtttcctgctgccacctggttttagttataaagccgggtgtagtgatccgtaccccgtacagcttattccaaccactatggcagctgcagctgctgcgactcccggactgggaccattgcagctgcagcagctgtacgctgcccagttggctgcaatgcaggtttccccgggcggcaagcttccaggtattccccagggaaatctgggtgctgccgttagtccaacctctattcataccgataaatcaactaacagccctccccccaaaagcaaggaaaaaaccaccctggagagcttgacacagcagcttgctgttaaacagaacgaggaaggaaaattctcccacgccatgatggactttaacctctctggagattcagatggatctgcaggagtctccgagtctcggatctaccgggaatccagaggaagaggctcgaatgagcctcacattaagagaccaatgaatgcctttatggtatgggccaaggatgaaagacggaaaatcttgcaggcctttcccgatatgcacaactctaacatctccaaaattctgggctccagatggaaggccatgaccaacctggaaaaacagccatattatgaagagcaagcaagactgagcaaacaacatcttgaaaaatatcccgattataagtacaagccccggccaaagagaacatgtctggtagatggaaagaagcttagaatcggcgagtacaaagccattatgcggaataggcgccaggaaatgcgacaatacttcaatgtgggtcagcaagcccagatccccatagcaacagcgggcgtcgtctacccgggggccatcgcaatggccggaatgcctagccctcacctgccctctgagcactcctccgtctcttccagccccgaaccgggtatgcctgtgattcagagcacttatggagtaaaaggtgaggaacctcatattaaggaagagatccaagccgaggacattaacggcgagatttatgatgagtacgacgaagaagaagatgatcccgacgtggactacgggtcggacagcgaaaatcacatagctggacaggccaactag

SEQ ID NO: 93734 - DNA, 1929 bp, Artificial Sequence
  derived and/or modified sequence
atgtcatccaaaagacccgcttctccatatggcgaggccgacggggaggtcgcgatggtgacttcacgccaaaaggtggaagaggaggaatcagatggactaccagcttttcatcttccactccacgtcagttttcctaacaagccgcacagcgaggaatttcaacccgtgtcattgttaacacaggagacatgcggacatcggacccctacctctcagcacaatacaatggaagtggacgggaacaaggttatgagttcctttgctccacacaatagtagcacctccccccaaaaggcggaagaagggggccggcagtccggagagtcactcagtagcacagcccttgggacgccggagcgtagaaagggtagcctggctgatgtggtggatactctaaagcaacgcaaaatggaggagttaattaaaaacgagccagaagaaacacctagcattgagaagctcctctctaaggactggaaggataagctgctcgcaatgggctcgggtaactttggggaaattaaggggaccccagaatctttggctgagaaggagagacaactgatgggaatgattaatcaattgacatccctgcgggaacagttgttagccgcccacgatgagcagaaaaagttagctgccagccagatcgaaaagcaaagacaacaaatggagctggctaagcagcaacaggagcagatcgccagacaacagcagcagctcttgcaacaacaacacaagatcaaccttctccagcagcaaattcaggtgcaaggccagctgccgcctttgatgattcccgttttccctcctgaccagcgcactctagctgctgccgcacagcagggcttcctcctgccacctggatttagttacaaggcgggatgctcagacccatatcccgtgcagctgatccctactactatggcagctgccgctgcagcaacgccaggcctcggccccttacaactgcagcagctgtatgcagcgcaactggctgcaatgcaagtgtctccggggggcaaactgcccgggatcccacaggggaaccttggtgccgctgtgtccccaacttcgatccacaccgataagtccacaaattcccctccgccgaagagcaaggagaaaaccacattagagtctctgacccagcagcttgccgtgaaacagaacgaggaggggaagttctcccacgccatgatggactttaatttatctggcgactctgacgggtcagcaggggtaagcgagtcaaggatataccgggagagtcggggcaggggttccaacgaaccacacataaaaaggccgatgaacgcctttatggtgtgggccaaagatgagagacgcaagatcctccaggctttccccgacatgcataattcgaatatcagtaagattcttggctcaaggtggaaggctatgacaaatttggaaaaacagccctattatgaagaacaggcccggctgtctaagcaacacttggagaaatacccagattacaaatacaaaccccgacctaagaggacatgtcttgtagacggaaagaagctgcgcattggagagtataaggccataatgaggaaccgccgtcaggaaatgagacagtatttcaatgtgggacagcaggcacagattccgattgcaaccgccggggttgtgtatccaggcgctatcgccatggcgggtatgccttcaccgcatttgccttctgaacatagttccgtgagctcgagccctgagcctggaatgcccgtaatccagtctacttacggagttaaaggtgaagaacctcatattaaagaggagatacaggctgaagatatcaatggtgaaatctacgacgagtacgacgaagaggaggatgatcccgatgtggactatggatccgactccgagaaccacattgccggtcaggctaactag

SEQ ID NO: 93735 - DNA, 1929 bp, Artificial Sequence
  derived and/or modified sequence
atgagcagcaagaggcctgccagcccctacggggaggctgatggagaggtggccatggtgaccagccggcagaaggtggaggaggaggagagtgatggcctgcctgccttccacctgcccctgcacgtgtccttccccaacaagccccacagcgaggagttccagcctgtgtccctgctgacccaggagacctgtggccacaggacccccaccagccagcacaacaccatggaggtggatggcaacaaggtgatgagcagctttgccccccacaacagcagcaccagcccccagaaggccgaggagggcggccggcagagcggggagagcctgagcagcacagccctgggcaccccagagaggaggaagggcagcctggctgatgtggtggacaccctgaagcagaggaagatggaggagctgatcaagaatgaacctgaggagacccccagcattgagaagctgctgagcaaggactggaaggacaagctgctggccatgggcagcggcaactttggagagatcaagggcaccccagagagcctggccgagaaggagcggcagctgatgggcatgatcaaccagctgaccagcctgcgggagcagctgctggccgcccatgatgagcagaagaagctggccgccagccagatcgagaagcagaggcagcagatggagctggccaagcagcagcaggagcagatcgcccggcagcagcagcagctgctgcagcagcagcacaagatcaacctgctgcagcagcagatccaggtgcagggccagctgccccccctgatgatccctgtgtttcctccagaccagaggaccctggccgccgccgcccagcagggcttcctgctgcccccaggcttctcctacaaggccggctgcagcgacccctaccctgtgcagctgatccccaccaccatggctgctgctgctgctgccaccccaggcctgggccccctgcagctgcagcagctgtatgctgcccagctggccgccatgcaggtgtcccctgggggcaagctgcccggcatcccccagggcaacctgggcgctgctgtgagccccaccagcatccacacagacaagagcaccaacagccccccacccaagagcaaggagaagaccaccctggagagcctgacccagcagctggccgtgaagcagaatgaggagggcaagttcagccacgccatgatggacttcaacctgagcggggacagtgatggcagcgctggggtgtctgagagccgcatctaccgggagagccggggccggggcagcaatgagccccacatcaagaggcccatgaatgccttcatggtgtgggccaaggatgagaggaggaagatcctgcaggccttcccagacatgcacaacagcaacatcagcaagatcctgggcagccgctggaaggccatgaccaacctggagaagcagccctactatgaggagcaggcccggctgagcaagcagcacctggagaagtacccagactacaagtacaagccccggcccaagaggacctgcctggtggatggcaagaagctgagaattggagagtacaaggccatcatgaggaacagacggcaggagatgaggcagtacttcaacgtgggccagcaggcccagatccccatcgccacagctggggtggtgtacccaggggccatcgccatggccggcatgcccagcccccacctgcccagcgagcacagctctgtgagcagcagccctgagcccggcatgcctgtgatccagagcacctacggcgtgaagggggaggagccccacatcaaggaggagatccaggccgaggacatcaatggagagatctatgatgaatatgatgaggaggaggatgatcctgatgtggactatggcagtgacagcgagaaccacatcgccggccaggccaactag

SEQ ID NO: 93736 - DNA, 1929 bp, Artificial Sequence
  derived and/or modified sequence
atgagcagcaagcggcccgccagcccctacggcgaggccgacggcgaagtcgcaatggtgactagtagacagaaggtagaagaggaggagtctgacgggcttccagccttccacttgcccctacacgtgagcttcccgaataagccccactctgaagagttccaacctgtgtcccttttgactcaggaaacatgcgggcacaggactcccacttctcagcacaacacaatggaggtggatgggaacaaagtgatgtccagcttcgcacctcataatagctccacaagtccccagaaggctgaggaggggggccggcagtctggggagtctctttcgagtaccgcactaggcaccccagaacgcaggaagggcagcctggccgacgtcgttgataccctcaaacagcgtaagatggaagagttgattaagaatgagccagaggagacaccaagcattgagaaactgctgtcaaaggattggaaggataagctactggctatgggatctggaaatttcggagaaattaaagggacacctgagtccctggccgagaaagaaagacagttaatggggatgatcaatcagcttacctctcttagagagcagttgttagcagcgcacgacgaacagaagaaactcgccgccagccaaatagagaaacaaaggcagcagatggagctcgcaaaacagcagcaggaacagatcgcgcgtcaacagcagcagctgttacagcagcagcacaaaattaatctgttgcagcagcagatccaggttcagggtcagctaccgcctctgatgattcccgtgtttcctcccgaccaacgcacattagctgctgccgcccagcaaggatttttactgccccccggctttagctacaaagccggctgttcagacccgtacccagtgcagctaattcctactactatggcggccgctgcagccgccacccctggtctcgggcccctgcaacttcagcaactgtatgctgcccagctagccgccatgcaggtttcccctggtggaaaattaccaggcatcccccagggcaatcttggcgctgcagtatccccaaccagcatccatacagacaaatccactaactcacccccccctaagtctaaggagaagacaaccctggagagtttgacacagcagctggccgtgaagcagaatgaagaaggaaaattcagccatgctatgatggactttaatttgtccggggacagtgacggtagtgctggagtatcagagagccggatataccgagaaagccgcgggagaggctctaatgaaccccatataaaaagacctatgaacgcctttatggtgtgggctaaggatgaacgaaggaaaatcctccaggccttccctgacatgcacaattccaatatttccaagattctgggaagtagatggaaagctatgactaatttggagaaacagccctactatgaagaacaggctcggctgtccaaacagcaccttgagaagtatcccgattacaagtataaaccgcggcctaagcgcacttgcttagtggatggtaaaaagctgcggatcggcgagtacaaagctatcatgcggaatcgccgtcaagagatgcgccagtacttcaacgtcggccagcaggctcagattcccatcgctacagctggggtcgtttacccgggcgctatagcaatggccgggatgccctctccacatcttccgagtgagcacagctcagtcagcagttcgcctgagccgggcatgcctgtcatccagagcacatatggagtcaagggcgaagagccacacattaaggaagaaatacaggctgaggatatcaacggggagatttacgacgagtacgatgaggaagaggatgacccagatgtggattatgggtctgattccgaaaaccatattgccgggcaggcaaattag

SEQ ID NO: 93737 - DNA, 1929 bp, Artificial Sequence
  derived and/or modified sequence
atgagcagcaagcggcccgccagcccctacggcgaggccgacggcgaagttgctatggtgactagtaggcagaaggtggaggaggaggaatctgatgggctgccggccttccacctgcctctccacgtgtcgttccctaacaaaccacactcagaagagttccagcctgtaagtctgctaacccaggagacctgtggtcacaggacaccgacttcacagcataataccatggaagtggacgggaataaggttatgtcctcattcgcaccgcacaactcaagcacatctcctcagaaagctgaggagggcggtaggcagtctggcgagagcctgagttccacagctctggggaccccagagcgtagaaagggctctctcgcggatgtggtggacactctcaagcagcgcaagatggaggagttgatcaagaatgaacctgaggaaaccccgagcatcgaaaagttgctatcaaaagattggaaagacaaactgctggctatgggaagtggaaatttcggggagattaaggggacccctgagtctctggccgaaaaggagcgtcagttgatgggcatgattaatcagctgacatcactgagggagcagctgctagccgcccacgacgagcagaagaaactagctgcttctcaaatcgagaagcagaggcagcagatggagctcgccaaacagcagcaagaacaaatcgcgcgtcagcaacaacagcttttgcagcagcaacataaaataaatttgctgcaacagcaaattcaagtgcaaggccagcttcctcctctgatgattcctgtttttccccccgatcagagaacactcgctgctgcggcacagcagggattcttgttaccacccggtttttcatacaaggcagggtgctctgacccctatccagttcagctgatccccacgactatggccgccgctgccgccgctactcccgggctgggccccttgcagttacagcagttgtatgccgcccaactagccgcaatgcaagtgagccctggcgggaagctgcccggaattccacaaggcaatcttggggccgccgtcagcccgactagcatacacacggacaaatcaacgaacagcccaccccctaaatccaaagagaagacaaccttagagagtcttactcagcagctggccgtcaagcagaatgaggagggaaagttctcccacgctatgatggactttaatcttagcggcgattcagacggctcagccggcgtctctgagagccggatctatcgcgaatctcgggggagaggttcaaacgaacctcatatcaaaaggccgatgaatgctttcatggtctgggcgaaagatgagcgtcggaagatccttcaggctttccctgacatgcacaactctaacatttcaaaaatcctaggatcccgatggaaagccatgaccaacctggagaaacagccttactatgaggaacaggccagactgtccaagcagcatctggaaaagtaccctgactacaagtataagcctcgcccgaagagaacttgcctggtggacggaaagaagctgcggattggggagtacaaggccattatgcggaaccggcgacaagagatgaggcagtattttaatgttggccagcaagcacagatcccaattgctacagccggagtcgtgtatcctggcgccatcgcgatggctggtatgccctcacctcatctgccatcagaacatagctctgtgtctagcagtcctgagccagggatgccagtgattcaatctacatatggcgtgaagggggaagaaccccatattaaagaggagattcaggctgaggatattaacggcgaaatatacgatgagtacgatgaagaggaggatgacccggatgtggactacggcagtgactccgaaaaccatatcgcagggcaagctaactag

SEQ ID NO: 93738 - DNA, 1929 bp, Artificial Sequence
  derived and/or modified sequence
atgagtagcaagagaccagcgtccccgtatggtgaggcagatggtgaggtggccatggtaacctctcggcagaaggttgaagaagaggagtctgacggcctcccagcgtttcacctgccgctgcatgtctccttccccaataagccccactctgaagaatttcagcccgtaagtctgcttacgcaggagacgtgtggacaccgaacaccaacatctcagcataacaccatggaggtagacggtaataaggtgatgagctcttttgcgccacacaattcatccacttctccccaaaaagcagaagagggcggacggcaatctggtgagtctctgtcttccactgctctcggcacccctgaacggaggaaagggtccctggccgacgtagtggatactctgaagcagaggaaaatggaggagcttatcaagaatgagcccgaagaaacgccttccatcgagaagctgttgagcaaggactggaaggataagttgctggccatgggctccgggaattttggggagatcaaagggacaccagagagtctcgctgagaaagaacggcaactgatgggtatgattaaccagctgacttccctccgggagcaattgctggcagcccacgatgaacagaagaaattagccgctagtcagatagaaaagcaacgtcagcagatggaactggctaagcagcaacaggagcaaattgctaggcaacagcaacaactgcttcagcagcagcacaagatcaacttgctgcagcagcagatccaggtgcagggtcagcttcccccactgatgatccctgtcttccccccagaccagagaaccttggcagccgctgcgcagcagggcttcctcctaccgccagggttctcttacaaggctggctgtagcgacccctaccccgtgcagctcattcccaccactatggcagccgctgctgccgctacccccggacttggcccactccagcttcaacagctctatgccgctcagctagccgctatgcaggtcagtcctggtgggaaactgcctggcatcccccagggcaacctgggggctgccgtctctccaacatcaattcacaccgacaaaagcacgaattctccgccacctaaaagtaaggagaaaacaacactggagagcctgactcagcaattggccgtgaagcagaatgaggaggggaagttcagccatgctatgatggatttcaacctgagcggcgatagcgatggctcagctggtgtgtccgaaagcaggatttaccgcgaatcccggggaagaggtagtaatgaaccgcacattaaaagaccgatgaacgctttcatggtatgggctaaagacgagaggagaaagattctgcaggcgtttccagacatgcataattccaatatctcaaaaatcctcgggagtcggtggaaggctatgacaaacctcgagaaacagccttactatgaagagcaggcccgattgtccaaacagcacttggagaaatatcccgattataaatacaaacctcgccctaaacggacctgcctggtggacggaaagaaactgcgcattggagaatacaaagccatcatgcgaaaccggcgacaagaaatgcgtcaatactttaatgtcgggcagcaagcgcagattcccatagccacagcaggcgtggtctatccaggcgcaattgcaatggcagggatgccatccccacatctgccatctgagcacagctctgtgagttcctcgccggagccaggaatgcccgtcattcagtcaacctatggcgtgaagggagaggagccacacattaaggaggagatacaggccgaagacataaatggcgagatctatgacgagtacgatgaagaggaggacgaccccgatgtggactacggctccgactcagagaaccacatcgccggacaggccaattag

SEQ ID NO: 93739 - DNA, 1929 bp, Artificial Sequence
  derived and/or modified sequence
atgtcctccaaacggccagcgagtccctatggtgaggcagatggtgaagtcgctatggtgacatcccgtcagaaagtggaggaagaggagtccgacggcctgccagcatttcacctgcctctgcacgtttcctttcccaacaaaccacatagcgaggaatttcagcccgtgagcctacttactcaggaaacatgcgggcaccggaccccaacaagtcagcacaataccatggaagtggatggcaataaggtcatgagctcctttgctcctcataacagttccaccagcccccagaaggccgaagaggggggtcgacagtccggcgaaagtctaagcagcacagccctcggaacccctgaaagaaggaaaggaagcctcgccgacgttgtggacactctgaagcagaggaaaatggaagaactaataaagaatgagccagaagagactcctagcattgagaagctcttaagtaaggactggaaagataagctcctcgcaatggggtcaggcaactttggcgaaattaaagggacgcccgaaagtctggcagaaaaagaaagacagctgatggggatgatcaatcagctgacttcacttagagaacaactgcttgcagcacacgacgaacagaaaaagctcgcggcttcccagattgagaaacaacggcaacaaatggagctggccaaacagcaacaggaacagatcgcacggcagcagcagcaactgctgcaacagcagcataagatcaatttattacaacagcagatccaggtgcagggtcagcttccacccttaatgatacccgtcttccctcccgaccagcgaaccctggcagccgctgcacagcagggctttttgcttcccccagggttctcctataaagctgggtgtagtgacccatacccagtgcaactgattccaaccaccatggccgcagccgctgcggctacccctggcttgggccctttgcaactgcaacagctctacgcggcacagctggccgctatgcaggtgtctcccggaggaaagcttccaggaatcccacagggcaacctgggtgcagcagtgtcacctacctctatccatacagataagtccactaactctcctcccccaaagtctaaggagaaaaccactttggagtcccttacccagcagcttgccgtcaaacagaacgaagagggtaagttttcccacgccatgatggacttcaacctgagcggtgatagtgacgggagtgctggtgtgtcagagagccgaatctaccgtgagagtcgaggacggggaagtaacgagccccatattaagaggccgatgaatgccttcatggtgtgggccaaggacgaacgacgaaaaattctgcaggcgttccccgatatgcataacagcaatatctccaagattctgggtagcagatggaaggccatgactaatctcgagaagcaaccctactatgaagaacaggcccgtctgtccaaacaacatctggagaaataccccgattacaaatacaagccacgcccaaagcggacgtgcttagtggacggaaagaagctgagaatcggtgagtacaaggccatcatgcggaacaggcgccaggagatgcggcaatatttcaacgtgggccagcaggctcagattcctatagcgactgcaggggttgtgtatcctggtgccattgctatggctggcatgccaagcccccatctgcccagcgagcacagctccgtctcgagcagccctgagcccggaatgcctgttattcagtcaacctacggggtcaaaggggaagagccccacattaaagaagagatccaggccgaggacattaatggagagatctatgacgagtatgacgaggaagaggacgatccagatgtggactacggatccgactccgagaatcacattgctggacaggctaattag

SEQ ID NO: 93740 - DNA, 3991 bp, Artificial Sequence
  derived and/or modified sequence
gagaaaatcaattggtttagaaggtttggactcacttgacaggttcagttggagacgatcataggtggctgctgtgacaaagggaaattgtgcttttccagcatgcttactgaccctgatttacctcaggagtttgaaaggatgtcttccaagcgaccagcctctccgtatggggaagcagatggagaggtagccatggtgacaagcagacagaaagtggaagaagaggagagtgacgggctcccagcctttcaccttcccttgcatgtgagttttcccaacaagcctcactctgaggaatttcagccagtttctctgctgacgcaagagacttgtggccataggactcccacttctcagcacaatacaatggaagttgatggcaataaagttatgtcttcatttgccccacacaactcatctacctcacctcagaaggcagaagaaggtgggcgacagagtggcgagtccttgtctagtacagccctgggaactcctgaacggcgcaagggcagtttagctgatgttgttgacaccttgaagcagaggaaaatggaagagctcatcaaaaacgagccggaagaaacccccagtattgaaaaactactctcaaaggactggaaagacaagcttcttgcaatgggatcggggaactttggcgaaataaaagggactcccgagagcttagctgagaaagaaaggcaactcatgggtatgatcaaccagctgaccagcctccgagagcagctgttggctgcccacgatgagcagaagaaactagctgcctctcagattgagaaacagcgtcagcaaatggagctggccaagcagcaacaagaacaaattgcaagacagcagcagcagcttctacagcaacaacacaaaatcaatttgctccagcaacagatccaggttcaaggtcagctgccgccattaatgattcccgtattccctcctgatcaacggacactggctgcagctgcccagcaaggattcctcctccctccaggcttcagctataaggctggatgtagtgacccttaccctgttcagctgatcccaactaccatggcagctgctgccgcagcaacaccaggcttaggcccactccaactgcagcagttatatgctgcccagctagctgcaatgcaggtatctccaggagggaagctgccaggcataccccaaggcaaccttggtgctgctgtatctcctaccagcattcacacagacaagagcacaaacagcccaccacccaaaagcaaggaaaaaacaacactggagagtctgactcagcaactggcagttaaacagaatgaagaaggaaaatttagccatgcaatgatggatttcaatctgagtggagattctgatggaagtgctggagtctcagagtcaagaatttatagggaatcccgagggcgtggtagcaatgaaccccacataaagcgtccaatgaatgccttcatggtgtgggctaaagatgaacggagaaagatccttcaagcctttcctgacatgcacaactccaacatcagcaagatattgggatctcgctggaaagctatgacaaacctagagaaacagccatattatgaggagcaagcccgtctcagcaagcagcacctggagaagtaccctgactataagtacaagcccaggccaaagcgcacctgcctggtggatggcaaaaagctgcgcattggtgaatacaaggcaatcatgcgcaacaggcggcaggaaatgcggcagtacttcaatgttgggcaacaagcacagatccccattgccactgctggtgttgtgtaccctggagccatcgccatggctgggatgccctcccctcacctgccctcggagcactcaagcgtgtctagcagcccagagcctgggatgcctgttatccagagcacttacggtgtgaaaggagaggagccacatatcaaagaagagatacaggccgaggacatcaatggagaaatttatgatgagtacgacgaggaagaggatgatccagatgtagattatgggagtgacagtgaaaaccatattgcaggacaagccaactgataagggtcaaaagattgttgtgaccttaggacttaaagaagccctaactggttcatccttaccagtggccaagcacattaactttctcatacactgactgttactttaactgttagtcttaaatagttgggacatcagctgactaatagacctcagcctcaaaaggcttggaaagaaaaaacaaatacaacaagcaaacaacaatatcaacaacaagagattgaaataagctatgggtaaaataatgccagtaattcagctgctacatccaagcactgaagtcttacccgtcaacttttttttttttttaaataaactttatggctgtttgttctacaatgttctagaaattctcactcaggtacacagtgccaacaagtggcttgtgaatgtgttttgttgttttgtgctacaatttttaaaaagaaaaaagttttgttttgttttttggggtttctgggttttttccttttctttttctttcctttcattttttttctttgtaatgcacctgacagaaaaaaaagaaaaatgaatttctctttacttctctccaccttctccatctctctactttaaagatggaagtctgtgcatgaggggaaagagggaaaaagagcctgtttttaacttccttgctatccaccacaaaataagcaattattttctttagaggactttatctattgcacaccacactacatctttgagcaagtgccaaatttgtactgaagtgttgaccaagttcattttttctctttactttttccttttccttcttaagttaggacagtgttaaatcttagacaatcccttgaaaaacctgaaataccagcagctggtgagatttgacttttttttttaatggaaactgtaggtgctgttctcaggtgaaaagagagagagagagagagacataagaaatttagagaaaaatattttctgatcttggatttttgtgtgtatgtatgtatgtgattatggtactaataataggaataacgttggaccattgtgagttaaacccacatctggggatgaaatcccacatcctcccaagtgactggtctagaaataatcttgaccttgactttgcacttcaaatgacaacttaaccaagtatagggctcagaaattatatttttaaatgtctgattattattggatggatcaggtggccctgtgtaatagaggtgtgcatgtataacatggaagctactagcaaactgctcccagatgtcctttctccctggtcagttggttccattaacgtttgctacttagtgatttttgtttttcctgttgatattttgagcaaaacaatcattgttttcattgaatatatttggccattttttcagacaaatagaattagcttatttcttcaacattccatcctttcccgatcaggaaatgaaactgatgattttataaggtatttttcacccctccatgaagtgaggtggaggcctttagcatttcagaagtgtgggccatatgtagttcatgccataaaaagtaggatttaattaaaagtcattgcagcccaataaaatggagcctggctgcacccagggatccttgccactgctcttcccttgctgtcagattaatccactgaagtccaactttggttcaagcagagtatttgcaaagagcaacaactgaatgtgatgggactgcttatgtagattttgccagccaaatgccaaggcagttgtagggcctgtacaaataaatgcaaaatcatttcaagtcaattgccattatttgtattgaagtatcagatagatagtaaatactgcaactagtagcttgatgtgctatagttttcactccagtcatcattttcctatctcaccccccgaaacaccaccctaaagttggatttttacatataaataaaaaaagaatccctttt

SEQ ID NO: 93741 - DNA, 2365 bp, Artificial Sequence
  derived and/or modified sequence
caggatgtcttccaagcgaccagcctctccgtatggggaagcagatggagaggtagccatggtgacaagcagacagaaagtggaagaagaggagagtgacgggctcccagcctttcaccttcccttgcatgtgagttttcccaacaagcctcactctgaggaatttcagccagtttctctgctgacgcaagagacttgtggccataggactcccacttctcagcacaatacaatggaagttgatggcaataaagttatgtcttcatttgccccacacaactcatctacctcacctcagaaggcagaagaaggtgggcgacagagtggcgagtccttgtctagtacagccctgggaactcctgaacggcgcaagggcagtttagctgatgttgttgacaccttgaagcagaggaaaatggaagagctcatcaaaaacgagccggaagaaacccccagtattgaaaaactactctcaaaggactggaaagacaagcttcttgcaatgggatcggggaactttggcgaaataaaagggactcccgagagcttagctgagaaagaaaggcaactcatgggtatgatcaaccagctgaccagcctccgagagcagctgttggctgcccacgatgagcagaagaaactagctgcctctcagattgagaaacagcgtcagcaaatggagctggccaagcagcaacaagaacaaattgcaagacagcagcagcagcttctacagcaacaacacaaaatcaatttgctccagcaacagatccaggttcaaggtcagctgccgccattaatgattcccgtattccctcctgatcaacggacactggctgcagctgcccagcaaggattcctcctccctccaggcttcagctataaggctggatgtagtgacccttaccctgttcagctgatcccaactaccatggcagctgctgccgcagcaacaccaggcttaggcccactccaactgcagcagttatatgctgcccagctagctgcaatgcaggtatctccaggagggaagctgccaggcataccccaaggcaaccttggtgctgctgtatctcctaccagcattcacacagacaagagcacaaacagcccaccacccaaaagcaaggaaaaaacaacactggagagtctgactcagcaactggcagttaaacagaatgaagaaggaaaatttagccatgcaatgatggatttcaatctgagtggagattctgatggaagtgctggagtctcagagtcaagaatttatagggaatcccgagggcgtggtagcaatgaaccccacataaagcgtccaatgaatgccttcatggtgtgggctaaagatgaacggagaaagatccttcaagcctttcctgacatgcacaactccaacatcagcaagatattgggatctcgctggaaagctatgacaaacctagagaaacagccatattatgaggagcaagcccgtctcagcaagcagcacctggagaagtaccctgactataagtacaagcccaggccaaagcgcacctgcctggtggatggcaaaaagctgcgcattggtgaatacaaggcaatcatgcgcaacaggcggcaggaaatgcggcagtacttcaatgttgggcaacaagcacagatccccattgccactgctggtgttgtgtaccctggagccatcgccatggctgggatgccctcccctcacctgccctcggagcactcaagcgtgtctagcagcccagagcctgggatgcctgttatccagagcacttacggtgtgaaaggagaggagccacatatcaaagaagagatacaggccgaggacatcaatggagaaatttatgatgagtacgacgaggaagaggatgatccagatgtagattatgggagtgacagtgaaaaccatattgcaggacaagccaactgataagggtcaaaagattgttgtgaccttaggacttaaagaagccctaactggttcatccttaccagtggccaagcacattaactttctcatacactgactgttactttaactgttagtcttaaatagttgggacatcagctgactaatagacctcagcctcaaaaggcttggaaagaaaaaacaaatacaacaagcaaacaacaatatcaacaacaagagattgaaataagctatgggtaaaataatgccagtaattcagctgctacatccaagcactgaagtcttacccgtcaacttttttttttttttaaataaactttatggctgtttgttctacaatgttctagaaattctcactcaggtacacagtgccaacaagtggcttgtgaatgtgttttgttgttttgtgctacaatttttaaaaagaaaaaa

SEQ ID NO: 93742 - protein, 613 aa, Artificial Sequence
  derived and/or modified sequence
MAAETLLSSLLGLLLLGLLLPASLTGGVGSLNLEELSEMRYGIEILPLPVMGGQSQSSDVVIVSSKYKQRYECRLPAGAIHFQREREEETPAYQGPGIPELLSPMRDAPCLLKTKDWWTYEFCYGRHIQQYHMEDSEIKGEVLYLGYYQSAFDWDDETAKASKQHRLKRYHSQTYGNGSKCDLNGRPREAEVRFLCDEGAGISGDYIDRVDEPLSCSYVLTIRTPRLCPHPLLRPPPSAAPQAILCHPSLQPEEYMAYVQRQAVDSKQYGDKIIEELQDLGPQVWSETKSGVAPQKMAGASPTKDDSKDSDFWKMLNEPEDQAPGGEEVPAEEQDPSPEAADSASGAPNDFQNNVQVKVIRSPADLIRFIEELKGGTKKGKPNIGQEQPVDDAAEVPQREPEKERGDPERQREMEEEEDEDEDEDEDEDERQLLGEFEKELEGILLPSDRDRLRSEVKAGMERELENIIQETEKELDPDGLKKESERDRAMLALTSTLNKLIKRLEEKQSPELVKKHKKKRVVPKKPPPSPQPTGKIEIKIVRPWAEGTEEGARWLTDEDTRNLKEIFFNILVPGAEEAQKERQRQKELESNYRRVWGSPGGEGTGDLDEFDF

SEQ ID NO: 93743 - DNA, 1842 bp, Artificial Sequence
  derived and/or modified sequence
atggctgccgaaacgctgctgtcctctctgctgggacttctgctgctcggcttgctcttacctgccagcctgaccggcggggtcggaagccttaatctcgaagaactttctgaaatgcgctatgggattgaaattctgcctctgccagtgatgggtggccagagtcagtcaagcgatgtggtcatcgtaagttcaaagtataagcagcgttacgagtgcagactgcccgccggggctattcattttcagcgtgagagagaggaggaaactccagcctaccagggtccggggattcccgaactcctctccccaatgagagatgcaccctgccttctgaagactaaagattggtggacgtacgaattttgttacgggaggcacattcagcagtaccacatggaagactccgagatcaaaggggaggtcctttatctggggtattaccagagtgccttcgactgggatgatgagacagccaaagcctctaaacagcaccgtttgaaaagataccattcacagacctacggaaacggcagtaagtgtgacctgaacggccgcccccgtgaggctgaagtacgcttcttgtgtgacgaaggcgcaggcatatctggagactatatcgaccgtgtggacgaaccactctcttgcagctatgttttgactatccggactcccaggctgtgcccgcatcccttacttagaccaccgccttccgctgccccccaagccatactctgccacccttcactgcagccagaggagtacatggcttatgttcagcggcaagcagtggactctaagcagtatggcgataagataatcgaggagctacaggatttaggtccacaggtctggagtgagaccaagtcaggagtggcccctcagaaaatggccggagctagccccaccaaggacgattcaaaggattcagacttctggaaaatgttaaacgaaccagaagatcaggccccgggaggagaagaggtgccggccgaagagcaggacccttcccccgaggccgccgacagtgcctccggggcgcctaacgacttccagaacaacgtgcaagtgaaagtcattagatcacctgccgaccttattcgtttcatcgaagagcttaaaggggggaccaagaaaggtaagccaaacattggtcaagaacagcccgtcgatgacgccgcggaggttccccaacgggaaccagaaaaggaacgcggagaccctgagcggcagcgtgagatggaggaggaagaagatgaagacgaagacgaagacgaggatgaagatgagaggcaattactcggagagttcgaaaaagagctggaggggatcttactgccttccgacagagatcgccttcgcagcgaggtgaaggccgggatggaacgggagcttgagaatataatccaagaaacggaaaaggagcttgatccagacggcctcaagaaagaaagcgagagggatagagctatgctggctctgactagcactctaaataagctgatcaagcgcctggaggagaaacagtctccagaactggtgaagaaacacaagaaaaagcgcgtcgtgcccaagaagccaccaccatcacctcaaccaactgggaaaatagagataaagattgtcaggccctgggctgaaggtactgaggagggcgctcggtggttgactgatgaagatacccggaacctaaaggagattttcttcaacattttagttcctggagcagaggaggctcaaaaggagcgacagcgccagaaggaactggaaagtaattatcgtcgcgtgtggggcagccccggaggagagggcaccggagacctcgacgaatttgacttctag

SEQ ID NO: 93744 - DNA, 1842 bp, Artificial Sequence
  derived and/or modified sequence
atggctgctgagaccctgctgagcagcctgctgggcctgctgctgctgggcctgctgctgcctgccagcctgactggaggagtgggcagcctgaacctggaggagctgtctgagatgagatatggaattgagatcctgcccctgcctgtgatgggcggccagagccagagcagtgatgtggtgattgtgagcagcaagtacaagcagagatatgagtgccgcctgcctgctggggccatccacttccagcgggagcgggaggaggagaccccagcctaccagggccctggcatccctgagctgctgagccccatgagagatgccccctgcctgctgaagaccaaggactggtggacctatgagttctgctacggccgccacatccagcagtaccacatggaggacagcgagatcaagggggaggtgctgtacctgggctactaccagagcgcctttgactgggatgatgaaacagccaaggccagcaagcagcaccggctgaagcgctaccacagccagacctatggaaatggcagcaaatgtgacctgaatggccggccccgggaggccgaggtgcgcttcctgtgtgatgaaggagctggcatcagcggggactacatcgacagagtggatgagcccctgagctgcagctatgtgctgaccatccgcaccccccggctgtgcccccaccccctgctgcggcccccacccagcgctgccccccaggccatcctgtgccaccccagcctgcagcctgaggagtacatggcctacgtgcagaggcaggccgtggacagcaagcagtatggagacaagatcatcgaggagctgcaggacctgggcccccaggtgtggagcgagaccaagagcggcgtggccccccagaagatggccggggccagccccaccaaggatgacagcaaggacagcgacttctggaagatgctgaatgaacctgaggaccaggcccctggaggagaggaggtgcctgctgaggagcaggaccccagccctgaggccgctgacagcgccagcggggccccaaatgacttccagaacaacgtgcaggtgaaggtgatccgcagccctgctgacctgatccgcttcatcgaggagctgaagggcggcaccaagaagggcaagcccaacatcggccaggagcagcctgtggatgatgctgctgaggtgccccagcgggagcctgagaaggagcggggggaccctgagcggcagcgggagatggaggaggaggaggatgaagatgaagatgaagatgaagatgaagatgagcggcagctgctgggggagtttgagaaggagctggagggcatcctgctgcccagcgaccgggaccggctgcggtctgaggtgaaggccggcatggagcgggagctggagaacatcatccaggagacagagaaggagctggaccctgatggcctgaagaaggagagcgagcgggaccgggccatgctggccctgaccagcaccctgaacaagctgatcaagaggctggaggagaagcagagccctgagctggtgaagaagcacaagaagaagagggtggtgcccaagaagcccccacccagcccccagcccaccgggaagattgagatcaagatcgtgcggccctgggccgagggcacagaggagggcgcccgctggctgacagatgaggacaccaggaacctgaaggagatcttcttcaacatcctggtgcctggagctgaggaggcccagaaggagcggcagaggcagaaggagctggagagcaactaccgccgggtgtggggcagccctggaggagagggcactggagacctggatgaatttgacttctag

SEQ ID NO: 93745 - DNA, 1842 bp, Artificial Sequence
  derived and/or modified sequence
atggccgccgagaccctgctgagcagcctgctgggcctgctgctgctgggtctcctactgcctgcaagtttgaccggcggcgtcggtagcctgaacctcgaggagctaagcgaaatgagatatggcatcgaaatactgccacttccggtgatgggggggcagagtcaaagttcagatgtcgtaattgttagctccaagtacaagcaacgatatgagtgtcgtctgcccgccggcgcgattcattttcagcgcgaaagagaagaagagacacctgcttaccaaggccccggtattccggaactactcagtccaatgcgtgatgccccatgcctcctcaaaactaaggattggtggacatacgaattttgttacggacggcatatccagcaatatcacatggaagactcagagatcaaaggcgaggttctgtatcttggctactaccagtccgcttttgattgggatgatgagactgccaaggcttcaaaacagcatagattaaagagatatcattcccaaacctacggtaatggtagtaagtgcgatctgaatggacgaccgcgcgaggccgaagtccgatttctgtgcgacgaaggtgccggtataagcggtgactatatagaccgagtggacgaacccctgtcatgtagttacgtgctcacaattcgtacccccaggctttgtccacatcctctgttaaggccccctccgtccgccgcaccacaggccatcttgtgccacccgagccttcagcctgaggagtacatggcgtacgtgcaacggcaggccgtagactctaaacagtacggtgataaaatcatcgaggaactgcaggaccttggacctcaggtctggtccgaaacgaaatctggcgtggccccccagaaaatggccggcgctagccctactaaggatgatagcaaagactcggatttctggaagatgttaaacgaaccggaagaccaggcccccggcggcgaggaagtccccgccgaggagcaagatccctcaccagaagcagccgactccgcctccggtgcacccaatgattttcaaaataacgtgcaggtcaaggtgatccgttctccagctgatcttataagattcatcgaagagctgaagggtgggaccaagaagggcaagccgaacatcggccaggagcaaccagtggatgatgcagccgaggtaccgcagagagaaccagaaaaagaacggggcgatcctgagagacaaagagagatggaagaagaggaagacgaggatgaagatgaggatgaagatgaggacgagcgtcagctgctgggcgagttcgagaaagagcttgaggggattctcctgccttccgatagagaccgtctgcgatccgaagttaaggctggaatggaaagagagctcgagaacatcatacaggaaacagaaaaggagttggatcctgacggtctgaagaaggaaagcgaaagggaccgtgctatgctggcgctgaccagtacactgaataaactaatcaagcgcctcgaagagaaacagagccctgagctcgtgaagaagcacaagaaaaaacgggtcgtgccaaagaagccaccaccgagccctcaacctaccggtaagatcgaaatcaaaatagtcaggccatgggcagaggggactgaagagggcgcgaggtggctgacagacgaggatacccgtaacctgaaagaaattttcttcaatatcttagtcccaggagcggaagaagctcagaaggagcggcagcgccagaaggaacttgaatctaattaccggcgcgtctggggttcacccgggggcgaggggaccggagaccttgatgaattcgatttctag

SEQ ID NO: 93746 - DNA, 2505 bp, Artificial Sequence
  derived and/or modified sequence
aagaaggggaacgaaagatggcggcggaaacgctgctgtccagtttgttaggactgctgcttctgggactcctgttacccgcaagtctgaccggcggtgtcgggagcctgaacctggaggagctgagtgagatgcgttatgggatcgagatcctgccgttgcctgtcatgggagggcagagccaatcttcggacgtggtgattgtctcctctaagtacaaacagcgctatgagtgtcgcctgccagctggagctattcacttccagcgtgaaagggaggaggaaacacctgcttaccaagggcctgggatccctgagttgttgagcccaatgagagatgctccctgcttgctgaagacaaaggactggtggacatatgaattctgttatggacgccacatccagcaataccacatggaagattcagagatcaaaggtgaagtcctctatctcggctactaccaatcagccttcgactgggatgatgaaacagccaaggcctccaagcagcatcgtcttaaacgctaccacagccagacctatggcaatgggtccaagtgcgaccttaatgggaggccccgggaggccgaggttcggttcctctgtgacgagggtgcaggtatctctggggactacatcgatcgcgtggacgagcccttgtcctgctcttatgtgctgaccattcgcactcctcggctctgcccccaccctctcctccggcccccacccagtgctgcaccgcaggccatcctctgtcacccttccctacagcctgaggagtacatggcctacgttcagaggcaagccgtagactcaaagcagtatggagataaaatcatagaggagctgcaagatctaggcccccaagtgtggagtgagaccaagtctggggtggcaccccaaaagatggcaggtgcgagcccgaccaaggatgacagtaaggactcagatttctggaagatgcttaatgagccagaggaccaggccccaggaggggaggaggtgccggctgaggagcaggacccaagccctgaggcagcagattcagcttctggtgctcccaatgattttcagaacaacgtgcaggtcaaagtcattcgaagccctgcggatttgattcgattcatagaggagctgaaaggtggaacaaaaaaggggaagccaaatataggccaagagcagcctgtggatgatgctgcagaagtccctcagagggaaccagagaaggaaaggggtgatccagaacggcagagagagatggaagaagaggaggatgaggatgaggatgaggatgaagatgaggatgaacggcagttactgggagaatttgagaaggaactggaagggatcctgcttccgtcagaccgagaccggctccgttcggaggtgaaggctggcatggagcgggaactggaaaacatcatccaggagacagagaaagagctggacccagatgggctgaagaaggagtcagagcgggatcgggcaatgctggctctcacatccactctcaacaaactcatcaaaagactggaggaaaaacagagtccagagctggtgaagaagcacaagaaaaagagggttgtccccaaaaagcctcccccatcaccccaacctacagggaaaattgagatcaaaattgtccgcccatgggctgaagggactgaagagggtgcacgttggctgactgatgaggacacgagaaacctcaaggagatcttcttcaatatcttggtgccgggagctgaagaggcccagaaggaacgccagcggcagaaagagctggagagcaattaccgccgggtgtggggctctccaggtggggagggcacaggggacctggacgaatttgacttctgagaccaacactacacttgacccttcacggaatccagactcttcctggactggcttgcctcctccccacctccccaccctggaacccctgagggccaaacagcagagtggagctgagctgtggacctctcgggcaactctgtgggtgtgggggccctgggtgaatgctgctgcccctgctggcagccaccttgagacctcaccgggcctgtgatatttgctctcctgaactctcactcaatcctcttcctctcctctgtggcttttcctgttattgtcccctaatgataggatattccctgctgcctacctggagattcagtaggatcttttgagtggaggtgggtagagagagcaaggagggcaggacacttagcaggcactgagcaagcaggcccccacctgcccttagtgatgtttggagtcgttttaccctcttctattgaattgccttgggatttccttctccctttccctgcccaccctgtcccctacaatttgtgcttctgagttgaggagccttcacctctgttgctgaggaaatggtagaatgctgcctatcacctccagcacaatcccagtgaaaaaggtgtgaagcacccaccatgttcttgaacaatcaggtttctaaataaacaactggaccatc

SEQ ID NO: 93747 - DNA, 1842 bp, Artificial Sequence
  derived and/or modified sequence
atggctgccgagacccttctcagcagtctgctgggtttgctgctgctaggcctgttactgccagcatccctaaccggaggagtgggcagtctgaacctggaagaactgagtgaaatgaggtacgggattgagatcctacccttgccggttatggggggacagtcacagagctcagatgtcgtcatcgtgtctagcaagtacaaacagcgttatgagtgccgtctgcccgctggcgcaatacactttcaaagagagcgggaggaagagacacccgcataccaggggccaggcatcccggaactcctctctccgatgcgcgacgccccatgtctcctgaagacaaaagattggtggacttatgagttctgttacggccgtcacatccaacagtaccacatggaggacagcgaaattaagggcgaagttctctacttggggtattaccagtccgccttcgattgggacgatgaaacagctaaggcatcgaagcagcacagacttaaaaggtaccattcccagacctacggaaatggtagcaagtgcgacctgaatggcaggcccagagaagcagaggttcgcttcctctgtgatgagggggctggtatctctggagattatatcgatcgggttgacgagcccctgtcctgcagttatgtgctgaccatccgcaccccaaggctctgcccgcacccgttactgagacctccaccatccgccgcaccccaagccatcttgtgccaccctagcctccagccggaggagtatatggcatatgtccagcggcaggccgtcgactccaaacagtatggtgacaagattatcgaggagctccaggacttaggaccccaggtgtggagtgaaacgaaaagcggagtggctccccagaaaatggccggagcgagccctaccaaagatgattcaaaggacagtgacttttggaaaatgttaaacgaacctgaggaccaagccccaggcggtgaggaagtgcccgctgaggagcaggacccttcgccggaggccgcagactccgcatctggagcccctaacgacttccaaaacaacgtgcaggttaaagttatccgatcccctgccgacttgatccggtttatcgaagaactcaaaggcggtacgaagaagggcaagcctaatataggccaggagcaaccagttgatgacgccgctgaggtgccccaaagagaacccgagaaggaaaggggtgaccccgaacgccagagggagatggaggaggaagaggacgaggatgaggatgaggatgaggacgaggacgagcggcagctgctcggcgaatttgaaaaagaattggaagggattctgcttccatctgatagagatagacttcgcagcgaagtgaaggctggcatggagagagagttggagaatattattcaggagacagagaaggagctggatcctgatggtcttaagaaggaatctgagcgagaccgggcaatgctggcgctgacatcaaccctgaataagctgataaagaggctggaagaaaagcagtctcccgaactggtgaaaaagcacaagaagaagcgggtggtccccaagaaaccccctccctctcctcagccgaccggcaagatcgaaatcaagattgtccgcccatgggccgagggcaccgaggagggggcacgctggctgaccgacgaagataccagaaatttgaaagagatcttcttcaacattctggtacctggcgctgaagaggcacagaaagaacgacagcggcagaaggagctcgagagcaactaccgcagagtgtggggatcccccggaggagaagggactggggacttggacgagtttgatttctag

SEQ ID NO: 93748 - DNA, 1842 bp, Artificial Sequence
  derived and/or modified sequence
atggccgccgagaccctgctgagcagcctgctgggcctgctgctgctgggcctgctgctgcccgccagcctgaccggcggcgtgggcagcctgaacctggaggagctgagcgagatgagatacggcatcgagatcctgcccctgcccgtgatgggcggccagagccagagcagcgacgtggtgatcgtgagcagcaagtacaagcagagatacgagtgcagactgcccgccggcgccatccacttccagagagagagagaggaggagacccccgcctaccagggccccggcatccccgagctgctgagccccatgagagacgccccctgcctgctgaagaccaaggactggtggacctacgagttctgctacggcagacacatccagcagtaccacatggaggacagcgagatcaagggcgaggtgctgtacctgggctactaccagagcgccttcgactgggacgacgagaccgccaaggccagcaagcagcacagactgaagagataccacagccagacctacggcaacggcagcaagtgcgacctgaacggcagacccagagaggccgaggtgagattcctgtgcgacgagggcgccggcatcagcggcgactacatcgacagagtggacgagcccctgagctgcagctacgtgctgaccatcagaacccccagactgtgcccccaccccctgctgagacccccccccagcgccgccccccaggccatcctgtgccaccccagcctgcagcccgaggagtacatggcctacgtgcagagacaggccgtggacagcaagcagtacggcgacaagatcatcgaggagctgcaggacctgggcccccaggtgtggagcgagaccaagagcggcgtggccccccagaagatggccggcgccagccccaccaaggacgacagcaaggacagcgacttctggaagatgctgaacgagcccgaggaccaggcccccggcggcgaggaggtgcccgccgaggagcaggaccccagccccgaggccgccgacagcgccagcggcgcccccaacgacttccagaacaacgtgcaggtgaaggtgatcagaagccccgccgacctgatcagattcatcgaggagctgaagggcggcaccaagaagggcaagcccaacatcggccaggagcagcccgtggacgacgccgccgaggtgccccagagagagcccgagaaggagagaggcgaccccgagagacagagagagatggaggaggaggaggacgaggacgaggacgaggacgaggacgaggacgagagacagctgctgggcgagttcgagaaggagctggagggcatcctgctgcccagcgacagagacagactgagaagcgaggtgaaggccggcatggagagagagctggagaacatcatccaggagaccgagaaggagctggaccccgacggcctgaagaaggagagcgagagagacagagccatgctggccctgaccagcaccctgaacaagctgatcaagagactggaggagaagcagagccccgagctggtgaagaagcacaagaagaagagagtggtgcccaagaagcccccccccagcccccagcccaccggcaagatcgagatcaagatcgtgagaccctgggccgagggcaccgaggagggcgccagatggctgaccgacgaggacaccagaaacctgaaggagatcttcttcaacatcctggtgcccggcgccgaggaggcccagaaggagagacagagacagaaggagctggagagcaactacagaagagtgtggggcagccccggcggcgagggcaccggcgacctggacgagttcgacttctag

SEQ ID NO: 93749 - protein, 580 aa, Artificial Sequence
  derived and/or modified sequence
MAAETLLSSLLGLLLLGLLLPASLTGGVGSLNLEELSEMRYGIEILPLPVMGGQSQSSDVVIVSSKYKQRYECRLPAGAIHFQREREEETPAYQGPGIPELLSPMRDAPCLLKTKDWWTYEFCYGRHIQQYHMEDSEIKGEVLYLGYYQSAFDWDDETAKFLCDEGAGISGDYIDRVDEPLSCSYVLTIRTPRLCPHPLLRPPPSAAPQAILCHPSLQPEEYMAYVQRQAVDSKQYGDKIIEELQDLGPQVWSETKSGVAPQKMAGASPTKDDSKDSDFWKMLNEPEDQAPGGEEVPAEEQDPSPEAADSASGAPNDFQNNVQVKVIRSPADLIRFIEELKGGTKKGKPNIGQEQPVDDAAEVPQREPEKERGDPERQREMEEEEDEDEDEDEDEDERQLLGEFEKELEGILLPSDRDRLRSEVKAGMERELENIIQETEKELDPDGLKKESERDRAMLALTSTLNKLIKRLEEKQSPELVKKHKKKRVVPKKPPPSPQPTGKIEIKIVRPWAEGTEEGARWLTDEDTRNLKEIFFNILVPGAEEAQKERQRQKELESNYRRVWGSPGGEGTGDLDEFDF

SEQ ID NO: 93750 - DNA, 1743 bp, Artificial Sequence
  derived and/or modified sequence
atggctgcagagactctcttgtctagcctcttaggtctgttactgctagggctcttactgccagctagcctgacaggcggtgtgggctctcttaacctagaggagctgagcgagatgcgatacggtattgagattctaccgctgcctgttatgggcggccaaagccagtcgagcgacgtggtaatagtaagtagcaagtacaagcaacgctacgagtgccggttgcccgcaggggccatccactttcagcgtgagcgagaggaggagacgcctgcctatcagggccctgggattccggaattattgagcccaatgagggacgccccttgcctcctgaagaccaaggactggtggacttatgagttctgctatggcaggcacatccagcaataccatatggaggattctgaaatcaagggggaggttctatatttgggttattaccagtctgctttcgactgggacgatgagactgccaaattcctttgtgatgaaggagccgggattagcggcgattacatagacagagtcgatgagcctctgtcgtgttcttacgtgctaacaatcagaactcccaggctctgcccgcaccctctccttaggcctcccccttctgctgccccacaagctattctgtgccacccctctttacagcctgaggagtacatggcctacgtgcaacggcaggccgtcgactcaaagcagtacggagataagattatcgaagaactgcaggatctcggtccccaggtgtggtcagagacaaagtccggcgtagcgccgcagaaaatggccggggctagcccgaccaaggatgattctaaggacagtgatttctggaaaatgttaaatgagccagaggaccaagcccccggaggagaagaagtgccagccgaggagcaggatccctcccctgaagccgcggactcagcctctggcgcgccaaacgattttcagaataatgtgcaagtaaaggtgattcgctcacctgctgacctcatccgttttatcgaggaattgaagggagggaccaagaaaggaaaacctaatattggccaggagcagcctgtggacgacgcggcagaagttccccagcgcgagcccgagaaggagcggggtgaccccgagaggcagcgcgaaatggaagaagaagaggacgaggatgaagacgaagacgaggatgaggacgagcgacagctcctgggggaatttgagaaggagctagaaggaatactgttgccttctgacagggatagattaagatccgaggtcaaggctgggatggagcgcgagttggaaaacatcatacaggagaccgagaaagagctcgaccccgacggactcaagaaggagagtgaaagggatcgggctatgttagctctgactagcacgttgaacaagctgatcaagagactggaggaaaagcaatcccctgagttagttaagaagcataagaagaaaagagtggtgcccaagaagcccccaccttccccccagcctactggcaaaatcgaaatcaaaatagtcaggccctgggctgaagggacagaggagggagcgcggtggctgacggacgaggacacccgcaatctgaaagaaattttctttaatatcctggttcccggcgccgaagaagcacaaaaagagcgccagaggcagaaagaactcgagagcaactaccgacgcgtttggggcagtcctggcggtgagggaacgggcgacctggacgaatttgacttttag

SEQ ID NO: 93751 - DNA, 1743 bp, Artificial Sequence
  derived and/or modified sequence
atggctgctgagaccctgctgagcagcctgctgggcctgctgctgctgggcctgctgctgcctgccagcctgactggaggagtgggcagcctgaacctggaggagctgtctgagatgagatatggaattgagatcctgcccctgcctgtgatgggcggccagagccagagcagtgatgtggtgattgtgagcagcaagtacaagcagagatatgagtgccgcctgcctgctggggccatccacttccagcgggagcgggaggaggagaccccagcctaccagggccctggcatccctgagctgctgagccccatgagagatgccccctgcctgctgaagaccaaggactggtggacctatgagttctgctacggccgccacatccagcagtaccacatggaggacagcgagatcaagggggaggtgctgtacctgggctactaccagagcgcctttgactgggatgatgaaacagccaagttcctgtgtgatgagggcgccggcatcagcggggactacatcgacagagtggatgagcccctgagctgcagctatgtgctgaccatccgcaccccccggctgtgcccccaccccctgctgcggcccccaccttctgctgccccccaggccatcctgtgccaccccagcctgcagcctgaggagtacatggcctacgtgcagaggcaggccgtggacagcaagcagtacggggacaagatcatcgaggagctgcaggacctgggcccccaggtgtggagcgagaccaagtctggagtggccccccagaagatggccggggccagccccaccaaggatgacagcaaggacagcgacttctggaagatgctgaatgaacctgaggaccaggcccctggaggagaggaggtgcctgctgaggagcaggaccccagccctgaggccgctgacagcgccagcggggccccaaatgacttccagaacaacgtgcaggtgaaggtgatccgcagccctgctgacctgatccgcttcatcgaggagctgaagggcggcaccaagaagggcaagcccaacatcggccaggagcagcctgtggatgatgctgctgaggtgccccagcgggagcctgagaaggagcggggggaccctgagcggcagcgggagatggaggaggaggaggatgaagatgaagatgaagatgaagatgaagatgagcggcagctgctgggggagtttgagaaggagctggagggcatcctgctgcccagcgaccgggaccggctgcggtctgaggtgaaggccggcatggagcgggagctggagaacatcatccaggagacagagaaggagctggaccctgatggcctgaagaaggagagcgagcgggaccgggccatgctggccctgaccagcaccctgaacaagctgatcaagaggctggaggagaagcagagccctgagctggtgaagaagcacaagaagaagagggtggtgcccaagaagcccccacccagcccccagcccaccgggaagattgagatcaagatcgtgcggccctgggccgagggcacagaggagggcgcccgctggctgacagatgaggacaccaggaacctgaaggagatcttcttcaacatcctggtgcctggagctgaggaggcccagaaggagcggcagaggcagaaggagctggagagcaactacagaagagtgtggggcagccctggaggagagggcaccggggacctggatgaatttgacttctag

SEQ ID NO: 93752 - DNA, 1743 bp, Artificial Sequence
  derived and/or modified sequence
atggccgccgagaccctgctgagcagcctgctgggcctgctgctgcttgggttgcttctcccggcttctctaaccggaggtgtgggcagcctcaacttggaggaattgagcgagatgagatatggtattgagatcctgccactgcctgtcatgggcggccagagtcagagctctgacgtggtgattgtctcatctaaatacaaacagaggtacgagtgccggctacccgctggggccatacactttcaacgtgaacgagaagaggaaactccagcttatcaaggacccggcatcccggaacttttgagtcctatgagagatgccccgtgcctcctgaagaccaaggattggtggacttatgagttctgctatggcaggcacattcagcagtaccatatggaggacagcgagatcaagggcgaggtcctgtacctcggctattaccagtcagcattcgattgggatgacgagactgcaaaatttctctgtgacgagggtgctggaataagcggcgattatatcgaccgtgtggatgagcccctctcttgctcctatgtactgaccatccgaactcccagactctgtccacaccccctgctgcgaccccctccatctgctgccccacaggcgatcttatgccacccgtctttgcaaccagaagagtacatggcctatgtgcagcggcaagccgtggatagcaagcagtatggcgataagattatcgaggagctgcaggatcttggaccacaggtgtggagtgagactaagagcggcgttgcccctcaaaaaatggctggcgcctcccccactaaagacgatagcaaggacagcgacttctggaagatgctgaatgaacccgaggaccaggccccgggcggggaggaggtgcccgctgaagagcaagatccctcaccagaagcggcggactctgcctccggggccccaaatgacttccaaaacaatgtacaagttaaggttatcaggagcccagcagacctgattagattcatcgaagagctgaagggtgggacaaagaagggcaagcctaatattggacaggagcaacctgttgatgacgcagcagaagtgccacaacgggaaccggagaaagagagaggcgatcctgaaagacagcgcgagatggaagaagaggaggacgaggacgaggacgaggatgaggacgaagacgagcgtcagttgttgggggagtttgagaaagagctggaaggaatcctgctgccgagtgatcgcgataggctgcggagcgaagtcaaagcaggcatggaaagagagcttgaaaacatcatccaagagacagaaaaagagctggatcccgacggcctcaagaaggaaagtgaacgcgatcgggcaatgcttgcactgactagcactcttaacaagctcatcaagaggctagaggagaagcagtcacccgaattggtaaaaaaacacaaaaagaagagggtggtcccaaaaaagccacccccttcaccacagccgaccgggaaaatagaaataaaaatagtgagaccatgggcagaaggcacagaagagggagcaaggtggctgacagacgaagacacacgcaacttgaaagagatattcttcaatatccttgtgcccggggctgaagaagcccagaaggagaggcagagacagaaggagttagaatccaactatcggcgtgtgtggggatcacccggaggcgaaggcactggtgatctagacgagtttgacttttag

SEQ ID NO: 93753 - DNA, 2246 bp, Artificial Sequence
  derived and/or modified sequence
aagaaggggaacgaaagatggcggcggaaacgctgctgtccagtttgttaggactgctgcttctgggactcctgttacccgcaagtctgaccggcggtgtcgggagcctgaacctggaggagctgagtgagatgcgttatgggatcgagatcctgccgttgcctgtcatgggagggcagagccaatcttcggacgtggtgattgtctcctctaagtacaaacagcgctatgagtgtcgcctgccagctggagctattcacttccagcgtgaaagggaggaggaaacacctgcttaccaagggcctgggatccctgagttgttgagcccaatgagagatgctccctgcttgctgaagacaaaggactggtggacatatgaattctgttatggacgccacatccagcaataccacatggaagattcagagatcaaaggtgaagtcctctatctcggctactaccaatcagccttcgactgggatgatgaaacagccaagttcctctgtgacgagggtgcaggtatctctggggactacatcgatcgcgtggacgagcccttgtcctgctcttatgtgctgaccattcgcactcctcggctctgcccccaccctctcctccggcccccacccagtgctgcaccgcaggccatcctctgtcacccttccctacagcctgaggagtacatggcctacgttcagaggcaagccgtagactcaaagcagtatggagataaaatcatagaggagctgcaagatctaggcccccaagtgtggagtgagaccaagtctggggtggcaccccaaaagatggcaggtgcgagcccgaccaaggatgacagtaaggactcagatttctggaagatgcttaatgagccagaggaccaggccccaggaggggaggaggtgccggctgaggagcaggacccaagccctgaggcagcagattcagcttctggtgctcccaatgattttcagaacaacgtgcaggtcaaagtcattcgaagccctgcggatttgattcgattcatagaggagctgaaaggtggaacaaaaaaggggaagccaaatataggccaagagcagcctgtggatgatgctgcagaagtccctcagagggaaccagagaaggaaaggggtgatccagaacggcagagagagatggaagaagaggaggatgaggatgaggatgaggatgaagatgaggatgaacggcagttactgggagaatttgagaaggaactggaagggatcctgcttccgtcagaccgagaccggctccgttcggaggtgaaggctggcatggagcgggaactggaaaacatcatccaggagacagagaaagagctggacccagatgggctgaagaaggagtcagagcgggatcgggcaatgctggctctcacatccactctcaacaaactcatcaaaagactggaggaaaaacagagtccagagctggtgaagaagcacaagaaaaagagggttgtccccaaaaagcctcccccatcaccccaacctacagggaaaattgagatcaaaattgtccgcccatgggctgaagggactgaagagggtgcacgttggctgactgatgaggacacgagaaacctcaaggagatcttcttcaatatcttggtgccgggagctgaagaggcccagaaggaacgccagcggcagaaagagctggagagcaattaccgccgggtgtggggctctccaggtggggagggcacaggggacctggacgaatttgacttctgagaccaacactacacttgacccttcacggaatccagactcttcctggactggcttgcctcctccccacctccccaccctggaacccctgagggccaaacagcagagtggagctgagctgtggacctctcgggcaactctgtgggtgtgggggccctgggtgaatgctgctgcccctgctggcagccaccttgagacctcaccgggcctgtgatatttgctctcctgaactctcactcaatcctcttcctctcctctgtggcttttcctgttattgtcccctaatgataggatattccctgctgcctacctggagattcagtaggatcttttgagtggaggtgggtagagagagcaaggagggcaggacacttagcaggcactgagcaagcaggcccccacctgcccttagtgatgtttggagtcgttttaccctcttctattgaattgccttgggatttccttctccctttccctgcccaccctgtc

SEQ ID NO: 93754 - DNA, 1743 bp, Artificial Sequence
  derived and/or modified sequence
atggctgctgagactttgctgtcttccctgctgggtttattgctgctggggctgcttttacctgcgtccttgaccggaggagtgggttcgttgaatctggaggagctgagtgagatgagatatggcatagaaatcttgccactgcccgttatggggggtcagtctcagtccagcgacgtcgtgatagtttcttccaaatacaagcaacgttacgagtgcagactgccagctggggctatccactttcagagggagcgtgaggaagaaacccccgcttatcaggggccaggcatcccagagcttctgagtcccatgagggatgccccatgcctgctgaagaccaaagactggtggacatatgagttctgctatgggcgtcacattcagcagtaccatatggaggatagtgagatcaaaggagaagtgctgtatctgggttactatcagagcgcctttgattgggacgacgagactgccaagttcctgtgcgatgagggtgcaggcatctcaggtgattatatcgacagagtcgatgaacctctgtcctgcagctatgtactgacaatcaggacccccagattatgtccccacccactgctaagacccccaccttcagccgcacctcaagcaatcctgtgccacccctcccttcagccagaggagtacatggcatacgtgcagagacaggctgttgatagtaagcagtacggcgacaaaataatcgaagagctccaggatctcggacctcaggtctggagtgagactaaatccggtgtggcgccacagaaaatggctggcgcatccccaacgaaagacgattcgaaggattccgacttttggaagatgttgaatgagcccgaggatcaggcacccggtggggaagaagtacccgcagaggaacaggatcccagtcctgaggccgctgattctgccagtggagcaccgaacgactttcaaaataacgttcaggtgaaagtgatacggagcccagccgatttgatccgcttcatagaggagctaaaaggagggaccaaaaaaggtaaacctaacattggacaggagcagcccgtggacgatgcggctgaggtgccacagagggagcctgaaaaggaaagaggagaccctgaacggcaacgcgaaatggaggaagaggaggacgaagatgaggatgaggatgaggacgaggatgaacgacagctgttgggggagttcgagaaagagctggaggggatcttacttccctcggacagggatcgcctgcgctcagaggttaaggccggtatggagcgcgagttggagaacattatacaggagaccgaaaaggagctggatcccgacggtctgaagaaggagtctgaacgagacagagccatgctggccctgacttccactttaaataagctgataaagaggttggaggaaaagcaatctccagaactggtgaaaaagcacaagaagaagcgcgtcgtgcccaaaaagccaccaccttccccccagccaaccggtaagatcgagattaaaattgtgcgtccgtgggctgaaggaacggaagagggcgcacgctggcttacagacgaggatacccggaatttgaaggaaatcttctttaatatcttggtgcctggggcagaagaagcccagaaggagaggcagcggcagaaagagttggaaagtaattaccgcagagtgtggggcagtcctggcggagaaggaactggcgacctcgatgagttcgacttctag

SEQ ID NO: 93755 - DNA, 1743 bp, Artificial Sequence
  derived and/or modified sequence
atggccgccgagaccctgctgagcagcctgctgggcctgctgctgctgggcctgctgctgcccgccagcctgaccggcggcgtgggcagcctgaacctggaggagctgagcgagatgagatacggcatcgagatcctgcccctgcccgtgatgggcggccagagccagagcagcgacgtggtgatcgtgagcagcaagtacaagcagagatacgagtgcagactgcccgccggcgccatccacttccagagagagagagaggaggagacccccgcctaccagggccccggcatccccgagctgctgagccccatgagagacgccccctgcctgctgaagaccaaggactggtggacctacgagttctgctacggcagacacatccagcagtaccacatggaggacagcgagatcaagggcgaggtgctgtacctgggctactaccagagcgccttcgactgggacgacgagaccgccaagttcctgtgcgacgagggcgccggcatcagcggcgactacatcgacagagtggacgagcccctgagctgcagctacgtgctgaccatcagaacccccagactgtgcccccaccccctgctgagacccccccccagcgccgccccccaggccatcctgtgccaccccagcctgcagcccgaggagtacatggcctacgtgcagagacaggccgtggacagcaagcagtacggcgacaagatcatcgaggagctgcaggacctgggcccccaggtgtggagcgagaccaagagcggcgtggccccccagaagatggccggcgccagccccaccaaggacgacagcaaggacagcgacttctggaagatgctgaacgagcccgaggaccaggcccccggcggcgaggaggtgcccgccgaggagcaggaccccagccccgaggccgccgacagcgccagcggcgcccccaacgacttccagaacaacgtgcaggtgaaggtgatcagaagccccgccgacctgatcagattcatcgaggagctgaagggcggcaccaagaagggcaagcccaacatcggccaggagcagcccgtggacgacgccgccgaggtgccccagagagagcccgagaaggagagaggcgaccccgagagacagagagagatggaggaggaggaggacgaggacgaggacgaggacgaggacgaggacgagagacagctgctgggcgagttcgagaaggagctggagggcatcctgctgcccagcgacagagacagactgagaagcgaggtgaaggccggcatggagagagagctggagaacatcatccaggagaccgagaaggagctggaccccgacggcctgaagaaggagagcgagagagacagagccatgctggccctgaccagcaccctgaacaagctgatcaagagactggaggagaagcagagccccgagctggtgaagaagcacaagaagaagagagtggtgcccaagaagcccccccccagcccccagcccaccggcaagatcgagatcaagatcgtgagaccctgggccgagggcaccgaggagggcgccagatggctgaccgacgaggacaccagaaacctgaaggagatcttcttcaacatcctggtgcccggcgccgaggaggcccagaaggagagacagagacagaaggagctggagagcaactacagaagagtgtggggcagccccggcggcgagggcaccggcgacctggacgagttcgacttctag

SEQ ID NO: 93756 - protein, 560 aa, Artificial Sequence
  derived and/or modified sequence
MAAETLLSSLLGLLLLGLLLPASLTGGVGSLNLEELSEMRYGIEILPLPVMGGQSQSSDVVIVSSKYKQRYECRLPAGAIHFQREREEETPAYQGPGIPELLSPMRDAPCLLKTKDWWTYEFCYGRHIQQYHMEDSEIKGEFLCDEGAGISGDYIDRVDEPLSCSYVLTIRTPRLCPHPLLRPPPSAAPQAILCHPSLQPEEYMAYVQRQADSKQYGDKIIEELQDLGPQVWSETKSGVAPQKMAGASPTKDDSKDSDFWKMLNEPEDQAPGGEEVPAEEQDPSPEAADSASGAPNDFQNNVQVKVIRSPADLIRFIEELKGGTKKGKPNIGQEQPVDDAAEVPQREPEKERGDPERQREMEEEEDEDEDEDEDEDERQLLGEFEKELEGILLPSDRDRLRSEVKAGMERELENIIQETEKELDPDGLKKESERDRAMLALTSTLNKLIKRLEEKQSPELVKKHKKKRVVPKKPPPSPQPTGKIEIKIVRPWAEGTEEGARWLTDEDTRNLKEIFFNILVPGAEEAQKERQRQKELESNYRRVWGSPGGEGTGDLDEFDF

SEQ ID NO: 93757 - DNA, 1683 bp, Artificial Sequence
  derived and/or modified sequence
atggctgcagaaacactgttatccagcctactcggcctgcttttgctggggctgctgctgccagcttctctgaccggaggagtaggctccttgaacctggaagaactctccgaaatgcgctacggtatcgagatcctgcctttacctgtcatgggcggccagtctcagtcgagcgatgtggttatagtcagcagtaagtataagcaaagatacgaatgccgtctcccagctggcgctattcacttccagagggagagggaggaagagacgcccgcttatcaggggcctgggatccccgaattgttatcgccaatgcgcgacgcaccttgcctcctgaagacaaaggactggtggacttacgagttctgttacggccgtcatatacagcaatatcacatggaagacagcgagattaagggagagtttctttgcgacgaaggcgcggggatctccggggactatattgatcgagtcgacgagccactgagttgcagctatgtgctgacgattcgcactcccagactgtgtccccaccccctgttgcggcccccaccttcggctgcaccacaagcaattctctgccatccctctcttcaacctgaggagtatatggcatacgtccagagacaggccgacagtaaacagtatggcgacaaaataatcgaagagctacaggacctcgggcctcaggtctggtctgagactaaaagcggcgtggctcctcagaaaatggctggcgcttcacccaccaaagacgattccaaagatagtgacttttggaagatgctaaacgagcccgaagaccaggctcctggaggcgaagaagtcccagcagaggaacaggacccatcgccagaggccgccgacagcgcatcaggggctccaaacgatttccagaacaatgtccaagttaaagtaatccgatctcccgccgacctcatcagatttatcgaagagctgaagggaggcactaagaagggaaaacctaacatcggtcaggaacaacctgtggacgatgccgcagaagtgcctcagcgtgaaccagagaaagaacggggcgatcctgagagacagagggaaatggaggaagaggaagatgaggatgaggatgaagacgaggacgaagacgagaggcagttgctgggcgagttcgagaaggagctcgagggcatcctgcttccatcagatcgtgatagactgcggtccgaggtgaaagcagggatggaacgcgagctcgagaacataattcaggagaccgaaaaagagctcgatcctgacggcctgaagaaggaaagcgaaagggacagagctatgttggcattaacctccaccctgaataagttgattaagaggctggaggaaaagcagagcccagagttagtgaagaagcataagaaaaagagggtcgtgcctaaaaagccccctccttcgcctcagccaactggcaaaatcgagattaaaattgtgaggccgtgggcagagggcaccgaggaaggcgcacggtggttgaccgacgaggacaccagaaatctgaaagaaattttcttcaacatcttggttccgggagcagaagaagcccagaaagaacggcaacggcagaaagaattggaaagcaattaccgccgcgtgtggggatcccccggcggcgagggcacaggagatcttgacgaatttgacttttag

SEQ ID NO: 93758 - DNA, 1683 bp, Artificial Sequence
  derived and/or modified sequence
atggctgctgagaccctgctgagcagcctgctgggcctgctgctgctgggcctgctgctgcctgccagcctgactggaggagtgggcagcctgaacctggaggagctgtctgagatgagatatggaattgagatcctgcccctgcctgtgatgggcggccagagccagagcagtgatgtggtgattgtgagcagcaagtacaagcagagatatgagtgccgcctgcctgctggggccatccacttccagcgggagcgggaggaggagaccccagcctaccagggccctggcatccctgagctgctgagccccatgagagatgccccctgcctgctgaagaccaaggactggtggacctatgagttctgctacggccgccacatccagcagtaccacatggaggacagcgagatcaagggggagttcctgtgtgatgaaggagctggcatcagcggggactacatcgacagagtggatgagcccctgagctgcagctatgtgctgaccatccgcaccccccggctgtgcccccaccccctgctgcggcccccacccagcgctgccccccaggccatcctgtgccaccccagcctgcagcctgaggagtacatggcctacgtgcagaggcaggccgacagcaagcagtacggggacaagatcatcgaggagctgcaggacctgggcccccaggtgtggagcgagaccaagtctggagtggccccccagaagatggccggggccagccccaccaaggatgacagcaaggacagcgacttctggaagatgctgaatgaacctgaggaccaggcccctggaggagaggaggtgcctgctgaggagcaggaccccagccctgaggccgctgacagcgccagcggggccccaaatgacttccagaacaacgtgcaggtgaaggtgatccgcagccctgctgacctgatccgcttcatcgaggagctgaagggcggcaccaagaagggcaagcccaacatcggccaggagcagcctgtggatgatgctgctgaggtgccccagcgggagcctgagaaggagcggggggaccctgagcggcagcgggagatggaggaggaggaggatgaagatgaagatgaagatgaagatgaagatgagcggcagctgctgggggagtttgagaaggagctggagggcatcctgctgcccagcgaccgggaccggctgcggtctgaggtgaaggccggcatggagcgggagctggagaacatcatccaggagacagagaaggagctggaccctgatggcctgaagaaggagagcgagcgggaccgggccatgctggccctgaccagcaccctgaacaagctgatcaagaggctggaggagaagcagagccctgagctggtgaagaagcacaagaagaagagggtggtgcccaagaagcccccacccagcccccagcccaccgggaagattgagatcaagatcgtgcggccctgggccgagggcacagaggagggcgcccgctggctgacagatgaggacaccaggaacctgaaggagatcttcttcaacatcctggtgcctggagctgaggaggcccagaaggagcggcagaggcagaaggagctggagagcaactacagaagagtgtggggcagccctggaggagagggcaccggggacctggatgaatttgacttctag

SEQ ID NO: 93759 - DNA, 1683 bp, Artificial Sequence
  derived and/or modified sequence
atggccgccgagaccctgctgagcagcctgctgggcctgctgctgttgggacttctactgccagcctccctcaccggtggagtcggtagcctgaacctggaggagctcagtgagatgcgctacgggatcgagatcctcccgctgcctgtcatgggcggccagagtcagtcctctgacgtggtgatagtaagcagtaagtacaaacagaggtacgaatgccgcctaccggctggcgctatacatttccagagggaaagggaagaggaaactcccgcttatcaaggccctggaattcctgaacttctgtctcctatgagagatgccccatgcttgttgaagactaaggattggtggacatatgaattctgttatggaaggcacattcagcagtatcatatggaagacagtgagattaagggagaattcctgtgtgacgagggggccgggatctccggcgattacatcgatagggtggatgagcccttgagttgctcttacgttctgacaatcaggacaccgaggctgtgtccccatcctctgctccgccctcccccaagcgcagcccctcaggccatactgtgccatccttctctgcaacccgaagaatacatggcttatgtccaacgacaagccgactcaaagcagtacggagacaagattatagaagaacttcaggacctcggccctcaagtatggtccgagacaaaaagcggtgtcgcgccacagaaaatggctggagccagtcccaccaaggatgatagcaaggacagtgacttttggaaaatgctcaatgaacccgaggaccaagccccggggggggaggaggtgccggctgaggagcaggacccatcacccgaggctgcggatagtgcttctggagctccgaacgattttcagaacaatgtgcaagtgaaggtgatacggagcccagccgatctaataagatttattgaggagctgaagggtggtacaaagaagggaaagccaaacattgggcaggaacaaccggtcgacgacgccgccgaagtgcctcagcgtgagcctgaaaaggaaaggggcgacccagagaggcagagggaaatggaagaggaggaggatgaagacgaggacgaggacgaggacgaggatgagaggcagctgctgggcgagtttgaaaaagagctcgaaggcatcctgcttccctccgatcgggacagactacgatccgaagtcaaagcaggcatggagagagagcttgagaacattatccaagaaacagagaaagagctagaccctgacggtctgaagaaggagtcagagagagatcgcgctatgctggccctcacctccacactaaacaaacttatcaagaggctggaagagaaacagagcccagagctggtcaaaaagcacaagaaaaaaagagtggttcccaagaagccacctccctctccgcagccaaccggtaagatcgaaataaagatagtccgcccgtgggcagagggcactgaggaaggcgcccggtggctgaccgacgaagataccaggaatctgaaagagatattttttaatatacttgtgccaggcgctgaagaggctcagaaggagaggcagagacaaaaagagctggagtccaactaccggcgtgtatggggttcgccagggggtgagggaacaggcgacctcgacgagttcgatttctag

SEQ ID NO: 93760 - DNA, 2346 bp, Artificial Sequence
  derived and/or modified sequence
aagaaggggaacgaaagatggcggcggaaacgctgctgtccagtttgttaggactgctgcttctgggactcctgttacccgcaagtctgaccggcggtgtcgggagcctgaacctggaggagctgagtgagatgcgttatgggatcgagatcctgccgttgcctgtcatgggagggcagagccaatcttcggacgtggtgattgtctcctctaagtacaaacagcgctatgagtgtcgcctgccagctggagctattcacttccagcgtgaaagggaggaggaaacacctgcttaccaagggcctgggatccctgagttgttgagcccaatgagagatgctccctgcttgctgaagacaaaggactggtggacatatgaattctgttatggacgccacatccagcaataccacatggaagattcagagatcaaaggtgaattcctctgtgacgagggtgcaggtatctctggggactacatcgatcgcgtggacgagcccttgtcctgctcttatgtgctgaccattcgcactcctcggctctgcccccaccctctcctccggcccccacccagtgctgcaccgcaggccatcctctgtcacccttccctacagcctgaggagtacatggcctacgttcagaggcaagccgactcaaagcagtatggagataaaatcatagaggagctgcaagatctaggcccccaagtgtggagtgagaccaagtctggggtggcaccccaaaagatggcaggtgcgagcccgaccaaggatgacagtaaggactcagatttctggaagatgcttaatgagccagaggaccaggccccaggaggggaggaggtgccggctgaggagcaggacccaagccctgaggcagcagattcagcttctggtgctcccaatgattttcagaacaacgtgcaggtcaaagtcattcgaagccctgcggatttgattcgattcatagaggagctgaaaggtggaacaaaaaaggggaagccaaatataggccaagagcagcctgtggatgatgctgcagaagtccctcagagggaaccagagaaggaaaggggtgatccagaacggcagagagagatggaagaagaggaggatgaggatgaggatgaggatgaagatgaggatgaacggcagttactgggagaatttgagaaggaactggaagggatcctgcttccgtcagaccgagaccggctccgttcggaggtgaaggctggcatggagcgggaactggaaaacatcatccaggagacagagaaagagctggacccagatgggctgaagaaggagtcagagcgggatcgggcaatgctggctctcacatccactctcaacaaactcatcaaaagactggaggaaaaacagagtccagagctggtgaagaagcacaagaaaaagagggttgtccccaaaaagcctcccccatcaccccaacctacagggaaaattgagatcaaaattgtccgcccatgggctgaagggactgaagagggtgcacgttggctgactgatgaggacacgagaaacctcaaggagatcttcttcaatatcttggtgccgggagctgaagaggcccagaaggaacgccagcggcagaaagagctggagagcaattaccgccgggtgtggggctctccaggtggggagggcacaggggacctggacgaatttgacttctgagaccaacactacacttgacccttcacggaatccagactcttcctggactggcttgcctcctccccacctccccaccctggaacccctgagggccaaacagcagagtggagctgagctgtggacctctcgggcaactctgtgggtgtgggggccctgggtgaatgctgctgcccctgctggcagccaccttgagacctcaccgggcctgtgatatttgctctcctgaactctcactcaatcctcttcctctcctctgtggcttttcctgttattgtcccctaatgataggatattccctgctgcctacctggagattcagtaggatcttttgagtggaggtgggtagagagagcaaggagggcaggacacttagcaggcactgagcaagcaggcccccacctgcccttagtgatgtttggagtcgttttaccctcttctattgaattgccttgggatttccttctccctttccctgcccaccctgtcccctacaatttgtgcttctgagttgaggagccttcacctctgttgctgaggaaatggtagaatgctgcctatcacctccagcacaatcccagtgaaaaaggtgtgaagcacccaccatgttcttgaacaatcaggtttctaaataaacaactggaccatc

SEQ ID NO: 93761 - DNA, 1683 bp, Artificial Sequence
  derived and/or modified sequence
atggctgccgaaaccctgctgtcgtcactactcggcctgctcctgctcggactcctgctcccagcctctttgaccgggggagtagggagcctaaaccttgaagagttgagcgagatgagatacggcattgagattctccctctgccagtaatggggggacaatctcagtctagtgatgtggtcattgtttccagtaagtataaacagaggtacgagtgtcgcctgccagcgggagctatccactttcagcgcgagcgagaggaggaaacccccgcataccaagggcctggaatccctgaacttctgtctcccatgcgggacgccccttgtctgctgaagactaaggattggtggacctatgagttttgctacggacgtcacatccagcagtatcatatggaggactccgaaatcaaaggcgaatttctgtgtgacgaaggcgctggcatctctggagattacatcgacagggttgacgaacccttgtcttgctcttacgtgttaactatccggacccccaggttgtgtcctcacccgttgcttcgtccacctcccagtgccgctccccaagccattctttgtcacccctcactgcaacctgaggaatacatggcttatgtccagcgtcaggcggactctaaacagtatggcgacaagattatcgaagaactccaggacttaggcccacaggtgtggtcagagaccaaaagtggggttgccccacagaaaatggcaggggcttcgccaaccaaggatgattccaaggattcggacttttggaagatgcttaatgagcccgaagatcaggcacccggtggggaggaggtgcctgccgaagaacaggacccttctcccgaagctgccgactctgcctctggcgctcccaacgacttccagaacaacgtgcaggtaaaggttattcggtcaccagcagatcttatacgttttattgaggaattgaaggggggaactaagaagggtaagcccaacatcggccaagagcagcctgtggatgacgctgcggaggtgccccagagggagccagagaaggagaggggagatcctgaaaggcagcgtgagatggaggaggaggaggacgaggacgaggacgaggacgaagatgaagatgagaggcaactcctcggggagttcgagaaggagctcgaaggaattctcctcccatctgatagagatcgcctgagatctgaagtcaaggcgggaatggaacgggagctcgaaaatattatccaagaaacggagaaagaactggatcctgatgggctgaagaaggaatctgagcgggatagggccatgctggccctcacatcaaccctgaacaaactgatcaagcggttggaagaaaaacagtcccctgagttggtaaaaaaacacaagaagaagagggttgtgccgaagaagcctcccccatcccctcagccaactggaaagatagagatcaagattgttcggccttgggcagagggcaccgaggaaggcgctaggtggctcaccgacgaagataccaggaatcttaaggagatattctttaacatcctggtgccaggcgctgaggaggcccagaaagagaggcagagacaaaaagaactagaatccaactacaggcgggtgtggggctctccaggtggcgaagggacaggagatctcgacgagtttgacttctag

SEQ ID NO: 93762 - DNA, 1683 bp, Artificial Sequence
  derived and/or modified sequence
atggccgccgagaccctgctgagcagcctgctgggcctgctgctgctgggcctgctgctgcccgccagcctgaccggcggcgtgggcagcctgaacctggaggagctgagcgagatgagatacggcatcgagatcctgcccctgcccgtgatgggcggccagagccagagcagcgacgtggtgatcgtgagcagcaagtacaagcagagatacgagtgcagactgcccgccggcgccatccacttccagagagagagagaggaggagacccccgcctaccagggccccggcatccccgagctgctgagccccatgagagacgccccctgcctgctgaagaccaaggactggtggacctacgagttctgctacggcagacacatccagcagtaccacatggaggacagcgagatcaagggcgagttcctgtgcgacgagggcgccggcatcagcggcgactacatcgacagagtggacgagcccctgagctgcagctacgtgctgaccatcagaacccccagactgtgcccccaccccctgctgagacccccccccagcgccgccccccaggccatcctgtgccaccccagcctgcagcccgaggagtacatggcctacgtgcagagacaggccgacagcaagcagtacggcgacaagatcatcgaggagctgcaggacctgggcccccaggtgtggagcgagaccaagagcggcgtggccccccagaagatggccggcgccagccccaccaaggacgacagcaaggacagcgacttctggaagatgctgaacgagcccgaggaccaggcccccggcggcgaggaggtgcccgccgaggagcaggaccccagccccgaggccgccgacagcgccagcggcgcccccaacgacttccagaacaacgtgcaggtgaaggtgatcagaagccccgccgacctgatcagattcatcgaggagctgaagggcggcaccaagaagggcaagcccaacatcggccaggagcagcccgtggacgacgccgccgaggtgccccagagagagcccgagaaggagagaggcgaccccgagagacagagagagatggaggaggaggaggacgaggacgaggacgaggacgaggacgaggacgagagacagctgctgggcgagttcgagaaggagctggagggcatcctgctgcccagcgacagagacagactgagaagcgaggtgaaggccggcatggagagagagctggagaacatcatccaggagaccgagaaggagctggaccccgacggcctgaagaaggagagcgagagagacagagccatgctggccctgaccagcaccctgaacaagctgatcaagagactggaggagaagcagagccccgagctggtgaagaagcacaagaagaagagagtggtgcccaagaagcccccccccagcccccagcccaccggcaagatcgagatcaagatcgtgagaccctgggccgagggcaccgaggagggcgccagatggctgaccgacgaggacaccagaaacctgaaggagatcttcttcaacatcctggtgcccggcgccgaggaggcccagaaggagagacagagacagaaggagctggagagcaactacagaagagtgtggggcagccccggcggcgagggcaccggcgacctggacgagttcgacttctag

SEQ ID NO: 93763 - protein, 391 aa, Artificial Sequence
  derived and/or modified sequence
MQAFQKPLPKSSCLSYLHVILDAIRFCFSKIFNAQIATVESIMRDKMPKKGGRWWFSWRGRNTTIKEESKPEQCLAGKAHSTGEQPPQLSLATRVKHESSSSDEERAAAKPSNAGHLPLLPNVSYKKTLRLTSEQLKSLKLKNGPNDVVFSVTTQYQGTCRCEGTIYLWNWDDKVIISDIDGTITRSDTLGHILPTLGKDWTHQGIAKLYHKVSQNGYKFLYCSARAIGMADMTRGYLHWVNERGTVLPQGPLLLSPSSLFSALHREVIEKKPEKFKVQCLTDIKNLFFPNTEPFYAAFGNRPADVYSYKQVGVSLNRIFTVNPKGELVQEHAKTNISSYVRLCEVVDHVFPLLKRSHSSDFPCSDTFSNFTFWREPLPPFENQDIHSASA

SEQ ID NO: 93764 - protein, 896 aa, Artificial Sequence
  derived and/or modified sequence
MSRVQTMNYVGQLAGQVFVTVKELYKGLNPATLSGCIDIIVIRQPNGNLQCSPFHVRFGKMGVLRSREKVVDIEINGESVDLHMKLGDNGEAFFVQETDNDQEVIPMHLATSPILSEGASRMECQLKRGSVDRMRGLDPSTPAQVIAPSETPSSSSVVKKRRKRRRKSQLDSLKRDDNMNTSEDEDMFPIEMSSDEAMELLESSRTLPNDIPPFQDDIPEENLSLAVIYPQSASYPNSDREWSPTPSPSGSRPSTPKSDSELVSKSTERTGQKNPEMLWLWGELPQAAKSSSPHKMKESSPLSSRKICDKSHFQAIHSESSDTFSDQSPTLVGGALLDQNKPQTEMQFVNEEDLETLGAAAPLLPMIEELKPPSASVVQTANKTDSPSRKRDKRSRHLGADGVYLDDLTDMDPEVAALYFPKNGDPSGLAKHASDNGARSANQSPQSVGSSGVDSGVESTSDGLRDLPSIAISLCGGLSDHREITKDAFLEQAVSYQQFVDNPAIIDDPNLVVKIGSKYYNWTTAAPLLLAMQAFQKPLPKATVESIMRDKMPKKGGRWWFSWRGRNTTIKEESKPEQCLAGKAHSTGEQPPQLSLATRVKHESSSSDEERAAAKPSNAGHLPLLPNVSYKKTLRLTSEQLKSLKLKNGPNDVVFSVTTQYQGTCRCEGTIYLWNWDDKVIISDIDGTITRSDTLGHILPTLGKDWTHQGIAKLYHKVSQNGYKFLYCSARAIGMADMTRGYLHWVNERGTVLPQGPLLLSPSSLFSALHREVIEKKPEKFKVQCLTDIKNLFFPNTEPFYAAFGNRPADVYSYKQVGVSLNRIFTVNPKGELVQEHAKTNISSYVRLCEVVDHVFPLLKRSHSSDFPCSDTFSNFTFWREPLPPFENQDIHSASA

SEQ ID NO: 93765 - DNA, 2673 bp, Artificial Sequence
  derived and/or modified sequence
atgaactacgtgggacaactggcaggtcaggtttttgtgaccgtcaaggaactgtataagggattgaaccccgcgaccctctccgggtgtattgatatcatagtaattaggcagccgaacggtaacctgcagtgttcaccattccatgtgagattcggaaagatgggggtgctccgctcccgggaaaaggtggttgacattgagattaacggcgagagcgtggacctgcatatgaagttgggcgacaacggggaagcattcttcgtacaggaaaccgacaacgaccaggaggtgatccctatgcacctggcgacctccccaatcctgtcagaaggagctagccggatggagtgccagctaaaacggggaagtgtggatcggatgcggggcctcgatcctagtactccagctcaagtaatagccccgtctgaaaccccgtcctcatccagcgtcgtaaagaaaagacgaaagagaagaaggaagtctcaattggactctcttaaacgagacgacaacatgaacacctcagaggatgaggatatgtttccaatcgaaatgagcagcgacgaagcaatggaattgctggagagctcccgtaccctgccaaatgatatccccccctttcaggacgacatccctgaagagaacctgagcttggccgtgatctacccccaatcagccagctatcctaacagcgatcgagagtggtctccaactccaagcccaagtggttcacgcccatcaacgcccaagtccgattccgaactggtatcaaaaagcaccgagagaacaggccagaaaaatcccgagatgctgtggctctggggcgagttaccccaagcggccaaatctagtagtcctcataaaatgaaagagagctcaccactgtcctccaggaagatctgtgataaatcacacttccaagctattcactccgagagtagcgatacattctcagatcagtcaccaactttggtcgggggcgccttgttagaccagaataagccccagacagaaatgcagtttgttaatgaagaagacctggaaaccttgggcgccgctgccccattgctgccaatgattgaggagctgaaacccccttcggccagtgtggtgcagacagccaataagaccgatagtccctccagaaaaagggacaagaggtctcggcatttaggggctgatggtgtgtatttagacgaccttacagacatggaccctgaagtggctgcgctctatttcccgaagaatggcgacccttccggtctggccaaacacgcctctgataatggtgcccgtagcgccaatcagtctccccagtcggtcggctcttcaggggtggactctggcgtggagagcacttcggacgggcttagagatctgccctccatcgcaatctcattgtgcggagggcttagtgaccatcgcgaaataaccaaagacgccttcctggagcaggcagtgtcctatcagcaatttgtggataaccctgcaataattgacgacccaaaccttgtggtaaaaattgggtcaaagtactataactggactacagctgcccccctgcttctcgctatgcaggcattccaaaaaccattgcccaaagctaccgtggagagtattatgagagataaaatgcctaagaagggagggagatggtggttctcttggcgcggtagaaacaccacaatcaaggaagagtctaagcccgagcaatgtctggcaggtaaagcccatagcactggcgagcagccaccacaactgtctctagccactcgggtcaaacatgagtctagtagtagtgatgaggagagggctgcagccaagccaagtaacgccggccatctgcctctcctgcctaacgtatcctataaaaagacccttcgcctgacgagcgagcagctgaagtctctcaagttgaagaacggaccgaatgacgtggtctttagcgtgacaacccagtatcaaggaacatgccggtgtgagggcaccatctacctttggaactgggacgacaaggttattattagcgacatcgacggaactattacacgaagtgatactctcggccacattttgcctaccctggggaaagactggacacaccagggcatcgcaaagctttatcacaaagtgtcgcagaacggctataaattcctttattgttctgctagggcaattggaatggcagatatgacacggggatatctgcactgggtcaacgaaagaggtaccgtgctcccgcagggtcctctgctgttgtcaccaagttcattattttcagctttacaccgggaagtgatcgagaagaaacccgaaaaatttaaagttcagtgcctcacagatatcaagaacctgttcttccctaataccgaacccttttatgcagcatttgggaaccggcccgcagacgtttacagctacaaacaggtgggtgtgtcactcaacagaatttttacggtcaatcctaaaggcgagctggtgcaagaacacgccaagactaatatttcttcttacgtgagactctgcgaggtggtggaccatgtgtttcccctgctcaaaagatcccactcgagtgacttcccatgcagcgacacattcagcaatttcacattttggagagagcccctgccaccttttgagaatcaagacattcattccgcatccgcctag

SEQ ID NO: 93766 - DNA, 2691 bp, Artificial Sequence
  derived and/or modified sequence
atgtcgagagtccagacaatgaattacgtcgggcagctggctggtcaggtttttgtgacagttaaagagctgtacaagggcctgaatcctgctactctctccggatgcattgatatcatcgtgattaggcagccaaatggcaaccttcaatgttctccattccatgtccggttcgggaaaatgggtgttctgcggtcacgcgaaaaggttgtcgacatcgagattaatggagaaagcgtcgatctgcatatgaaattaggggacaacggagaagcgttctttgtgcaagagacagataatgaccaagaggttattcctatgcatctggcgacaagccccatcctgtcagagggggcatctaggatggagtgtcagttgaagcgcgggtcagtggaccggatgaggggtctggacccttctactcccgcacaggtgatcgcgcccagtgagactccttccagcagctccgtcgtgaaaaagcgaaggaaacggagaagaaaaagtcagctcgattccctgaagcgcgacgataacatgaataccagcgaggacgaggatatgtttcctattgagatgagttcagacgaggcaatggaactgctggaaagttcccgcacgcttcctaatgacattccacccttccaggatgacataccagaagagaacctgagtttggcagttatttaccctcagtccgcctcttacccaaattctgatcgggagtggtcccccacaccgtcccccagcggtagccgacccagcactcccaaaagcgactcagaactggtgagtaagtctaccgagcgcacaggccagaagaaccccgaaatgctgtggctgtggggggagttaccccaggctgccaagtccagtagcccacataagatgaaggaatcttcacctctctctagcagaaagatatgcgacaaatctcattttcaggcgatacattctgaatcctcagacacttttagtgaccagtctcccactctggtgggtggagcgttgctagatcagaataaaccccagactgaaatgcaattcgttaacgaggaagacctggagactttgggggcagctgccccccttttgcctatgatcgaagagctgaaacctccaagcgcgagtgtcgtgcagacggctaataaaacagactccccctctcgcaagagggataagagatccaggcatctgggggccgatggagtgtaccttgatgacctgactgatatggacccagaggtcgctgcactgtattttcccaaaaacggggatccctctggactggctaaacatgcttccgataacggcgccagatcggccaatcagagcccgcaatccgtaggcagctcaggcgtggactccggcgttgaatcaaccagtgacggactgcgggaccttccttctatagcaattagcctctgcgggggcttgtcggatcacagagaaatcactaaagatgcattcttagaacaagccgtttcctaccagcagttcgtggacaacccggcgattattgacgaccccaaccttgtggtcaagatcggctccaagtactacaactggacaaccgcagcccccctgctgctggcaatgcaggcctttcagaagcctttgcccaaggccaccgtggagtccatcatgagagataagatgcccaagaaggggggcagatggtggtttagctggcggggacgcaacaccacaataaaggaagagtctaaaccggagcagtgcctcgcaggcaaagcccacagcaccggggaacagccaccacagcttagccttgccaccagggtcaagcacgagagtagctcctccgacgaggaaagagcggcggcaaaaccatcaaatgcaggacacttaccattattgccaaacgtgtcctacaagaaaacactacgcctgacttctgagcagcttaaaagcctgaagttgaaaaacggacccaacgacgtggtctttagcgtcacaacgcagtaccaaggaacctgccgatgcgagggaacaatctatttgtggaattgggacgacaaagtgatcatttctgacatcgatggaacaattaccaggtctgacaccctgggccacatcctgcctacattagggaaagattggactcatcagggcattgctaagctttatcataaagtgtcacaaaacggatataagtttctatactgtagtgcacgagcaattggcatggccgacatgacccgcggatatttgcactgggttaacgagaggggcaccgttctcccccaaggcccgcttttactctctccttcatcgttgttttcagctttacatagggaagttatcgagaagaaacctgagaagtttaaagtccaatgccttaccgacatcaaaaacctcttctttcccaatacagaacccttctacgctgcattcggcaacaggcccgcagacgtgtacagctacaagcaggttggagtttctctaaacagaatctttaccgtaaatccaaagggtgagctcgtgcaggaacacgcaaaaaccaatattagctcttacgttcgcctgtgtgaggtggtggatcatgtgttccctcttctgaaacggtctcattccagtgatttcccttgttcagatactttttcaaactttactttctggagagagccactgcctccattcgaaaatcaggacatccacagtgcctccgcttag

SEQ ID NO: 93767 - DNA, 2673 bp, Artificial Sequence
  derived and/or modified sequence
atgaactacgtgggccagctggccggccaggtgtttgtgacagtgaaggagctgtacaagggcctgaacccagccaccctgagcggctgcatcgacatcatcgtcatccggcagcccaacggcaacctgcagtgcagccccttccacgtgcgctttgggaagatgggcgtgctgcggagccgggagaaggtggtggacatcgagatcaacggggagagcgtggacctgcacatgaagctgggggacaatggagaggccttctttgtgcaggagacagacaatgaccaggaggtgatccccatgcacctggccaccagccccatcctgtctgagggcgccagcaggatggagtgccagctgaagaggggctctgtggacaggatgaggggcctggaccccagcaccccagcccaggtgattgcccccagcgagacccccagcagcagctctgtggtgaagaagaggaggaagagaagaaggaagagccagctggacagcctgaagagagatgacaacatgaacaccagtgaagatgaggacatgttccccatcgagatgagcagtgatgaggccatggagctgctggagagcagcaggaccctgcccaatgacatcccccccttccaggatgacatccctgaggagaacctgagcctggccgtcatctacccccagagcgccagctaccccaacagcgaccgggagtggagccccacccccagccccagcggcagccggcccagcacccccaagagtgacagcgagctggtgtccaagagcacagagaggacaggccagaagaaccctgagatgctgtggctgtggggcgagctgccccaggccgccaagagcagcagcccccacaagatgaaggagagcagccccctgagcagcaggaagatctgtgacaagagccacttccaggccatccacagcgagagcagtgacaccttcagtgaccagagccccaccctggtgggcggggccctgctggaccagaacaagccccagacagagatgcagtttgtgaatgaggaggacctggagaccctgggcgccgccgcccccctgctgcccatgattgaggagctgaagccacccagcgcctctgtggtgcagacagccaacaagacagacagccccagcaggaagagggacaagaggagccgccacctgggcgcagatggagtgtacctggatgacctgacagacatggaccctgaggtggccgccctgtacttccccaagaatggagaccccagcggcctggccaagcacgccagtgacaacggggcccggagcgccaaccagagcccccagagcgtgggcagcagtggagtggacagcggcgtggagagcaccagtgatggcctgcgggacctgcccagcatcgccatcagcctgtgtggcggcctgagtgaccaccgggagatcaccaaggatgccttcctggagcaggccgtgtcctaccagcagtttgtggacaacccagccatcattgatgaccccaacctggtggtgaagattggcagcaagtactacaactggaccacagctgcccccctgctgctggccatgcaggccttccagaagcccctgcccaaggccaccgtggagagcatcatgagggacaagatgcccaagaagggcggccgctggtggttctcctggaggggcaggaacaccaccatcaaggaggagagcaagccagagcagtgcctggccggcaaggcccacagcactggagagcagcccccccagctgagcctggccaccagggtgaagcatgagagcagcagcagtgatgaggagagagctgctgccaagcccagcaatgccggccacctgcccctgctgcccaacgtgtcctacaagaagaccctgcggctgaccagcgagcagctgaagagcctgaagctgaagaatggccccaatgatgtggtgttttctgtgaccacccagtaccagggcacctgccgctgtgagggcaccatctacctgtggaactgggatgacaaggtgatcatcagtgacattgatggcaccatcaccaggagtgacaccctgggccacatcctgcccaccctgggcaaggactggacccaccagggcatcgccaagctgtaccacaaggtgtcccagaatggctacaagttcctgtactgcagcgcccgggccatcggcatggctgacatgacccggggctacctgcactgggtgaatgaaagaggaacagtgctgccccagggccccctgctgctgagccccagcagcctcttcagcgccctgcaccgggaggtgattgagaagaagccagagaagttcaaggtgcagtgcctgacagacatcaagaacctcttcttccccaacacagagcccttctacgccgccttcggcaacagaccagcagatgtgtacagctacaagcaggtgggcgtgtccctgaaccgcatcttcaccgtgaaccccaagggggagctggtgcaggagcacgccaagaccaacatcagcagctatgtgcggctgtgtgaggtggtggaccacgtgttccccctgctgaagaggagccacagcagtgacttcccctgcagcgacaccttcagcaacttcaccttctggagggagcccctgcccccatttgagaaccaggacatccacagcgccagcgcctag

SEQ ID NO: 93768 - DNA, 2691 bp, Artificial Sequence
  derived and/or modified sequence
atgagccgggtgcagaccatgaactacgtgggccagctggccggccaggtgtttgtgacagtgaaggagctgtacaagggcctgaacccagccaccctgagcggctgcatcgacatcatcgtcatccggcagcccaacggcaacctgcagtgcagccccttccacgtgcgctttgggaagatgggcgtgctgcggagccgggagaaggtggtggacatcgagatcaacggggagagcgtggacctgcacatgaagctgggggacaatggagaggccttctttgtgcaggagacagacaatgaccaggaggtgatccccatgcacctggccaccagccccatcctgtctgagggcgccagcaggatggagtgccagctgaagaggggctctgtggacaggatgaggggcctggaccccagcaccccagcccaggtgattgcccccagcgagacccccagcagcagctctgtggtgaagaagaggaggaagagaagaaggaagagccagctggacagcctgaagagagatgacaacatgaacaccagtgaagatgaggacatgttccccatcgagatgagcagtgatgaggccatggagctgctggagagcagcaggaccctgcccaatgacatcccccccttccaggatgacatccctgaggagaacctgagcctggccgtcatctacccccagagcgccagctaccccaacagcgaccgggagtggagccccacccccagccccagcggcagccggcccagcacccccaagagtgacagcgagctggtgtccaagagcacagagaggacaggccagaagaaccctgagatgctgtggctgtggggcgagctgccccaggccgccaagagcagcagcccccacaagatgaaggagagcagccccctgagcagcaggaagatctgtgacaagagccacttccaggccatccacagcgagagcagtgacaccttcagtgaccagagccccaccctggtgggcggggccctgctggaccagaacaagccccagacagagatgcagtttgtgaatgaggaggacctggagaccctgggcgccgccgcccccctgctgcccatgattgaggagctgaagccacccagcgcctctgtggtgcagacagccaacaagacagacagccccagcaggaagagggacaagaggagccgccacctgggcgcagatggagtgtacctggatgacctgacagacatggaccctgaggtggccgccctgtacttccccaagaatggagaccccagcggcctggccaagcacgccagtgacaacggggcccggagcgccaaccagagcccccagagcgtgggcagcagtggagtggacagcggcgtggagagcaccagtgatggcctgcgggacctgcccagcatcgccatcagcctgtgtggcggcctgagtgaccaccgggagatcaccaaggatgccttcctggagcaggccgtgtcctaccagcagtttgtggacaacccagccatcattgatgaccccaacctggtggtgaagattggcagcaagtactacaactggaccacagctgcccccctgctgctggccatgcaggccttccagaagcccctgcccaaggccaccgtggagagcatcatgagggacaagatgcccaagaagggcggccgctggtggttctcctggaggggcaggaacaccaccatcaaggaggagagcaagccagagcagtgcctggccggcaaggcccacagcactggagagcagcccccccagctgagcctggccaccagggtgaagcatgagagcagcagcagtgatgaggagagagctgctgccaagcccagcaatgccggccacctgcccctgctgcccaacgtgtcctacaagaagaccctgcggctgaccagcgagcagctgaagagcctgaagctgaagaatggccccaatgatgtggtgttttctgtgaccacccagtaccagggcacctgccgctgtgagggcaccatctacctgtggaactgggatgacaaggtgatcatcagtgacattgatggcaccatcaccaggagtgacaccctgggccacatcctgcccaccctgggcaaggactggacccaccagggcatcgccaagctgtaccacaaggtgtcccagaatggctacaagttcctgtactgcagcgcccgggccatcggcatggctgacatgacccggggctacctgcactgggtgaatgaaagaggaacagtgctgccccagggccccctgctgctgagccccagcagcctcttcagcgccctgcaccgggaggtgattgagaagaagccagagaagttcaaggtgcagtgcctgacagacatcaagaacctcttcttccccaacacagagcccttctacgccgccttcggcaacagaccagcagatgtgtacagctacaagcaggtgggcgtgtccctgaaccgcatcttcaccgtgaaccccaagggggagctggtgcaggagcacgccaagaccaacatcagcagctatgtgcggctgtgtgaggtggtggaccacgtgttccccctgctgaagaggagccacagcagtgacttcccctgcagcgacaccttcagcaacttcaccttctggagggagcccctgcccccatttgagaaccaggacatccacagcgccagcgcctag

SEQ ID NO: 93769 - DNA, 3051 bp, Artificial Sequence
  derived and/or modified sequence
aagctggagagggagagaggatgggaggcgaggaggcagcctgagggaaggaacaggagggaagagagatgaagggcaagaccggggccagccatgcctgtcctaacagcagccacccagcagtggcccagcctgctgagaactagaaaatcagaagaaaaaggagaatccaccaggagacccaggtaactctgaagcgtgagctgccagaattcaaggccacctgcttaacagaagacaactagaaacctcatccatgagcagagtgcagaccatgaattacgtggggcagttagccggccaggtgtttgtcaccgtgaaggagctctacaaggggctgaatcccgccacactctcagggtgcattgacatcattgtcatccgccagcccaatggaaacctccaatgctcccctttccacgtccgctttgggaagatgggggtcctgcgctcccgagagaaagtggttgacatagaaatcaatggggaatctgtggatttgcatatgaaattgggagataatggagaagcattttttgttcaagaaacagataatgatcaggaagttatccctatgcacctggccacctcccccatcctgtcagaaggagcttcgagaatggaatgccagctgaaaaggggctctgtggacaggatgagaggcctggaccccagcacgccagcccaagtgatcgctcccagcgagacgccgtcaagcagctctgtagtaaagaagagaagaaaaaggaggagaaagtcacagctggacagcctgaagagagatgacaacatgaacacatctgaggatgaggacatgttccccatcgagatgagctcggatgaggccatggagctgctggagagcagcagaactcttcctaatgatatacctccattccaagatgatattcctgaggaaaacctctccctggctgtgatttaccctcagtcagcctcataccctaattcggatagagagtggtcacccactcccagtccttccggttcccgaccttcaacacctaaaagtgattcagaattggtcagcaagtccacggaaaggacagggcagaagaacccagaaatgctttggctgtggggagagctgccgcaggctgctaagtcttcttctccacacaagatgaaagagtccagcccattgagcagtagaaaaatttgtgataaaagtcactttcaggccattcacagcgaatcttcagacacttttagtgaccaatcgccaactctggtcggtggggcacttttggaccagaacaagcctcagacagaaatgcagtttgtgaatgaagaagacctggagaccttaggagcagcagcgccactcttgcccatgatcgaggagctcaaacccccctctgccagtgtagtccagacagcaaacaagacggattctccttccaggaaaagagataaacgaagccgacatcttggtgctgacggcgtctacttggatgacctcacagacatggatcctgaagtggcggccctgtattttcccaaaaacggagatccttccggactcgcaaaacatgcaagcgacaacggagcccggtcagccaaccagtccccgcagtcggtgggcagctcgggcgtggacagtggcgtggagagcacctcggacgggctgagggacctcccttccatcgccatctccctctgcgggggcctcagcgaccaccgggagatcacgaaagatgcattcctggagcaagctgtgtcatatcaacagtttgtggacaaccccgctattatcgatgaccccaatctcgtggtaaagattgggagtaaatattataactggacaacagcagcacccctcctcctggcaatgcaggccttccagaaacctttgccaaaggccactgtggaatctatcatgagggataaaatgcccaaaaagggaggaagatggtggttttcatggaggggaagaaacaccacaatcaaggaggaaagtaagccagagcagtgcttggctggcaaggcccatagcaccggagagcaaccgccgcagctcagcttggccaccagggtaaagcatgaatcatcctccagtgatgaggagcgcgcagctgccaagccatcaaacgcaggccacctccctcttctgcctaatgtcagctacaagaagactctccggctgacttccgagcagcttaaaagcttgaagttgaagaatggccccaacgacgtggttttcagtgtcaccacgcagtaccaaggcacgtgccgctgtgagggcaccatctatctgtggaactgggatgataaagtcatcatttctgatattgatgggacaattaccagatcagatactcttggccacattttgcccacccttgggaaggattggacccatcagggcatcgctaagctgtaccataaagtgagccagaatggatataaatttctctactgttctgcccgtgccatcgggatggcggacatgacgcggggctacctgcactgggtcaacgagaggggcacggtgctgccccaggggcccctgctgctgagtcccagcagcctcttctctgccctgcacagagaagtgattgaaaagaagccagaaaagtttaaagtccagtgtttgacagacatcaaaaacctgtttttccccaacacagaacccttttatgctgcttttggaaaccgaccagctgatgtgtattcatacaagcaagtaggagtgtctttgaatagaatatttaccgtcaaccctaaaggagagctggtacaggaacatgcaaagaccaacatctcttcgtatgtgagactctgtgaagtagtcgaccacgttttcccgttgctgaaaagaagccattcttcagactttccctgttcggataccttcagtaacttcaccttttggagagagccactgccaccttttgaaaaccaggacattcattctgcctcagcgtaaaatgtcccaagcagcctcttgccagcagtgcagagcctggttgtcacccattaaaggataggtctccccggagtgcacagctccacctgggagcctggcgcgtc

SEQ ID NO: 93770 - DNA, 2673 bp, Artificial Sequence
  derived and/or modified sequence
atgaactacgtgggccagctggccggccaggtgttcgtgaccgtgaaggaactgtataagggcctcaacccagccaccctgtcaggttgcatcgacatcatagtgattagacagccaaacggaaacctgcaatgctctccttttcacgtacgattcggaaagatgggtgtgttaaggtcgagagagaaagtagtggacattgagatcaacggagaatccgtggatttgcatatgaagttgggcgacaacggcgaggctttctttgtgcaggagaccgacaatgatcaggaagtgattccaatgcatcttgccacttccccaattctttctgagggggcttcgagaatggagtgtcagctgaagcgagggtcagtcgaccggatgcgtggactggacccttccacaccggcgcaggtgatcgctcccagcgaaaccccctctagctctagcgtggtgaagaaacggcggaagaggcgccgcaaatcacagctggattcactgaagcgcgacgataacatgaatacatcagaagacgaggacatgttcccaattgagatgagctcggatgaggctatggagctgctcgaatcatcacgcaccctgcccaacgatatccctccttttcaggatgatatcccagaggagaacctgtctctggcggtcatctatccccagtcagcctcttatcccaatagtgatagagagtggtcacccactccatcccccagcggctcccggccttcaacaccgaagagcgactctgagctggtgtcaaaatccaccgagcgcacaggccagaaaaatcccgaaatgctgtggctttggggcgagcttccccaggctgccaagagctcatcaccccataagatgaaggaaagcagcccattgtccagccgcaagatctgcgacaaatcacattttcaagcaatccattccgaaagctccgatacttttagtgatcaaagccccaccctggtaggcggcgcgctgctggaccagaacaaacctcaaactgagatgcagtttgtgaacgaggaggacctggagactctgggcgcagctgccccgctgttgccgatgattgaggagcttaagccgccttcagccagcgtggtgcaaactgcaaacaaaacagacagcccttctagaaaaagagacaagcggagcaggcacttgggcgcagacggggtatacctagacgatcttaccgacatggaccccgaagtggctgctctgtattttccgaaaaatggtgacccatctggactggctaagcacgcaagtgacaatggggccagatccgccaaccagagtccgcagtctgttggctccagcggagtcgattccggagttgagtcaacatctgacggtctgcgcgatcttcccagtattgcgattagcctctgcgggggcctgtctgatcaccgcgagatcactaaagatgcctttttggagcaggctgtatcttaccagcagttcgtagataacccagccatcatcgatgacccaaaccttgtagtaaagataggatccaagtactacaactggaccacagcagctccccttctcttggctatgcaggcattccaaaaacctctgccaaaagcaactgtcgagagcattatgcgggacaagatgcctaaaaaagggggtaggtggtggttttcttggaggggtcgaaacacaactattaaagaggagagcaaaccggagcagtgcctggccggtaaggcccattccacaggtgagcagcctccccagctctcattagccaccagagttaaacacgaaagcagttctagcgacgaggagcgagcagccgcgaagccatcaaacgcgggccacctccctttgctgcctaacgtcagctataagaagaccctccggctcacttccgagcagcttaaatcattgaagttgaaaaatggtccaaacgacgtggtctttagcgttaccacacagtaccagggaacctgcagatgtgagggcaccatctacctctggaattgggatgacaaagtgattattagcgacatcgacgggaccattactaggtccgacacgcttggacatatccttccaactttgggaaaggactggacacatcagggaattgctaagctataccataaagtctcccagaacgggtacaaattcctgtactgtagcgccagagctattgggatggccgatatgacccgggggtacctgcactgggttaatgagcggggaacagttctgccgcagggaccactgcttctgtcgccctccagcttgttctctgcactacacagagaagtgatagaaaaaaagcccgagaagttcaaggtgcaatgtcttactgatattaaaaacctcttttttccgaatacagaacccttttatgcggccttcgggaaccgtcctgccgatgtttactcttacaagcaagtcggggtgtctttaaaccggattttcactgtcaaccctaagggtgagctggtccaggagcacgctaagaccaatatcagttcctacgtccggctgtgcgaagtagtagaccacgtatttccactcctgaagaggagccattcctcggatttcccatgcagcgatacattctcgaatttcactttctggagggagcccctccccccgtttgagaaccaggatatacactcagccagcgcatag

SEQ ID NO: 93771 - DNA, 2691 bp, Artificial Sequence
  derived and/or modified sequence
atgagccgggtgcagaccatgaactacgtgggccagctggccggccaagtgttcgttacggtgaaggagctctataaagggctgaatccagctacactttccggctgcatcgacatcatagttatccgccaaccaaacggcaatttacaatgttcgccgtttcacgtcagatttgggaagatgggtgtgttgagatccagggagaaggtcgtggacattgagatcaatggggagagcgtggaccttcacatgaaactgggggataacggggaagccttctttgtgcaggagactgataatgatcaagaagtcattcctatgcatctcgccacctcccccatcctttccgagggcgcctcaagaatggagtgccagcttaagcggggaagcgtggaccgcatgcgaggtctggatcctagcactcccgcacaggttatcgccccatcagagacccccagctcaagtagtgtggtgaaaaaacggagaaaacgcagacggaagtctcaattagactcccttaagcgcgatgataatatgaatacaagcgaagacgaggacatgttccctattgagatgtcttcagacgaagccatggagctccttgagagctcccggacactgccgaatgacattcctccctttcaagacgacattccggaggaaaacttatccttagctgtaatttatccccagtcagcatcctatcctaacagcgatcgtgaatggagcccaactcccagtccctcaggaagtcggcctagcacccccaaaagcgactccgaactcgtttcaaaatccaccgaacgcacaggacaaaaaaaccccgaaatgctgtggctatggggagaactaccacaggcggccaagagcagttcacctcacaaaatgaaggaatcatctcccctcagttcccgaaagatatgtgataagtcccacttccaggctattcactccgaatcatccgatacctttagtgaccagtccccaactttagttggaggcgccctgctggatcagaacaaaccgcagacagagatgcagttcgtgaatgaggaggatctggaaacactgggagcagctgctcccctgttgccaatgatcgaggagttaaaaccccctagcgcctccgttgtacagacagccaataaaaccgacagccccagtcgaaaacgcgacaaaagatctaggcacctgggcgcggatggcgtctatctagatgatctcaccgacatggacccggaggtcgcagcgctgtactttccgaaaaacggggatccttctggacttgccaaacacgcctcggataacggcgctaggtctgccaatcaaagcccccagtccgtcgggtcaagcggagtggatagtggcgtagagagtacttctgacggtctgcgggaccttccctccatcgcgatttcgttatgtgggggactttccgatcatagagaaattaccaaagatgcatttctcgagcaggccgtttcatatcagcaatttgtggacaaccccgccatcatcgacgatcccaatcttgtggtgaaaatcggctctaagtactataattggaccacagctgccccgctgttgcttgccatgcaagcctttcagaaaccactgccaaaggcaacggtggaatctatcatgcgggataagatgcctaagaaaggtggacgctggtggttttcttggagaggacgcaatacaaccattaaggaggagtcaaagccggagcagtgtctggcaggaaaggcacacagcactggcgagcagcccccccagctgagcctggcgacacgtgtgaaacacgagtcctcctcgagtgacgaagaaagggccgccgcgaagccatctaacgcagggcatctgccactgctgcccaatgtctcttacaaaaagaccctcaggctgacgtccgaacagctcaaatcacttaagctgaaaaacgggccaaatgacgtcgtattttccgtcactacccagtaccaggggacctgccgctgtgaagggacaatctacctatggaattgggacgataaagttatcatatcagacatcgatggcacaatcacacgcagtgatactctgggccatatactgcccacattagggaaagattggacccatcaaggcatcgcaaaactgtaccacaaggtgtcccaaaatggttacaaatttctgtactgttctgcgagagccattggcatggccgatatgacgcgcggatatttgcactgggttaacgaaagggggacagttctgcctcaggggccactgctgctcagtccatcaagcttgtttagcgcactgcaccgagaggtgatcgaaaagaaacccgaaaagtttaaggtgcagtgccttaccgatattaagaacctcttcttcccaaacacagagccattttatgcggcctttggtaaccgcccagctgacgtttactcgtacaagcaggtgggggtctctttgaaccggatctttaccgtcaatccgaaaggcgaacttgtgcaagagcacgccaaaacaaatataagctcttacgtgagattgtgcgaggtagttgaccacgtctttccgttattaaagcgatctcacagctcagactttccctgctccgataccttctccaattttactttctggagggagccattacccccattcgaaaatcaggacatccatagcgcaagcgcttag

SEQ ID NO: 93772 - DNA, 2673 bp, Artificial Sequence
  derived and/or modified sequence
atgaactacgtggggcagttggcgggtcaggtgtttgttactgttaaagagctgtacaagggcctgaatccagcaacactgtccgggtgcatcgacatcatcgtcataaggcaaccaaacggtaatctccaatgtagcccatttcacgtgagattcggtaagatgggtgtcctaaggagtagggaaaaagtggttgatatagaaattaacggagagtcagtcgacctccatatgaaactgggcgacaacggggaggctttcttcgtgcaagagacggacaacgaccaagaggtgatccctatgcacttggcgacttctcctatcctcagcgagggcgcatcccggatggagtgccaactgaaacggggtagcgtggacagaatgcgtgggctggatccctccacgccggcacaagtgattgcccctagcgagacaccttcttcttctagcgtggtcaaaaagcgcaggaagaggagacgaaagagtcaactggactcactcaagagagatgacaacatgaatacgtccgaggacgaggacatgtttcccatcgagatgtcatcggacgaagccatggagcttctggaaagttctcggaccctcccaaacgacattcctcctttccaagatgacatccccgaagaaaacctgagccttgcagttatctatccgcagtctgcttcttacccgaactccgaccgagagtggtcacccactccctcaccttctggcagcagaccttcaactcctaaaagtgactcagagctcgtgtcgaaatctactgaacgcacgggacagaagaaccctgagatgctctggctgtggggagagttgccccaggctgccaagtcatcctcaccacataaaatgaaagaaagctccccactgtcatcacggaaaatctgcgataagtcccacttccaggccattcactctgagtcctccgataccttttcagaccaatctcctacactggtaggtggcgcattgctggaccagaacaagcctcagaccgagatgcaatttgtgaacgaagaggatctcgaaaccctgggggctgcagctcccttgctgcctatgattgaagagcttaagccaccatccgcgtctgtcgtgcagaccgccaataaaacagactcaccgtctcgaaagcgagataagcggtcgagacatttaggagccgatggcgtgtacctggacgatctcacagatatggaccctgaggtggctgctctgtatttccccaaaaatggtgacccttctggactggcaaaacatgccagcgacaatggagccagaagtgctaaccaaagtcctcagagcgtaggatcgtcaggtgtggattccggggtggagtccactagtgacggactacgggaccttccatctatagccatctccctatgcggcggactgtcagaccatcgcgaaatcacaaaagacgcatttctggagcaagccgtgtcatatcagcagtttgtggataatccagcgataattgacgatccaaacctggtcgtgaagataggatcaaagtactacaactggaccacagctgcaccattgttgcttgctatgcaggcatttcagaagccactccccaaagccaccgtcgaatcgatcatgcgtgataagatgccaaagaagggcggacgctggtggtttagctggcggggaaggaataccaccatcaaagaggaatcaaaaccagaacaatgcctcgcaggcaaggcacatagcaccggggagcagccaccccagctatcactggccacccgagttaagcatgagtcctctagctccgacgaggagcgggcagctgcgaagcccagtaacgccggacatctgccactgttgcctaatgtcagttataagaaaactctgcgccttacgtccgagcagttaaagagcttgaaactgaaaaacggcccaaatgacgttgtgttcagcgtcacaacacaataccagggtacatgccgctgtgaggggactatttacttgtggaactgggatgataaggtgatcatttctgacattgacgggaccataacccgcagtgacacattgggccacatcctccccacgctcgggaaagactggacacatcaagggattgccaagctgtaccataaggtgtcgcaaaacggttataagttcttatactgctcagcacgcgcaatcgggatggctgacatgactcgaggatatctgcattgggtaaacgagaggggcacagtgctgccacaggggccactcctgctatccccgtcttcacttttcagtgcattgcatagggaagtcatcgagaagaaacctgagaagtttaaagttcagtgccttactgatataaagaatctgttttttccaaatacggagcccttctacgccgcattcggcaaccgtcccgctgacgtctattcctacaagcaggtgggcgtcagcttgaatcggattttcacagtaaatcccaagggggaattggtccaagaacatgccaagaccaatatcagttcctacgtccgcctgtgtgaggtagtggaccatgtgtttcctcttttgaagaggtcacacagttcagacttcccttgtagcgatacattctcgaattttacattttggcgggagccgctgccaccctttgagaaccaagatatccacagtgcttccgcctag

SEQ ID NO: 93773 - DNA, 2691 bp, Artificial Sequence
  derived and/or modified sequence
atgagccgagtgcaaactatgaactatgtagggcagttagccggacaggtgttcgtcacagtgaaggaactttacaagggactgaacccagctaccctctctgggtgtattgacatcattgttatccgacaacctaacggaaatctccagtgctccccctttcatgtacgctttggcaaaatgggagtgctgcgctcccgggagaaagtcgtcgacatcgagattaacggcgaaagcgttgacctacatatgaaactgggtgacaacggtgaggccttcttcgttcaggaaacagacaacgatcaggaggtcattccaatgcatctggcgacttcgcccatattaagtgagggcgcaagccgcatggagtgccagctaaagcgcggttctgtggatcgcatgagaggcttagatccatctactccagcccaagtgattgctcccagcgagacccccagttcatcatccgtggttaagaagagacgaaagagacgaaggaagtcacagctggacagcctcaaaagggacgacaacatgaacacgtcagaggatgaggatatgttcccgatcgaaatgagttcggacgaggcgatggagctgttggaaagcagtcgcacgttacccaatgacatcccgccatttcaagatgacatccctgaagaaaatctatctctcgccgtgatatacccccagtccgctagctacccgaattccgatcgggagtggagccccacgcccagtccaagtggcagtcgcccatccacacccaagtcagacagcgaacttgtgtctaagagtactgaaagaactggacagaagaatcctgagatgctatggctttggggcgagctgccccaggccgctaagagctcatccccccacaagatgaaagaatcctccccccttagttctcggaaaatatgtgataagtcccatttccaggcgatccactccgaatcttccgatactttttcggaccagagtccaactttagtgggaggcgcactcctggatcagaacaaaccccagacggaaatgcaatttgttaatgaggaggatctcgagacattgggcgctgccgctccactccttcctatgattgaggaactgaaaccaccttctgcctccgtggtgcaaaccgccaacaagacggatagtccctctaggaaacgtgacaaaaggagtcggcatttaggagctgacggtgtctatttagacgatctcaccgacatggatcccgaagtggccgctctgtatttcccgaaaaacggcgacccatccggattggccaagcacgcatccgacaatggcgctcggagtgcaaaccagagcccccagtccgttggctctagcggggtggactccggcgtggaatccacgagcgatggtttgagggaccttcccagcattgctatcagcctatgtgggggactttcagatcatcgagaaattacaaaggacgcctttctggagcaggctgtgtcataccagcagttcgtagacaaccccgcaattatcgacgacccgaacctcgtggtcaaaattgggtccaagtattacaactggacaacagccgctcctctgctgttagcaatgcaggcctttcaaaagcctctacctaaggcgacagtcgaatcaatcatgcgcgacaaaatgccaaaaaaagggggacggtggtggttctcttggcggggacgcaacacgacaataaaggaggagagcaagcccgaacagtgcctagctggcaaggcccactcaaccggcgagcagcccccacagcttagtcttgctacaagagtgaagcatgagtcatcaagctcagacgaggagcgcgcagccgctaagccaagtaacgcgggacacctcccgctactgcccaacgtgtcctataaaaaaacattacgacttacctccgaacagcttaaatccctgaagctgaagaacgggccaaacgacgtcgtattttccgtcactacccagtaccagggcacttgcaggtgtgaaggcacaatatacctatggaactgggacgacaaggtcatcatatctgatatcgatggcacgatcacgcggagcgacacactgggccacatactgcctacattgggtaaggactggacacaccaaggcatcgctaagctataccataaagtctctcagaacggttacaaattcctatactgtagtgcgagggcaatcggcatggctgacatgacaaggggttatcttcattgggtcaacgagcgaggaacagtgctcccacaggggcctcttcttctgtcaccatcgagcctttttagtgcgctacacagagaggtgatcgagaagaaacccgaaaagttcaaggtacagtgtctgacagacattaaaaacctctttttcccgaatacggaaccgttctacgcagcctttggaaatcgcccagccgacgtgtattcatataagcaggtgggggtcagtttgaaccggatcttcaccgtgaatcctaaaggagagcttgtgcaggaacatgcaaaaaccaacattagttcctatgttcggctatgtgaagtggtggatcacgtgttcccactgctcaagcgcagccattcttctgatttcccctgttctgatacgttttccaatttcaccttctggagggaacccctgccgccatttgagaaccaagatatccatagtgcctctgcgtag

SEQ ID NO: 93774 - DNA, 2673 bp, Artificial Sequence
  derived and/or modified sequence
atgaactacgtgggccagctggccggccaggtgttcgtgaccgtgaaggagctgtacaagggcctgaaccccgccaccctgagcggctgcatcgacatcatcgtgatcagacagcccaacggcaacctgcagtgcagccccttccacgtgagattcggcaagatgggcgtgctgagaagcagagagaaggtggtggacatcgagatcaacggcgagagcgtggacctgcacatgaagctgggcgacaacggcgaggccttcttcgtgcaggagaccgacaacgaccaggaggtgatccccatgcacctggccaccagccccatcctgagcgagggcgccagcagaatggagtgccagctgaagagaggcagcgtggacagaatgagaggcctggaccccagcacccccgcccaggtgatcgcccccagcgagacccccagcagcagcagcgtggtgaagaagagaagaaagagaagaagaaagagccagctggacagcctgaagagagacgacaacatgaacaccagcgaggacgaggacatgttccccatcgagatgagcagcgacgaggccatggagctgctggagagcagcagaaccctgcccaacgacatcccccccttccaggacgacatccccgaggagaacctgagcctggccgtgatctacccccagagcgccagctaccccaacagcgacagagagtggagccccacccccagccccagcggcagcagacccagcacccccaagagcgacagcgagctggtgagcaagagcaccgagagaaccggccagaagaaccccgagatgctgtggctgtggggcgagctgccccaggccgccaagagcagcagcccccacaagatgaaggagagcagccccctgagcagcagaaagatctgcgacaagagccacttccaggccatccacagcgagagcagcgacaccttcagcgaccagagccccaccctggtgggcggcgccctgctggaccagaacaagccccagaccgagatgcagttcgtgaacgaggaggacctggagaccctgggcgccgccgcccccctgctgcccatgatcgaggagctgaagccccccagcgccagcgtggtgcagaccgccaacaagaccgacagccccagcagaaagagagacaagagaagcagacacctgggcgccgacggcgtgtacctggacgacctgaccgacatggaccccgaggtggccgccctgtacttccccaagaacggcgaccccagcggcctggccaagcacgccagcgacaacggcgccagaagcgccaaccagagcccccagagcgtgggcagcagcggcgtggacagcggcgtggagagcaccagcgacggcctgagagacctgcccagcatcgccatcagcctgtgcggcggcctgagcgaccacagagagatcaccaaggacgccttcctggagcaggccgtgagctaccagcagttcgtggacaaccccgccatcatcgacgaccccaacctggtggtgaagatcggcagcaagtactacaactggaccaccgccgcccccctgctgctggccatgcaggccttccagaagcccctgcccaaggccaccgtggagagcatcatgagagacaagatgcccaagaagggcggcagatggtggttcagctggagaggcagaaacaccaccatcaaggaggagagcaagcccgagcagtgcctggccggcaaggcccacagcaccggcgagcagcccccccagctgagcctggccaccagagtgaagcacgagagcagcagcagcgacgaggagagagccgccgccaagcccagcaacgccggccacctgcccctgctgcccaacgtgagctacaagaagaccctgagactgaccagcgagcagctgaagagcctgaagctgaagaacggccccaacgacgtggtgttcagcgtgaccacccagtaccagggcacctgcagatgcgagggcaccatctacctgtggaactgggacgacaaggtgatcatcagcgacatcgacggcaccatcaccagaagcgacaccctgggccacatcctgcccaccctgggcaaggactggacccaccagggcatcgccaagctgtaccacaaggtgagccagaacggctacaagttcctgtactgcagcgccagagccatcggcatggccgacatgaccagaggctacctgcactgggtgaacgagagaggcaccgtgctgccccagggccccctgctgctgagccccagcagcctgttcagcgccctgcacagagaggtgatcgagaagaagcccgagaagttcaaggtgcagtgcctgaccgacatcaagaacctgttcttccccaacaccgagcccttctacgccgccttcggcaacagacccgccgacgtgtacagctacaagcaggtgggcgtgagcctgaacagaatcttcaccgtgaaccccaagggcgagctggtgcaggagcacgccaagaccaacatcagcagctacgtgagactgtgcgaggtggtggaccacgtgttccccctgctgaagagaagccacagcagcgacttcccctgcagcgacaccttcagcaacttcaccttctggagagagcccctgccccccttcgagaaccaggacatccacagcgccagcgcctag

SEQ ID NO: 93775 - DNA, 2691 bp, Artificial Sequence
  derived and/or modified sequence
atgagcagagtgcagaccatgaactacgtgggccagctggccggccaggtgttcgtgaccgtgaaggagctgtacaagggcctgaaccccgccaccctgagcggctgcatcgacatcatcgtgatcagacagcccaacggcaacctgcagtgcagccccttccacgtgagattcggcaagatgggcgtgctgagaagcagagagaaggtggtggacatcgagatcaacggcgagagcgtggacctgcacatgaagctgggcgacaacggcgaggccttcttcgtgcaggagaccgacaacgaccaggaggtgatccccatgcacctggccaccagccccatcctgagcgagggcgccagcagaatggagtgccagctgaagagaggcagcgtggacagaatgagaggcctggaccccagcacccccgcccaggtgatcgcccccagcgagacccccagcagcagcagcgtggtgaagaagagaagaaagagaagaagaaagagccagctggacagcctgaagagagacgacaacatgaacaccagcgaggacgaggacatgttccccatcgagatgagcagcgacgaggccatggagctgctggagagcagcagaaccctgcccaacgacatcccccccttccaggacgacatccccgaggagaacctgagcctggccgtgatctacccccagagcgccagctaccccaacagcgacagagagtggagccccacccccagccccagcggcagcagacccagcacccccaagagcgacagcgagctggtgagcaagagcaccgagagaaccggccagaagaaccccgagatgctgtggctgtggggcgagctgccccaggccgccaagagcagcagcccccacaagatgaaggagagcagccccctgagcagcagaaagatctgcgacaagagccacttccaggccatccacagcgagagcagcgacaccttcagcgaccagagccccaccctggtgggcggcgccctgctggaccagaacaagccccagaccgagatgcagttcgtgaacgaggaggacctggagaccctgggcgccgccgcccccctgctgcccatgatcgaggagctgaagccccccagcgccagcgtggtgcagaccgccaacaagaccgacagccccagcagaaagagagacaagagaagcagacacctgggcgccgacggcgtgtacctggacgacctgaccgacatggaccccgaggtggccgccctgtacttccccaagaacggcgaccccagcggcctggccaagcacgccagcgacaacggcgccagaagcgccaaccagagcccccagagcgtgggcagcagcggcgtggacagcggcgtggagagcaccagcgacggcctgagagacctgcccagcatcgccatcagcctgtgcggcggcctgagcgaccacagagagatcaccaaggacgccttcctggagcaggccgtgagctaccagcagttcgtggacaaccccgccatcatcgacgaccccaacctggtggtgaagatcggcagcaagtactacaactggaccaccgccgcccccctgctgctggccatgcaggccttccagaagcccctgcccaaggccaccgtggagagcatcatgagagacaagatgcccaagaagggcggcagatggtggttcagctggagaggcagaaacaccaccatcaaggaggagagcaagcccgagcagtgcctggccggcaaggcccacagcaccggcgagcagcccccccagctgagcctggccaccagagtgaagcacgagagcagcagcagcgacgaggagagagccgccgccaagcccagcaacgccggccacctgcccctgctgcccaacgtgagctacaagaagaccctgagactgaccagcgagcagctgaagagcctgaagctgaagaacggccccaacgacgtggtgttcagcgtgaccacccagtaccagggcacctgcagatgcgagggcaccatctacctgtggaactgggacgacaaggtgatcatcagcgacatcgacggcaccatcaccagaagcgacaccctgggccacatcctgcccaccctgggcaaggactggacccaccagggcatcgccaagctgtaccacaaggtgagccagaacggctacaagttcctgtactgcagcgccagagccatcggcatggccgacatgaccagaggctacctgcactgggtgaacgagagaggcaccgtgctgccccagggccccctgctgctgagccccagcagcctgttcagcgccctgcacagagaggtgatcgagaagaagcccgagaagttcaaggtgcagtgcctgaccgacatcaagaacctgttcttccccaacaccgagcccttctacgccgccttcggcaacagacccgccgacgtgtacagctacaagcaggtgggcgtgagcctgaacagaatcttcaccgtgaaccccaagggcgagctggtgcaggagcacgccaagaccaacatcagcagctacgtgagactgtgcgaggtggtggaccacgtgttccccctgctgaagagaagccacagcagcgacttcccctgcagcgacaccttcagcaacttcaccttctggagagagcccctgccccccttcgagaaccaggacatccacagcgccagcgcctag

SEQ ID NO: 93776 - protein, 28 aa, Artificial Sequence
  derived and/or modified sequence
MNYVGQLAGQVFVTVKELYKGLNPATLS

SEQ ID NO: 93777 - protein, 96 aa, Artificial Sequence
  derived and/or modified sequence
MNYVGQLAGQVFVTVKELYKGLNPATLSGCIDIIVIRQPNGNLQCSPFHVRFGKMGVLRSREKVVDIEINGESVDLHMKLGDNGEAFFVQETDNDQ

SEQ ID NO: 93778 - protein, 975 aa, Artificial Sequence
  derived and/or modified sequence
MGEQDGIRSSSWETSQGKSSPDSAWSWIPIMRDPGWIRNVWSSNINVQTMNYVGQLAGQVFVTVKELYKGLNPATLSGCIDIIVIRQPNGNLQCSPFHVRFGKMGVLRSREKVVDIEINGESVDLHMKLGDNGEAFFVQETDNDQEVIPMHLATSPILSEGASRMECQLKRGSVDRMRGLDPSTPAQVIAPSETPSSSSVVKKRRKRRRKSQLDSLKRDDNMNTSEDEDMFPIEMSSDEAMELLESSRTLPNDIPPFQDDIPEENLSLAVIYPQSASYPNSDREWSPTPSSLVDCKRTAPHLAVAAEGGLSSSCPPQSSLFHPSESPSGSRPSTPKSDSELVSKSTERTGQKNPEMLWLWGELPQAAKSSSPHKMKESSPLSSRKICDKSHFQAIHSESSDTFSDQSPTLVGGALLDQNKPQTEMQFVNEEDLETLGAAAPLLPMIEELKPPSASVVQTANKTDSPSRKRDKRSRHLGADGVYLDDLTDMDPEVAALYFPKNGDPSGLAKHASDNGARSANQSPQSVGSSGVDSGVESTSDGLRDLPSIAISLCGGLSDHREITKDAFLEQAVSYQQFVDNPAIIDDPNLVVKIGSKYYNWTTAAPLLLAMQAFQKPLPKATVESIMRDKMPKKGGRWWFSWRGRNTTIKEESKPEQCLAGKAHSTGEQPPQLSLATRVKHESSSSDEERAAAKPSNAGHLPLLPNVSYKKTLRLTSEQLKSLKLKNGPNDVVFSVTTQYQGTCRCEGTIYLWNWDDKVIISDIDGTITRSDTLGHILPTLGKDWTHQGIAKLYHKVSQNGYKFLYCSARAIGMADMTRGYLHWVNERGTVLPQGPLLLSPSSLFSALHREVIEKKPEKFKVQCLTDIKNLFFPNTEPFYAAFGNRPADVYSYKQVGVSLNRIFTVNPKGELVQEHAKTNISSYVRLCEVVDHVFPLLKRSHSSDFPCSDTFSNFTFWREPLPPFENQDIHSASA

SEQ ID NO: 93779 - DNA, 1863 bp, Artificial Sequence
  derived and/or modified sequence
atgctctggctgtggggcgaactaccccaggccgctaagtcctccagcccccataaaatgaaagaaagttctcccctgtcgtctcgtaaaatctgcgacaagagccacttccaagcgatacatagtgaatcttccgacacttttagcgatcagtcccccactcttgtcggcggagctcttttggatcagaataagccacaaaccgagatgcagtttgtgaacgaagaagacctggagactctcggcgctgctgccccgctgctgcccatgatagaggaattaaaacccccctcagctagcgttgttcagacagccaataaaaccgatagcccatctcgcaagcgcgacaaacgatcccgccacctgggagccgatggcgtatacctggatgatctcaccgatatggacccagaggtcgcagcactctactttcccaaaaacggggatccatccggcctcgctaagcacgcttccgacaacggggcgcggagcgcaaaccagtctccccaaagcgtggggagcagtggtgtggattcgggggtagagtcgacaagtgatggacttcgcgatttgcccagcatagctatcagcttatgtggcggcctgtccgaccatcgagagattacaaaagatgctttcctcgagcaggccgtgtcataccagcagttcgttgataaccctgcaattatcgacgaccccaaccttgtcgtaaagatcggatcgaagtactataattggactacagctgccccccttctgctggccatgcaggcctttcagaaaccattgcccaaagcaaccgtggaatccatcatgcgcgataagatgccaaagaagggcgggcggtggtggttcagttggcgcgggcggaacacgaccataaaggaggaaagcaagcctgagcagtgcctggccggcaaagctcacagcacaggagaacagccaccacagctgtctctggcaaccagagtcaaacacgagagctcgtctagcgatgaagagagagctgctgctaaaccctccaatgccgggcacctgcccttactccccaacgtatcctataagaaaacattacggctgacctctgagcagctaaagtccttgaaactgaagaacggccccaatgacgtggtctttagcgtgacgacccagtatcagggaacctgtcgttgcgagggcactatatacctgtggaactgggatgacaaggtgattatctctgatatcgatggcaccatcacacgaagtgatacactggggcacatattgcccaccttagggaaagattggacacaccagggcatcgctaaattgtatcacaaagtcagtcaaaacggctataagttcttatactgcagcgcgcgcgcaatcggaatggcagatatgacccggggttacctgcactgggttaacgaacgaggaactgtgctcccacagggcccacttctgctgtccccctcatctctgttctccgcgctgcatagggaagttatcgagaaaaaaccagaaaagttcaaggtccagtgtctaacagacatcaagaaccttttcttcccaaatacagaacctttttacgcagccttcggaaaccgcccagcagacgtctacagctacaagcaagtaggcgttagcctcaaccggatctttaccgttaatcccaagggcgagctggtacaagagcacgccaaaacaaacattagtagctacgttcggctgtgtgaggtcgttgatcacgtgttccctttacttaagcggagccatagctccgatttcccatgttccgataccttctcgaattttactttttggcgggagcccctgccaccttttgagaaccaggatatacactccgcctcagcctag

SEQ ID NO: 93780 - DNA, 87 bp, Artificial Sequence
  derived and/or modified sequence
atgaactatgtggggcagctggccggccaagtgtttgtcaccgtcaaggagctatacaaaggcttgaacccggcaactctatcatag

SEQ ID NO: 93781 - DNA, 2928 bp, Artificial Sequence
  derived and/or modified sequence
atgggagaacaggatggtattcgttcttcatcatgggagaccagccaggggaagtcctctccagactctgcctggtcttggattcccataatgcgggatcccggttggatacgcaacgtctggtcatcaaatattaacgtgcagacaatgaactatgtcggacagctggctggacaagtctttgtgacggtaaaagagctatacaagggcctgaatcccgcaacactgagtggatgcatcgatatcatcgtcattaggcaacccaacggcaatcttcagtgctcgcctttccacgtcaggtttggcaagatgggagtcctccgtagcagggagaaagtggttgatattgaaattaatggcgagagtgtggacttacacatgaaactaggtgacaacggagaagccttcttcgtgcaggaaaccgataacgatcaagaggtaatcccaatgcacttggctacaagccccatcttgagtgagggagcctccagaatggagtgccagttaaagcgcggttcagtcgaccgaatgcggggattggatccttccaccccagcccaggtcattgctccgagcgaaactccttctagctccagcgttgtgaagaagcggcggaagaggaggagaaagagccagctcgactcattaaaacgcgacgataacatgaacacaagtgaggacgaagacatgttcccaatcgagatgtctagtgacgaagccatggaactgctggaaagcagcaggactctgcccaatgatattccaccattccaggacgacatccccgaggagaacctttctctagcagtcatttatccacagagcgcatcgtatcccaacagcgaccgcgagtggtcccccactccatcgtctctggtggactgcaagagaactgctccccatttggctgttgccgctgaaggaggtctgtctagctcatgtcccccccagagttcccttttccacccatcggagagcccctccggatctaggccttccactccaaaaagcgatagcgagctggtatctaaaagtacggagagaactgggcagaagaatcctgagatgctctggctttggggcgaactgcctcaggcggcgaagtcgagctccccccacaagatgaaggaaagcagccctctgtcctctagaaagatttgtgataaatctcactttcaggccattcacagtgagagttccgataccttctcagaccagtcccccacgcttgttgggggggctctcctggatcaaaataagccacagactgaaatgcagttcgtaaacgaagaggatctcgagacattgggtgcggcagcccccctcttacccatgatcgaagagctcaagcctcctagtgcgagcgtagtgcaaaccgctaacaagaccgattcgccttcccgcaaaagggataagcggtcccgacatctgggggcagatggggtctatttggacgatctcaccgacatggaccccgaggttgccgctctgtattttccaaagaacggcgacccttccggtttagcaaagcatgcctctgacaacggtgctaggagcgcaaaccagagccctcagtctgtgggtagtagtggcgtggactcaggagttgagtctacatcagatggacttagagaccttccctccattgctatttcgctttgtgggggactttctgaccacagagagattactaaagacgcattcctcgagcaagcagtgagctatcagcaattcgtggacaatcctgccatcattgatgatcctaatctcgtcgttaagattgggagcaagtactacaactggacgactgccgcgcccctgctgctggcaatgcaggcctttcagaagcctctcccaaaggccacagtggagtcaatcatgagggacaagatgccgaaaaagggaggccgttggtggttttcctggagaggaaggaatactactattaaggaagagagtaagcccgaacaatgcttggccggcaaggcccacagtaccggtgagcaacccccacagttatcccttgctactcgagttaagcacgagtcaagcagctcggacgaagagcgggcagccgcaaagccatcgaatgccggccatctgccacttctccccaacgtgagttacaaaaagactcttaggcttacttcagagcaactcaagtccctcaagcttaaaaacgggcccaatgacgtggtgttttccgtcacaacccagtatcagggaacgtgtcggtgtgaggggacaatctacctttggaattgggacgacaaagtgattatctcagatattgacggcactatcacgagatctgatactctcggccacatcctaccgaccctgggcaaggactggacacaccaaggaatcgcaaagttgtaccataaagtgagtcagaatgggtacaaattcctctactgttcagccagagctataggcatggcggatatgactcggggctacctgcactgggtgaatgaacgcggtactgttctgccacaaggtcccctgctgttgagtcccagttctcttttctcagcacttcacagagaggtgatcgagaaaaaacccgaaaagttcaaagtacagtgcctgactgacattaaaaacctattcttcccgaacacggagcctttttatgcagcctttggaaaccgacccgccgatgtatactcttataagcaggtgggcgtcagcctcaataggatcttcaccgtcaaccccaaaggcgagctggtccaagagcacgcaaaaacaaatattagctcctatgttagattgtgtgaggtcgtggatcacgtgttccctctgttgaaacgctcccactcttctgactttccgtgttccgatactttttccaactttaccttttggagagagccgctgccccccttcgaaaaccaggatattcacagtgcctccgcgtag

SEQ ID NO: 93782 - DNA, 1863 bp, Artificial Sequence
  derived and/or modified sequence
atgctgtggctgtggggcgagctgccccaggccgccaagagcagcagcccccacaagatgaaggagagcagccccctgagcagcaggaagatctgtgacaagagccacttccaggccatccacagcgagagcagtgacaccttcagtgaccagagccccaccctggtgggcggggccctgctggaccagaacaagccccagacagagatgcagtttgtgaatgaggaggacctggagaccctgggcgccgccgcccccctgctgcccatgattgaggagctgaagccacccagcgcctctgtggtgcagacagccaacaagacagacagccccagcaggaagagggacaagaggagccgccacctgggcgcagatggagtgtacctggatgacctgacagacatggaccctgaggtggccgccctgtacttccccaagaatggagaccccagcggcctggccaagcacgccagtgacaacggggcccggagcgccaaccagagcccccagagcgtgggcagcagtggagtggacagcggcgtggagagcaccagtgatggcctgcgggacctgcccagcatcgccatcagcctgtgtggcggcctgagtgaccaccgggagatcaccaaggatgccttcctggagcaggccgtgtcctaccagcagtttgtggacaacccagccatcattgatgaccccaacctggtggtgaagattggcagcaagtactacaactggaccacagctgcccccctgctgctggccatgcaggccttccagaagcccctgcccaaggccaccgtggagagcatcatgagggacaagatgcccaagaagggcggccgctggtggttctcctggaggggcaggaacaccaccatcaaggaggagagcaagccagagcagtgcctggccggcaaggcccacagcactggagagcagcccccccagctgagcctggccaccagggtgaagcatgagagcagcagcagtgatgaggagagagctgctgccaagcccagcaatgccggccacctgcccctgctgcccaacgtgtcctacaagaagaccctgcggctgaccagcgagcagctgaagagcctgaagctgaagaatggccccaatgatgtggtgttttctgtgaccacccagtaccagggcacctgccgctgtgagggcaccatctacctgtggaactgggatgacaaggtgatcatcagtgacattgatggcaccatcaccaggagtgacaccctgggccacatcctgcccaccctgggcaaggactggacccaccagggcatcgccaagctgtaccacaaggtgtcccagaatggctacaagttcctgtactgcagcgcccgggccatcggcatggctgacatgacccggggctacctgcactgggtgaatgaaagaggaacagtgctgccccagggccccctgctgctgagccccagcagcctcttcagcgccctgcaccgggaggtgattgagaagaagccagagaagttcaaggtgcagtgcctgacagacatcaagaacctcttcttccccaacacagagcccttctacgccgccttcggcaacagaccagcagatgtgtacagctacaagcaggtgggcgtgtccctgaaccgcatcttcaccgtgaaccccaagggggagctggtgcaggagcacgccaagaccaacatcagcagctatgtgcggctgtgtgaggtggtggaccacgtgttccccctgctgaagaggagccacagcagtgacttcccctgcagcgacaccttcagcaacttcaccttctggagggagcccctgcccccatttgagaaccaggacatccacagcgccagcgcctag

SEQ ID NO: 93783 - DNA, 87 bp, Artificial Sequence
  derived and/or modified sequence
atgaactacgtgggccagctggccggccaggtgtttgtgacagtgaaggagctgtacaagggcctgaacccagccaccctgtcctag

SEQ ID NO: 93784 - DNA, 2928 bp, Artificial Sequence
  derived and/or modified sequence
atgggagagcaggacggcatccgcagcagctcctgggagaccagccagggcaagagcagcccagattctgcctggagctggatccccatcatgagggaccccggctggatcagaaatgtgtggagcagcaacatcaacgtgcagaccatgaactacgtgggccagctggccggccaggtgtttgtgacagtgaaggagctgtacaagggcctgaacccagccaccctgagcggctgcatcgacatcatcgtcatccggcagcccaatggaaacctgcagtgcagccccttccacgtgcgctttgggaagatgggcgtgctgcggagccgggagaaggtggtggacatcgagatcaatggagagagcgtggacctgcacatgaagctgggggacaacggggaggccttctttgtgcaggagacagacaatgaccaggaggtgatccccatgcacctggccaccagccccatcctgtctgagggcgccagcaggatggagtgccagctgaagaggggctctgtggacaggatgaggggcctggaccccagcaccccagcccaggtgattgcccccagcgagacccccagcagcagctctgtggtgaagaagaggaggaagagaagaaggaagagccagctggacagcctgaagagagatgacaacatgaacaccagtgaagatgaggacatgttccccatcgagatgagcagtgatgaggccatggagctgctggagagcagcaggaccctgcccaatgacatcccccccttccaggatgacatccctgaggagaacctgagcctggccgtcatctacccccagagcgccagctaccccaacagcgaccgggagtggagccccacccccagcagcctggtggactgcaagaggacagccccccacctggccgtggccgctgagggcggcctgagcagcagctgccccccccagagcagcctcttccaccccagcgagagccccagcggcagccggcccagcacccccaagagtgacagcgagctggtgtccaagagcacagagaggacaggccagaagaaccctgagatgctgtggctgtggggcgagctgccccaggccgccaagagcagcagcccccacaagatgaaggagagcagccccctgagcagcaggaagatctgtgacaagagccacttccaggccatccacagcgagagcagtgacaccttcagtgaccagagccccaccctggtgggcggggccctgctggaccagaacaagccccagacagagatgcagtttgtgaatgaggaggacctggagaccctgggcgctgctgcccccctgctgcccatgattgaggagctgaagcccccatctgcctctgtggtgcagacagccaacaagacagacagccccagcaggaagagggacaagaggagccgccacctgggcgcagatggagtgtacctggatgacctgacagacatggaccctgaggtggccgccctgtacttccccaagaatggagaccccagcggcctggccaagcacgccagtgacaatggagcccggagcgccaaccagagcccccagagcgtgggcagcagcggcgtggacagcggcgtggagagcaccagtgatggcctgcgggacctgcccagcatcgccatcagcctgtgtggcggcctgagtgaccaccgggagatcaccaaggatgccttcctggagcaggccgtgtcctaccagcagtttgtggacaacccagccatcattgatgaccccaacctggtggtgaagattggcagcaagtactacaactggaccacagctgcccccctgctgctggccatgcaggccttccagaagcccctgcccaaggccaccgtggagagcatcatgagggacaagatgcccaagaagggcggccgctggtggttctcctggagaggaagaaacaccaccatcaaggaggagagcaagccagagcagtgcctggccggcaaggcccacagcactggagagcagcccccccagctgagcctggccaccagggtgaagcatgagagcagcagcagtgatgaggagagagctgctgccaagcccagcaatgccggccacctgcccctgctgcccaacgtgtcctacaagaagaccctgcggctgaccagcgagcagctgaagagcctgaagctgaagaatggccccaatgatgtggtgttttctgtgaccacccagtaccagggcacctgccgctgtgagggcaccatctacctgtggaactgggatgacaaggtgatcatcagtgacattgatggcaccatcaccaggagtgacaccctgggccacatcctgcccaccctgggcaaggactggacccaccagggcatcgccaagctgtaccacaaggtgtcccagaatggctacaagttcctgtactgcagcgcccgggccatcggcatggctgacatgacccggggctacctgcactgggtgaatgaaagaggcaccgtgctgccccagggccccctgctgctgagccccagcagcctcttcagcgccctgcaccgggaggtgattgagaagaagccagagaagttcaaggtgcagtgcctgacagacatcaagaacctcttcttccccaacacagagcccttctatgctgcctttggaaacagaccagcagatgtgtacagctacaagcaggtgggcgtgtccctgaaccgcatcttcaccgtgaaccccaagggggagctggtgcaggagcacgccaagaccaacatcagcagctatgtgcggctgtgtgaggtggtggaccacgtgttccccctgctgaagaggagccacagcagtgacttcccctgcagcgacaccttcagcaacttcaccttctggagggagcccctgcccccatttgagaaccaggacatccacagcgccagcgcctag

SEQ ID NO: 93785 - DNA, 4005 bp, Artificial Sequence
  derived and/or modified sequence
ctttttggtctgtctgaattccctcagtgacggtcggcagaaagcgcatctgtgtttgtgcacgagacctttggagaagggttgctgtggcctgaacgggcagcatttatggtggtggcctgtttgctgttggggagggacttgcagcagactttctcgtagggctgggctccttatgcgtgagttgcacgcctgagtgcctctatgggttttgtggctcgtggcttttatgaagggaccagaatgttaggaactctggagttgggaattgctgcaggagaaccgtgttccgcatttcgttcttctagagcagagtccttccggttcccgaccttcaacacctaaaagtgattcagaattggtcagcaagtccacggaaaggacagggcagaagaacccagaaatgctttggctgtggggagagctgccgcaggctgctaagtcttcttctccacacaagatgaaagagtccagcccattgagcagtagaaaaatttgtgataaaagtcactttcaggccattcacagcgaatcttcagacacttttagtgaccaatcgccaactctggtcggtggggcacttttggaccagaacaagcctcagacagaaatgcagtttgtgaatgaagaagacctggagaccttaggagcagcagcgccactcttgcccatgatcgaggagctcaaacccccctctgccagtgtagtccagacagcaaacaagacggattctccttccaggaaaagagataaacgaagccgacatcttggtgctgacggcgtctacttggatgacctcacagacatggatcctgaagtggcggccctgtattttcccaaaaacggagatccttccggactcgcaaaacatgcaagcgacaacggagcccggtcagccaaccagtccccgcagtcggtgggcagctcgggcgtggacagtggcgtggagagcacctcggacgggctgagggacctcccttccatcgccatctccctctgcgggggcctcagcgaccaccgggagatcacgaaagatgcattcctggagcaagctgtgtcatatcaacagtttgtggacaaccccgctattatcgatgaccccaatctcgtggtaaagattgggagtaaatattataactggacaacagcagcacccctcctcctggcaatgcaggccttccagaaacctttgccaaaggccactgtggaatctatcatgagggataaaatgcccaaaaagggaggaagatggtggttttcatggaggggaagaaacaccacaatcaaggaggaaagtaagccagagcagtgcttggctggcaaggcccatagcaccggagagcaaccgccgcagctcagcttggccaccagggtaaagcatgaatcatcctccagtgatgaggagcgcgcagctgccaagccatcaaacgcaggccacctccctcttctgcctaatgtcagctacaagaagactctccggctgacttccgagcagcttaaaagcttgaagttgaagaatggccccaacgacgtggttttcagtgtcaccacgcagtaccaaggcacgtgccgctgtgagggcaccatctatctgtggaactgggatgataaagtcatcatttctgatattgatgggacaattaccagatcagatactcttggccacattttgcccacccttgggaaggattggacccatcagggcatcgctaagctgtaccataaagtgagccagaatggatataaatttctctactgttctgcccgtgccatcgggatggcggacatgacgcggggctacctgcactgggtcaacgagaggggcacggtgctgccccaggggcccctgctgctgagtcccagcagcctcttctctgccctgcacagagaagtgattgaaaagaagccagaaaagtttaaagtccagtgtttgacagacatcaaaaacctgtttttccccaacacagaacccttttatgctgcttttggaaaccgaccagctgatgtgtattcatacaagcaagtaggagtgtctttgaatagaatatttaccgtcaaccctaaaggagagctggtacaggaacatgcaaagaccaacatctcttcgtatgtgagactctgtgaagtagtcgaccacgttttcccgttgctgaaaagaagccattcttcagactttccctgttcggataccttcagtaacttcaccttttggagagagccactgccaccttttgaaaaccaggacattcattctgcctcagcgtaaaatgtcccaagcagcctcttgccagcagtgcagagcctggttgtcacccattaaaggataggtctccccggagtgcacagctccacctgggagcctggcgcgtcatcattggcctgacagcagagagaattgagaagcatttctcccctgccccaccccggggctgacatttctaagcaagataggaagggagcactttctaggctaggagttgggtgcatttgtaccgtgaaaagcattcctcagttgtggcttaatgccagttacgacgctgcctttccggcctgctccagcaagtagctactggttcacgtgcagtttggggctgtgaaacctaggcagaaggcggctgtctgagggctgtccccgcctaggacagggtcaatcgaggaatgccagatgtgcacggtttttggcaaagtagggggcacatttccattatagcaatgttagtgccaccaccttctgaacacagtggggagggctgtgaaggctcatgtgacctggatctgaggtctctgatagaaatctggacgccaccgggtccaggcctggcctcagacttggccttgtggatgggccccttacagtatttgctgactagtctcatttttaggtgataaatttttctttaattcctttggttaaagatagtctatttcattggcatatctccccccagtttttgtggctcaaggctggaatatttatgccttaatatatctatggcagacatttaagaatgcgctttatctagctcatggtaactttgcaacgccttagattaaaatgacagtaaatattactaaggcagtattttgaatgagtttgacactgccggcttccttccatccagcgaggtggtgctgacagtgtggacttgagcacacttatgccaaatgataatgatactgacttctgttgggagctctccaaagaaactggttggttttaagaaaatagtttcaagaagttcaactatattcttttagatattatgtattgttttactctgattaggttactgtgataggcatttattcatattctttctataccactgtcattaatatattaaaaagatgtatgtgttagactatcgaaagggccttattctctctttctcatagactgaccttcttttggaatttctgagtcatttattttccttagctttttccactcaaattaagggcaagcgaaaaagtaataatttggcattctttaagcctacagaatgtgattctttcacttgtttattacactggctcgtggacagaacaatttgaaaagtgaaagaattattttggtaaaagattttgctttacttttcgaagcattatttttttaaagagtgttttactccaacgattgaaacattttcctatttaaatttcattgttagaatcacaggaggcaaaaaatggaacggttgaatgaaattttactctttctgtgaaagaaaatccacagagttgttgcctccgttgtagttggtgggccccgttagcattggatgcctttgccaaatggttcatgtggacacacaaaggcaaacagatctgccatcgatcgcagatttctgtagaaacacggatgtgcatgtgcagattcccttttgcaggtattaaaaataattaaaaatagtcctgcctgaggttgcagtgagccgagcttgcactactgcactccagcctgggtgacagagtaagactccatgtcaaaaaaaaaaaaaaaaa

SEQ ID NO: 93786 - DNA, 3077 bp, Artificial Sequence
  derived and/or modified sequence
atttctctcctgatgctgggtgaggaggcagacagcaccatacagggcgggccatgggggaacaggacggcattcgcagctccagctgggagacctcgcagggcaagagctccccagactcggcttggtcatggattccaataatgagagaccctgggtggattcgaaatgtatggtcttcaaacattaacgtgcagaccatgaattacgtggggcagttagccggccaggtgtttgtcaccgtgaaggagctctacaaggggctgaatcccgccacactctcagggtgcattgacatcattgtcatccgccagcccaatggaaacctccaatgctcccctttccacgtccgctttgggaagatgggggtcctgcgctcccgagagaaagtggttgacatagaaatcaatggggaatctgtggatttgcatatgaaattgggagataatggagaagcattttttgttcaagaaacagataatgatcaggaagttatccctatgcacctggccacctcccccatcctgtcagaaggagcttcgagaatggaatgccagctgaaaaggggctctgtggacaggatgagaggcctggaccccagcacgccagcccaagtgatcgctcccagcgagacgccgtcaagcagctctgtagtaaagaagagaagaaaaaggaggagaaagtcacagctggacagcctgaagagagatgacaacatgaacacatctgaggatgaggacatgttccccatcgagatgagctcggatgaggccatggagctgctggagagcagcagaactcttcctaatgatatacctccattccaagatgatattcctgaggaaaacctctccctggctgtgatttaccctcagtcagcctcataccctaattcggatagagagtggtcacccactcccagtagcctggtagattgcaaaaggactgcccctcatcttgcagttgcggccgagggaggtctgtctagttcttgccctccacagtcttccctgttccatccttcggaaagtccttccggttcccgaccttcaacacctaaaagtgattcagaattggtcagcaagtccacggaaaggacagggcagaagaacccagaaatgctttggctgtggggagagctgccgcaggctgctaagtcttcttctccacacaagatgaaagagtccagcccattgagcagtagaaaaatttgtgataaaagtcactttcaggccattcacagcgaatcttcagacacttttagtgaccaatcgccaactctggtcggtggggcacttttggaccagaacaagcctcagacagaaatgcagtttgtgaatgaagaagacctggagaccttaggagcagcagcgccactcttgcccatgatcgaggagctcaaacccccctctgccagtgtagtccagacagcaaacaagacggattctccttccaggaaaagagataaacgaagccgacatcttggtgctgacggcgtctacttggatgacctcacagacatggatcctgaagtggcggccctgtattttcccaaaaacggagatccttccggactcgcaaaacatgcaagcgacaacggagcccggtcagccaaccagtccccgcagtcggtgggcagctcgggcgtggacagtggcgtggagagcacctcggacgggctgagggacctcccttccatcgccatctccctctgcgggggcctcagcgaccaccgggagatcacgaaagatgcattcctggagcaagctgtgtcatatcaacagtttgtggacaaccccgctattatcgatgaccccaatctcgtggtaaagattgggagtaaatattataactggacaacagcagcacccctcctcctggcaatgcaggccttccagaaacctttgccaaaggccactgtggaatctatcatgagggataaaatgcccaaaaagggaggaagatggtggttttcatggaggggaagaaacaccacaatcaaggaggaaagtaagccagagcagtgcttggctggcaaggcccatagcaccggagagcaaccgccgcagctcagcttggccaccagggtaaagcatgaatcatcctccagtgatgaggagcgcgcagctgccaagccatcaaacgcaggccacctccctcttctgcctaatgtcagctacaagaagactctccggctgacttccgagcagcttaaaagcttgaagttgaagaatggccccaacgacgtggttttcagtgtcaccacgcagtaccaaggcacgtgccgctgtgagggcaccatctatctgtggaactgggatgataaagtcatcatttctgatattgatgggacaattaccagatcagatactcttggccacattttgcccacccttgggaaggattggacccatcagggcatcgctaagctgtaccataaagtgagccagaatggatataaatttctctactgttctgcccgtgccatcgggatggcggacatgacgcggggctacctgcactgggtcaacgagaggggcacggtgctgccccaggggcccctgctgctgagtcccagcagcctcttctctgccctgcacagagaagtgattgaaaagaagccagaaaagtttaaagtccagtgtttgacagacatcaaaaacctgtttttccccaacacagaacccttttatgctgcttttggaaaccgaccagctgatgtgtattcatacaagcaagtaggagtgtctttgaatagaatatttaccgtcaaccctaaaggagagctggtacaggaacatgcaaagaccaacatctcttcgtatgtgagactctgtgaagtagtcgaccacgttttcccgttgctgaaaagaagccattcttcagactttccctgttcggataccttcagtaacttcaccttttggagagagccactgccaccttttgaaaaccaggacattcattctgcctcagcgtaaaatgtcccaagcagcctcttgccagcagtgcagagcctggttgtcacccattaaaggataggtctccccggagtgcacagctccacctgggagcct

SEQ ID NO: 93787 - DNA, 1863 bp, Artificial Sequence
  derived and/or modified sequence
atgctgtggctgtggggcgagctgccccaggccgccaagagcagcagcccacacaaaatgaaggagagctccccccttagctcccgaaagatctgcgataaatcacatttccaagccatccactcggaatcttccgacaccttttccgaccagagcccaactctggtcggcggtgccctgctcgaccagaacaaaccccaaactgagatgcagtttgtcaacgaagaggatctggaaaccctgggcgctgcagctccactgctgccaatgatcgaggagcttaaaccgccatcggcttcagtggtgcagacagccaacaagacagatagcccatctaggaagcgagacaaacggagcagacacctgggcgcagacggcgtctacctggacgacctaactgacatggatcctgaggtcgcagctctttacttccctaagaatggtgatccctccggcctagccaaacacgcgtcagacaacggcgcccgatccgccaatcagtctccccagtctgttggttcttcaggagtggattctggcgtggaatctacatccgacggcctcagggatttgccaagtattgccataagcttatgcggtggtctgagtgatcacagagagattacaaaagacgcttttctggagcaggccgtgagctatcagcagttcgtcgacaaccccgctatcattgatgatccaaatctggttgtaaagatcggatccaagtactacaattggacaaccgctgcccccctgctcctggctatgcaagctttccagaagcctctgcccaaggcaacagtggaatccatcatgagagacaaaatgcccaaaaagggtggccggtggtggtttagctggcgggggcgcaacacaaccattaaggaagaaagcaaacctgaacaatgtttggccggcaaagctcattccacaggcgaacagcctccacagttgtccctggctacacgcgtaaaacacgagtctagcagctcagatgaagagcgggctgccgcgaaaccctctaacgctgggcatctgcctctgctacctaacgtttcatataagaaaaccctgcgcctgacgtctgagcaactcaaatctttaaagcttaagaacgggccgaacgacgtcgttttttccgtgacaactcagtatcaggggacatgccgatgtgagggcactatttacctctggaattgggatgataaggtgatcatctcagacatcgatggcaccatcacaaggtccgatacgctggggcacattctgccgacgttgggcaaggattggacccatcagggaattgcaaaactgtatcataaagtttcacagaacggatacaagtttctctactgcagcgctcgcgccataggaatggccgacatgacaaggggatacctgcactgggtgaacgaaaggggtacagtgctcccacagggccccctgttgctgtctcctagctccctgttttcagcgctgcaccgtgaagtgatagagaaaaaaccagaaaagtttaaggttcagtgcttgaccgatattaagaacctgtttttccccaatactgagcctttttacgctgccttcgggaaccggccagccgatgtgtactcctataagcaggtgggggtgtctctgaaccgcatttttaccgttaacccaaagggcgagttggtgcaggaacatgcaaaaactaatatatcctcatatgttaggttatgcgaggtcgtggatcacgtgtttcctttattgaagcgctcacactcttctgacttcccatgctcggacaccttctctaacttcactttctggagagaaccgcttccacccttcgagaaccaggatatccatagcgctagtgcttag

SEQ ID NO: 93788 - DNA, 87 bp, Artificial Sequence
  derived and/or modified sequence
atgaactacgtgggccagctggccggccaggtgttcgtgaccgtgaaagaactgtacaagggcctcaacccggcaacccttagctag

SEQ ID NO: 93789 - DNA, 2928 bp, Artificial Sequence
  derived and/or modified sequence
atgggcgagcaggacggcatccggagcagcagctgggagaccagccaaggcaaaagttcacccgacagcgcctggtcttggatccctataatgagggatcccggatggatcagaaacgtgtggtcgtcaaacattaacgtccagacaatgaactacgtgggacagttagccggtcaagtctttgtcacagtgaaggaactttacaagggactgaatcccgctacgcttagcggatgtattgacatcatagtcattcgacaaccaaacgggaatcttcaatgcagccccttccacgtgagattcggtaaaatgggggtcctgcggtcgcgcgagaaagtcgtagacatcgagattaacggcgagtctgtggaccttcacatgaagctcggcgataatggagaggcctttttcgtccaggaaactgacaacgaccaggaggtcatccctatgcacctcgcaacaagtcccatattaagtgagggagcatcaagaatggagtgccagctcaagcggggatcagtcgatcgtatgagagggctggacccctctactccagctcaggtcattgcaccatctgagacacctagcagttcaagtgtggtcaagaagcggcgaaaaaggagaaggaaatcccagcttgactccttgaagagggatgacaatatgaatacctcagaagatgaggacatgttccctatcgagatgtcatctgacgaagcaatggaactcctggaatcgtccagaacacttcccaatgacatccccccattccaggacgatatacctgaagagaacctgagcctggctgttatctacccacagagcgcctcctatccaaactccgaccgggagtggagccccactccgagctctctcgtcgactgtaaacgcacagcacctcacttggctgttgctgccgagggagggctgtcttcctcctgccctccccaaagctcactgtttcaccccagcgaatccccttctggcagccgtcctagtaccccaaagtcggacagcgagctggtgtcaaaaagcactgagaggactggccaaaagaacccagaaatgctgtggctgtggggggagctgcctcaagctgcaaaatctagcagcccccataagatgaaagaatcaagccccctctcctcgcgcaagatctgcgataagagtcactttcaggctatccactcagagtcatctgacacgttttctgatcagtcccctacccttgtagggggagccctgctggaccagaacaagccacagactgagatgcaattcgtgaatgaggaagatcttgagaccctcggagccgctgcccctctcttaccaatgatagaggaacttaagccccctagcgcgtccgtggtgcagactgccaacaagaccgactccccaagccggaagcgagacaagaggagcaggcatctgggagcagatggagtgtatttggatgacctaacggacatggaccctgaagtagcagccttgtattttcctaaaaatggtgatccaagtggcctcgccaaacacgcatctgacaacggggcccggtctgctaaccaaagtcctcaaagtgtggggtctagcggagtcgattccggtgtggaaagtacttcagacggtttacgcgacttaccatccatagcgatctccctgtgcggaggtcttagtgaccacagggaaattactaaagatgcctttctggaacaggccgtcagctaccaacaatttgtggacaatcctgccattatcgacgatcccaacctcgtggttaaaatcggctccaagtattacaattggaccactgccgccccactcctcctggctatgcaggcctttcagaagcccctgccaaaagcaactgtggagtccatcatgcgtgataagatgcctaagaaggggggcaggtggtggttctcctggagaggccgcaacactacaattaaggaggagtctaaacccgagcaatgcctggccggaaaagcacactccacaggggagcagccaccccagctttccttagccacccgcgtgaagcatgagagttcctcttcagacgaggagcgcgccgcagccaagcccagtaatgcagggcatctgccgttgctgcccaacgtatcctataaaaagacactgcggctgaccagcgagcagctgaagagcctcaagctgaagaatggccccaatgatgttgtctttagcgtgacgactcaatatcagggtacttgcaggtgcgaggggacgatctatttatggaattgggatgataaggtcatcatatccgacattgatggcaccatcactcgctcagacactctcggccacattttgccaacacttggtaaagattggacccaccaaggtatcgctaaactgtaccacaaggtgagtcagaatggctacaagtttctttactgttctgcgcgagctattggcatggccgacatgacccgaggatacctgcattgggtgaatgagcgcgggaccgtcctcccccaggggcctctgcttctgagcccgagtagcctgttctcggcccttcatagagaagtgattgagaaaaagcccgagaaatttaaagtccaatgcctcaccgacattaagaatctttttttccccaacaccgagccattttacgctgcttttggcaaccgacctgctgatgtgtacagctacaaacaggtgggagtgagcctaaaccgcatcttcacagttaatcccaagggcgagcttgttcaggaacatgccaaaactaatatttcttcctacgtgaggttatgtgaggtggtcgaccatgtctttcctcttctaaagcgtagccactcctctgattttccatgcagtgacacctttagtaactttaccttttggagagaacctctcccaccttttgagaatcaggacatccactctgcatccgcttag

SEQ ID NO: 93790 - DNA, 1863 bp, Artificial Sequence
  derived and/or modified sequence
atgttatggttgtggggagagcttccacaggcagcaaagtcatctagtccccacaagatgaaggagtcatctcctctcagctcccgaaaaatctgtgacaagtcacacttccaagctattcactctgaaagcagtgacaccttctcagatcagagtcctacccttgttggcggtgcactcctggaccaaaacaaacctcaaactgagatgcagtttgtgaatgaggaggatctggagacactgggggcagcagctcccctcctccctatgattgaggagctgaaacctccttctgctagcgtcgtacaaactgctaacaaaaccgacagccccagccgtaagagagacaagcggtctaggcacttgggcgctgatggcgtctacttggatgacctgacagacatggacccagaagtcgccgctctctacttccccaagaacggcgatccctcaggccttgcgaagcacgctagcgacaatggcgcacgctccgcaaaccagagccctcagtccgtaggctcttctggagtggacagtggagtagaatctacgtcagacggccttagggatctgccctccattgcaatttccttgtgtggcggtctgagcgatcaccgggaaatcacaaaagacgcattcctggagcaagcagtctcctaccagcagttcgtggacaatcccgctatcatcgatgacccgaacttggtcgttaagattggatcgaaatactataattggacaaccgcagccccactgcttctggccatgcaggctttccagaaaccacttcccaaagcaactgtagagtctatcatgcgggacaaaatgcccaagaaggggggtcggtggtggttctcttggcgcggacgcaatactacaatcaaagaggaaagcaagccggaacagtgtttagccggaaaggcccacagcaccggcgaacagcctccccagctgagcctggcgacacgcgtcaagcacgagtcatcaagctcagatgaagaaagagcggcagccaaaccctccaacgcgggtcatctgcctttgcttcctaatgttagctacaagaaaacactacgcttgacttcagagcaattaaaatcccttaagcttaaaaacggacccaatgacgtggtattttctgtgacgacccagtaccagggtacctgtaggtgtgagggtaccatctacctgtggaattgggacgacaaggtgatcatttccgatattgacggtactattacacgttctgacaccctgggtcatattctgcccacactcggaaaagactggactcaccagggaatcgctaaactctaccacaaggtcagtcagaacggttataagttcctgtactgtagcgcacgggctattggaatggccgacatgaccaggggttatcttcactgggtgaatgaaaggggtacagtgctaccacagggccctctgttattatctccttcttctcttttctccgcactccacagagaggtaatcgagaagaaacccgagaagtttaaggttcagtgcttgacggatattaagaatctgttcttccctaatacagagccattttacgcagcgttcggtaacaggcctgccgacgtttactcctacaagcaggtgggagtgtcactaaaccgcatctttacagtgaaccccaaaggcgagcttgtgcaggaacacgcaaagactaatatttcctcatacgtgcggctatgcgaagtcgtcgaccatgtattccccctcctgaaacggagccattcttctgacttcccatgttctgatactttttccaacttcaccttttggcgcgaaccactacctccattcgagaaccaggatattcacagcgctagcgcctag

SEQ ID NO: 93791 - DNA, 87 bp, Artificial Sequence
  derived and/or modified sequence
atgaactatgttggccagctggccggtcaggtcttcgtcactgttaaagagttgtacaagggcttgaatccagctaccttgtcctag

SEQ ID NO: 93792 - DNA, 2928 bp, Artificial Sequence
  derived and/or modified sequence
atgggagagcaagatggtattagaagttccagctgggaaacaagccagggaaagagttctcccgacagtgcttggagctggatccccatcatgagagatcctgggtggatcaggaatgtgtggagctcaaatatcaatgtccagacaatgaattacgtcggccagcttgcaggtcaagtgtttgtgactgtgaaagaactgtacaaggggctcaaccccgctacactgtctggatgcattgatattatcgtaatccgacaacctaacggaaatttgcaatgttcccctttccacgtgcgcttcggtaaaatgggagtacttcgatcgcgtgagaaggtcgttgacatagagatcaacggagaaagtgttgatctacacatgaaactcggcgacaatggagaagccttctttgtgcaggagaccgacaatgaccaagaagtaattcctatgcacctggctacctcccccattctaagcgagggcgctagccgcatggaatgccagctcaaacgcggatcagtagaccggatgcgtggattggacccctcaacacctgcgcaggtgatcgccccttcagagacaccctcatcgtcttctgttgtcaaaaagagacgcaaacgcagaagaaagtctcagctcgacagcctgaagagagacgacaacatgaataccagtgaggatgaagacatgttccccatcgagatgtcttctgatgaagctatggaacttctcgaatcaagcaggactctgcccaacgacattccaccttttcaggacgacatacctgaagagaatctctcattagccgttatttatccccagtccgctagctaccccaattcagaccgcgagtggtcacccaccccaagttctttagtggactgtaagcgaaccgcccctcaccttgctgttgctgccgagggcggactgagtagtagttgtccaccccaatccagtctgtttcacccgtccgagtcaccctcaggcagccgaccctctactccaaagagcgacagcgaattggtctctaagtccaccgaaaggactggtcagaaaaatcctgaaatgttgtggctttggggagagttgccccaagccgcaaagagctcttctccgcacaaaatgaaagaaagctcccctctctcgtcacgaaagatctgcgataaaagccatttccaggccattcattctgagtcttcagacactttctctgatcaatcccccactctggtcggtggcgctttgctcgaccagaacaagccccaaaccgaaatgcagttcgttaatgaagaagatctggagacactaggagccgctgcccctcttttgccaatgatcgaggagctgaagcccccatccgcttcagtggtgcaaaccgctaataagacagactctcctagccgcaagcgggataaacggtctcgtcatttaggagccgatggagtttacctggatgaccttaccgatatggaccctgaagtggctgccctgtattttccaaaaaacggcgacccttccggtctagccaagcatgctagtgataatggcgcacgcagtgcaaaccagtctcctcagtctgttggaagctccggagtggactcgggggtcgaaagcacctctgatgggctcagggacctgccatcaattgccatcagcctctgcggaggactcagcgatcaccgagagattactaaagacgcatttttggagcaggccgtaagctaccaacagtttgttgataatccagcaatcatcgatgacccgaatctggtggtcaaaatcggaagtaaatattataattggacaaccgcagctcccctgctgctcgccatgcaggctttccagaagcctctgccaaaagccaccgtcgagagcattatgagggacaaaatgcctaaaaaaggtgggcgatggtggttcagctggcggggtaggaatacgacaattaaggaggaatcaaaaccagaacaatgtctggccggaaaggcgcactcaaccggggaacagccccctcagttgagtttggcaacccgagtgaaacacgaatcttcttcctcggatgaagagcgggcagctgctaagcccagcaatgccggacatctgcctctgcttcccaacgtgtcatacaagaagaccctgcgattaacatccgagcagctgaaaagcttaaagctaaaaaatggcccaaatgatgtggtctttagtgtgacaacacagtatcagggcacatgccgctgcgagggaaccatctatctctggaactgggatgacaaggtgatcattagcgatattgacgggaccatcacgagaagtgacaccctgggtcacattctaccgaccctgggtaaagactggacacaccagggtatcgccaagctctaccacaaggtctctcaaaatggctataaattcctgtactgtagcgctagagcgatcggtatggcagatatgacccggggatacctgcattgggtgaatgagcggggtacagtgctgccgcagggccctctgttactttctccgagtagcctattttccgcgttacacagagaagtgattgagaagaaaccggagaagtttaaagtgcagtgtctgacagacatcaagaacctgttttttcctaatacagaacctttttatgcagcatttggaaatcgccctgccgacgtgtatagttacaaacaggtgggtgtaagcctcaaccgcatcttcactgtgaatccgaaaggcgaattagtccaggagcacgccaaaactaatatttcaagctacgtcagattgtgtgaggtcgtggaccatgtctttcctctgctcaaaaggtcacatagctccgacttcccatgttccgatacattctccaactttaccttctggcgggagccactgccaccttttgaaaatcaggacatccatagcgcctcagcttag

SEQ ID NO: 93793 - DNA, 1863 bp, Artificial Sequence
  derived and/or modified sequence
atgctgtggctgtggggcgagctgccccaggccgccaagagcagcagcccccacaagatgaaggagagcagccccctgagcagcagaaagatctgcgacaagagccacttccaggccatccacagcgagagcagcgacaccttcagcgaccagagccccaccctggtgggcggcgccctgctggaccagaacaagccccagaccgagatgcagttcgtgaacgaggaggacctggagaccctgggcgccgccgcccccctgctgcccatgatcgaggagctgaagccccccagcgccagcgtggtgcagaccgccaacaagaccgacagccccagcagaaagagagacaagagaagcagacacctgggcgccgacggcgtgtacctggacgacctgaccgacatggaccccgaggtggccgccctgtacttccccaagaacggcgaccccagcggcctggccaagcacgccagcgacaacggcgccagaagcgccaaccagagcccccagagcgtgggcagcagcggcgtggacagcggcgtggagagcaccagcgacggcctgagagacctgcccagcatcgccatcagcctgtgcggcggcctgagcgaccacagagagatcaccaaggacgccttcctggagcaggccgtgagctaccagcagttcgtggacaaccccgccatcatcgacgaccccaacctggtggtgaagatcggcagcaagtactacaactggaccaccgccgcccccctgctgctggccatgcaggccttccagaagcccctgcccaaggccaccgtggagagcatcatgagagacaagatgcccaagaagggcggcagatggtggttcagctggagaggcagaaacaccaccatcaaggaggagagcaagcccgagcagtgcctggccggcaaggcccacagcaccggcgagcagcccccccagctgagcctggccaccagagtgaagcacgagagcagcagcagcgacgaggagagagccgccgccaagcccagcaacgccggccacctgcccctgctgcccaacgtgagctacaagaagaccctgagactgaccagcgagcagctgaagagcctgaagctgaagaacggccccaacgacgtggtgttcagcgtgaccacccagtaccagggcacctgcagatgcgagggcaccatctacctgtggaactgggacgacaaggtgatcatcagcgacatcgacggcaccatcaccagaagcgacaccctgggccacatcctgcccaccctgggcaaggactggacccaccagggcatcgccaagctgtaccacaaggtgagccagaacggctacaagttcctgtactgcagcgccagagccatcggcatggccgacatgaccagaggctacctgcactgggtgaacgagagaggcaccgtgctgccccagggccccctgctgctgagccccagcagcctgttcagcgccctgcacagagaggtgatcgagaagaagcccgagaagttcaaggtgcagtgcctgaccgacatcaagaacctgttcttccccaacaccgagcccttctacgccgccttcggcaacagacccgccgacgtgtacagctacaagcaggtgggcgtgagcctgaacagaatcttcaccgtgaaccccaagggcgagctggtgcaggagcacgccaagaccaacatcagcagctacgtgagactgtgcgaggtggtggaccacgtgttccccctgctgaagagaagccacagcagcgacttcccctgcagcgacaccttcagcaacttcaccttctggagagagcccctgccccccttcgagaaccaggacatccacagcgccagcgcctag

SEQ ID NO: 93794 - DNA, 87 bp, Artificial Sequence
  derived and/or modified sequence
atgaactacgtgggccagctggccggccaggtgttcgtgaccgtgaaggagctgtacaagggcctgaaccccgccaccctgagctag

SEQ ID NO: 93795 - DNA, 2928 bp, Artificial Sequence
  derived and/or modified sequence
atgggcgagcaggacggcatcagaagcagcagctgggagaccagccagggcaagagcagccccgacagcgcctggagctggatccccatcatgagagaccccggctggatcagaaacgtgtggagcagcaacatcaacgtgcagaccatgaactacgtgggccagctggccggccaggtgttcgtgaccgtgaaggagctgtacaagggcctgaaccccgccaccctgagcggctgcatcgacatcatcgtgatcagacagcccaacggcaacctgcagtgcagccccttccacgtgagattcggcaagatgggcgtgctgagaagcagagagaaggtggtggacatcgagatcaacggcgagagcgtggacctgcacatgaagctgggcgacaacggcgaggccttcttcgtgcaggagaccgacaacgaccaggaggtgatccccatgcacctggccaccagccccatcctgagcgagggcgccagcagaatggagtgccagctgaagagaggcagcgtggacagaatgagaggcctggaccccagcacccccgcccaggtgatcgcccccagcgagacccccagcagcagcagcgtggtgaagaagagaagaaagagaagaagaaagagccagctggacagcctgaagagagacgacaacatgaacaccagcgaggacgaggacatgttccccatcgagatgagcagcgacgaggccatggagctgctggagagcagcagaaccctgcccaacgacatcccccccttccaggacgacatccccgaggagaacctgagcctggccgtgatctacccccagagcgccagctaccccaacagcgacagagagtggagccccacccccagcagcctggtggactgcaagagaaccgccccccacctggccgtggccgccgagggcggcctgagcagcagctgccccccccagagcagcctgttccaccccagcgagagccccagcggcagcagacccagcacccccaagagcgacagcgagctggtgagcaagagcaccgagagaaccggccagaagaaccccgagatgctgtggctgtggggcgagctgccccaggccgccaagagcagcagcccccacaagatgaaggagagcagccccctgagcagcagaaagatctgcgacaagagccacttccaggccatccacagcgagagcagcgacaccttcagcgaccagagccccaccctggtgggcggcgccctgctggaccagaacaagccccagaccgagatgcagttcgtgaacgaggaggacctggagaccctgggcgccgccgcccccctgctgcccatgatcgaggagctgaagccccccagcgccagcgtggtgcagaccgccaacaagaccgacagccccagcagaaagagagacaagagaagcagacacctgggcgccgacggcgtgtacctggacgacctgaccgacatggaccccgaggtggccgccctgtacttccccaagaacggcgaccccagcggcctggccaagcacgccagcgacaacggcgccagaagcgccaaccagagcccccagagcgtgggcagcagcggcgtggacagcggcgtggagagcaccagcgacggcctgagagacctgcccagcatcgccatcagcctgtgcggcggcctgagcgaccacagagagatcaccaaggacgccttcctggagcaggccgtgagctaccagcagttcgtggacaaccccgccatcatcgacgaccccaacctggtggtgaagatcggcagcaagtactacaactggaccaccgccgcccccctgctgctggccatgcaggccttccagaagcccctgcccaaggccaccgtggagagcatcatgagagacaagatgcccaagaagggcggcagatggtggttcagctggagaggcagaaacaccaccatcaaggaggagagcaagcccgagcagtgcctggccggcaaggcccacagcaccggcgagcagcccccccagctgagcctggccaccagagtgaagcacgagagcagcagcagcgacgaggagagagccgccgccaagcccagcaacgccggccacctgcccctgctgcccaacgtgagctacaagaagaccctgagactgaccagcgagcagctgaagagcctgaagctgaagaacggccccaacgacgtggtgttcagcgtgaccacccagtaccagggcacctgcagatgcgagggcaccatctacctgtggaactgggacgacaaggtgatcatcagcgacatcgacggcaccatcaccagaagcgacaccctgggccacatcctgcccaccctgggcaaggactggacccaccagggcatcgccaagctgtaccacaaggtgagccagaacggctacaagttcctgtactgcagcgccagagccatcggcatggccgacatgaccagaggctacctgcactgggtgaacgagagaggcaccgtgctgccccagggccccctgctgctgagccccagcagcctgttcagcgccctgcacagagaggtgatcgagaagaagcccgagaagttcaaggtgcagtgcctgaccgacatcaagaacctgttcttccccaacaccgagcccttctacgccgccttcggcaacagacccgccgacgtgtacagctacaagcaggtgggcgtgagcctgaacagaatcttcaccgtgaaccccaagggcgagctggtgcaggagcacgccaagaccaacatcagcagctacgtgagactgtgcgaggtggtggaccacgtgttccccctgctgaagagaagccacagcagcgacttcccctgcagcgacaccttcagcaacttcaccttctggagagagcccctgccccccttcgagaaccaggacatccacagcgccagcgcctag

SEQ ID NO: 93796 - protein, 459 aa, Artificial Sequence
  derived and/or modified sequence
MSRVQTMNYVGQLAGQVFVTVKELYKGLNPATLSGCIDIIVIRQPNGNLQCSPFHVRFGKMGVLRSREKVVDIEINGESVDLHMKLGDNGEAFFVQETDNDQEVIPMHLATSPILSEGASRMECQLKRGSVDRMRGLDPSTPAQVIAPSETPSSSSVVKKRRKRRRKSQLDSLKRDDNMNTSEDEDMFPIEMSSDEAMELLESSRTLPNDIPPFQDDIPEENLSLAVIYPQSASYPNSDREWSPTPSSLVDCKRTAPHLAVAAEGGLSSSCPPQSSLFHPSESPSGSRPSTPKSDSELVSKSTERTGQKNPEMLWLWGELPQAAKSSSPHKMKESSPLSSRKICDKSHFQAIHSESSDTFSDQSPTLVGGALLDQNKPQTEMQFVNEEDLETLGAAAPLLPMIEELKPPSASVVQTANKTDSPSRKRDKRSRHLGADGVYLDDLTDMDPEVAALYFPKK

SEQ ID NO: 93797 - DNA, 291 bp, Artificial Sequence
  derived and/or modified sequence
atgaattacgtagggcagctcgccgggcaggtgtttgtgaccgtcaaagagctttataaaggccttaaccccgccaccctgagcgggtgcatcgatatcatcgtaattaggcaacctaatggaaacctacaatgttccccattccatgtgaggttcggaaagatgggagtacttcgttcacgagagaaggtcgttgacattgagattaatggagaatctgttgacctccacatgaagttgggcgacaacggagaagccttcttcgtccaagaaactgacaacgatcagtag

SEQ ID NO: 93798 - DNA, 1380 bp, Artificial Sequence
  derived and/or modified sequence
atgtcgagggtgcagaccatgaactacgtcggacagctggcaggtcaggtgttcgttacggtgaaagaactgtacaaaggtcttaatccagccactttgtcaggttgcattgacatcattgtcattcgccagcccaacggcaacctgcagtgctctccgtttcacgtgcgtttcggcaagatgggggtgctgcggtccagggaaaaagtagtcgacatcgagattaacggggagagcgtggatctgcacatgaagctgggcgataatggcgaggctttctttgtccaagaaaccgacaacgatcaagaggtgattcccatgcacttggcaaccagtccaatcttgtctgaaggtgcgagtcgtatggagtgccagctcaagagaggctcagtggatcgtatgagaggcctggaccctagtacacctgcccaggtgattgccccctctgaaacccccagcagcagctccgttgtgaaaaagaggcgtaagaggaggaggaaaagccagttggactccctaaaaagagatgacaatatgaatacgtcggaagacgaggatatgtttccaatcgagatgagctcagatgaggccatggagttgctggagagctcgcgtacactgccaaacgacattccaccttttcaagatgatatccccgaagagaacctcagtctggccgttatttacccccagtccgcgagctaccccaactctgaccgagaatggtcccccacgccctctagcctggtggactgtaagcggacagcaccccacttggcagtggctgctgagggcggcctgtccagttcttgtcctccccaatctagccttttccacccttcagagtcgcctagcggcagccggccaagtacccccaaatcagactccgaattagtgagcaagtcgacggagcgaacagggcagaagaatccggagatgttatggctgtggggcgagctcccacaggcagcaaaaagctcctcaccacacaaaatgaaagagagtagccccctgagcagtcgcaagatctgtgataaaagccatttccaagccatacactcggagagtagcgatacgttctctgatcaatccccgactctcgtggggggcgccttactagaccagaataaaccccagacagaaatgcagttcgtcaacgaagaggatctcgagaccctgggtgccgccgccccattattaccaatgatcgaggaattgaaacccccaagtgcaagcgtggtccagactgccaacaaaacagactcaccaagcaggaagcgggacaagcgaagccggcacctgggggcagatggggtgtaccttgacgacctgaccgacatggacccggaggtggccgcactgtacttcccaaaaaagtag

SEQ ID NO: 93799 - DNA, 291 bp, Artificial Sequence
  derived and/or modified sequence
atgaactacgtgggccagctggccggccaggtgtttgtgacagtgaaggagctgtacaagggcctgaacccagccaccctgagcggctgcatcgacatcatcgtcatccggcagcccaacggcaacctgcagtgcagccccttccacgtgcgctttgggaagatgggcgtgctgcggagccgggagaaggtggtggacatcgagatcaacggggagagcgtggacctgcacatgaagctgggggacaatggagaggccttctttgtgcaggagacagacaatgaccagtag

SEQ ID NO: 93800 - DNA, 1380 bp, Artificial Sequence
  derived and/or modified sequence
atgagccgggtgcagaccatgaactacgtgggccagctggccggccaggtgtttgtgacagtgaaggagctgtacaagggcctgaacccagccaccctgagcggctgcatcgacatcatcgtcatccggcagcccaacggcaacctgcagtgcagccccttccacgtgcgctttgggaagatgggcgtgctgcggagccgggagaaggtggtggacatcgagatcaacggggagagcgtggacctgcacatgaagctgggggacaatggagaggccttctttgtgcaggagacagacaatgaccaggaggtgatccccatgcacctggccaccagccccatcctgtctgagggcgccagcaggatggagtgccagctgaagaggggctctgtggacaggatgaggggcctggaccccagcaccccagcccaggtgattgcccccagcgagacccccagcagcagctctgtggtgaagaagaggaggaagagaagaaggaagagccagctggacagcctgaagagagatgacaacatgaacaccagtgaagatgaggacatgttccccatcgagatgagcagtgatgaggccatggagctgctggagagcagcaggaccctgcccaatgacatcccccccttccaggatgacatccctgaggagaacctgagcctggccgtcatctacccccagagcgccagctaccccaacagcgaccgggagtggagccccacccccagcagcctggtggactgcaagaggacagccccccacctggccgtggccgctgagggcggcctgagcagcagctgccccccccagagcagcctcttccaccccagcgagagccccagcggcagccggcccagcacccccaagagtgacagcgagctggtgtccaagagcacagagaggacaggccagaagaaccctgagatgctgtggctgtggggcgagctgccccaggccgccaagagcagcagcccccacaagatgaaggagagcagccccctgagcagcaggaagatctgtgacaagagccacttccaggccatccacagcgagagcagtgacaccttcagtgaccagagccccaccctggtgggcggggccctgctggaccagaacaagccccagacagagatgcagtttgtgaatgaggaggacctggagaccctgggcgccgccgcccccctgctgcccatgattgaggagctgaagccacccagcgcctctgtggtgcagacagccaacaagacagacagccccagcaggaagagggacaagaggagccgccacctgggcgcagatggagtgtacctggatgacctgacagacatggaccctgaggtggccgccctgtacttccccaagaagtag

SEQ ID NO: 93801 - DNA, 599 bp, Artificial Sequence
  derived and/or modified sequence
gtttgcaatacaaaggcggccacgcgcggcgccgctcgtatttgcaaccacgtggcttcacgagtccgccaaaccatcaggtgaataaacgggagaggagaagagagtctaggactcagccctggagtataagtcagagctggaaaagaagaggctccagagactggacggccactgagaggtgccacgtccctgaagggcctgaggagggttgatggcatgaccccatgaagcccagcaaggagtggagagaggagggctggaggactcccgcctgccatgacccagtccagggataagatgtgcagaccatgaattacgtggggcagttagccggccaggtgtttgtcaccgtgaaggagctctacaaggggctgaatcccgccacactctcagggtgcattgacatcattgtcatccgccagcccaatggaaacctccaatgctcccctttccacgtccgctttgggaagatgggggtcctgcgctcccgagagaaagtggttgacatagaaatcaatggggaatctgtggatttgcatatgaaattgggagataatggagaagcattttttgttcaagaaacagataatgatcag

SEQ ID NO: 93802 - DNA, 1761 bp, Artificial Sequence
  derived and/or modified sequence
agcaagctggagagggagagaggatgggaggcgaggaggcagcctgagggaaggaacaggagggaagagagatgaagggcaagaccggggccagccatgcctgtcctaacagcagccacccagcagtggcccagcctgctgagaactagaaaatcagaagaaaaaggagaatccaccaggagacccaggttcgcatgagcaggggcctttatctgaagttaatggaagctgagccaggtcctgacaatgtgccttctgatggggagatgagactttcctctgaaagctaaggtaactctgaagcgtgagctgccagaattcaaggccacctgcttaacagaagacaactagaaacctcatccatgagcagagtgcagaccatgaattacgtggggcagttagccggccaggtgtttgtcaccgtgaaggagctctacaaggggctgaatcccgccacactctcagggtgcattgacatcattgtcatccgccagcccaatggaaacctccaatgctcccctttccacgtccgctttgggaagatgggggtcctgcgctcccgagagaaagtggttgacatagaaatcaatggggaatctgtggatttgcatatgaaattgggagataatggagaagcattttttgttcaagaaacagataatgatcaggaagttatccctatgcacctggccacctcccccatcctgtcagaaggagcttcgagaatggaatgccagctgaaaaggggctctgtggacaggatgagaggcctggaccccagcacgccagcccaagtgatcgctcccagcgagacgccgtcaagcagctctgtagtaaagaagagaagaaaaaggaggagaaagtcacagctggacagcctgaagagagatgacaacatgaacacatctgaggatgaggacatgttccccatcgagatgagctcggatgaggccatggagctgctggagagcagcagaactcttcctaatgatatacctccattccaagatgatattcctgaggaaaacctctccctggctgtgatttaccctcagtcagcctcataccctaattcggatagagagtggtcacccactcccagtagcctggtagattgcaaaaggactgcccctcatcttgcagttgcggccgagggaggtctgtctagttcttgccctccacagtcttccctgttccatccttcggaaagtccttccggttcccgaccttcaacacctaaaagtgattcagaattggtcagcaagtccacggaaaggacagggcagaagaacccagaaatgctttggctgtggggagagctgccgcaggctgctaagtcttcttctccacacaagatgaaagagtccagcccattgagcagtagaaaaatttgtgataaaagtcactttcaggccattcacagcgaatcttcagacacttttagtgaccaatcgccaactctggtcggtggggcacttttggaccagaacaagcctcagacagaaatgcagtttgtgaatgaagaagacctggagaccttaggagcagcagcgccactcttgcccatgatcgaggagctcaaacccccctctgccagtgtagtccagacagcaaacaagacggattctccttccaggaaaagagataaacgaagccgacatcttggtgctgacggcgtctacttggatgacctcacagacatggatcctgaagtggcggccctgtattttcccaaaaagtaaaattcctgttaattcctca

SEQ ID NO: 93803 - DNA, 291 bp, Artificial Sequence
  derived and/or modified sequence
atgaactacgtgggccagctggccggccaggtgttcgtgaccgtgaaagagctctataaaggcctgaaccccgccactctttccggctgcattgacattatcgttattagacagcccaacgggaatctgcaatgttcacccttccatgtacggttcggcaagatgggtgtgctcagaagccgcgagaaggtggtagatatcgagatcaacggggaatccgtcgacctgcatatgaagctgggggacaacggcgaagcctttttcgtacaggaaacggacaatgaccagtag

SEQ ID NO: 93804 - DNA, 1380 bp, Artificial Sequence
  derived and/or modified sequence
atgagccgggtgcagaccatgaactacgtgggccagctggccggccaggtcttcgtcaccgtgaaagaattgtataagggccttaatccggcgacactgtctggctgtatcgatattatcgtaattcgtcagcccaatgggaacttgcagtgctcccccttccatgtgaggttcggcaaaatgggagtgctcaggtccagagagaaggtggttgatatagaaatcaatggggaatcagtggacttgcacatgaaactgggggacaatggcgaggctttttttgtccaggaaaccgacaacgatcaggaagtcattccgatgcacttggcaacctctcctatcctcagtgaaggggccagccgaatggagtgtcagctgaaacggggcagtgtagacagaatgagaggattggacccaagcacgccggcgcaagtcatcgcaccttctgagacgccctccagctctagtgtggtcaaaaagaggaggaagcgcagaagaaagagccaactggactccttaaagcgcgacgacaacatgaacacatcagaagacgaagacatgttcccaatcgaaatgtcaagcgatgaggctatggaactgctggagagtagcaggaccctgcccaatgacataccgccatttcaagatgacattcccgaggaaaatcttagcctggcggtgatttacccacaaagtgcaagctatccaaatagcgatagggagtggagcccaacacctagcagtctcgtggattgcaagagaactgctcctcacctggcagtagcggctgagggcggactttcctcgagctgtcctcctcagtcaagcctgtttcacccttcagagtctccctctgggtcccgaccttcgaccccaaaatcagacagcgagctggtttctaagtccacagagcgtacgggacagaagaaccccgaaatgttatggctatggggcgaacttcctcaggcagctaaaagttccagtccacacaaaatgaaagagagctccccccttagcagccgcaaaatttgcgacaagagtcacttccaagccatccactctgagtcctctgacacctttagcgatcagtctcctaccttagtaggcggagccttgttggatcagaataagccacagaccgagatgcagttcgtaaatgaagaagatctcgagacgctgggtgctgcagcacctctgctgcccatgattgaagagctaaaaccccccagcgccagcgtggtgcagaccgctaataaaactgattcacccagtaggaaacgagataagaggtctaggcacctcggtgccgatggagtgtatctagatgatctaactgacatggaccctgaggttgcagcattatatttccccaaaaagtag

SEQ ID NO: 93805 - DNA, 291 bp, Artificial Sequence
  derived and/or modified sequence
atgaattacgtggggcaactcgcaggccaagtgttcgtaactgtcaaggagctttacaaaggtttaaacccggctactcttagcggttgtattgacattatcgtcattcgccagcctaacggaaacctgcagtgtagtccctttcacgttagatttgggaagatgggcgtgttacgtagccgggagaaggtcgtggatattgagattaacggagagagcgttgacttgcatatgaaactgggcgataacggcgaggctttcttcgttcaggaaacagacaacgaccagtag

SEQ ID NO: 93806 - DNA, 1380 bp, Artificial Sequence
  derived and/or modified sequence
atgtcccgcgtccagaccatgaactatgtgggccagctggccggtcaggtcttcgtcacagtgaaggaactgtataaaggcctgaacccagccacccttagcgggtgcatcgatatcattgtgatacggcagcccaacgggaatttgcaatgcagtccattccatgtgcgcttcgggaaaatgggcgttctgcgctccagagagaaggtggttgacatcgagatcaacggtgagtctgtggacctccacatgaagttaggtgacaacggagaagctttctttgttcaggagacagacaatgatcaagaggtgatcccaatgcatctggccacttcccccatcctctccgaaggagcctcccgcatggagtgccagctaaaacgaggttctgtcgaccggatgcgtgggctggatcccagcacccctgctcaagtgattgccccaagcgaaacaccctcgtcttctagcgttgtaaagaagaggcggaagagacggcgtaagtcccagttggattccctgaagagggatgacaatatgaataccagcgaggacgaggacatgttccctattgagatgagcagcgacgaagccatggaattattagagagctcgcgcaccctccccaacgatatccccccatttcaggacgatattccagaggagaatctatccttagctgtcatctatccccagagtgcctcctaccctaactccgatcgggagtggtcaccaacaccttcttctctggtcgactgtaagcggacggcacctcaccttgcagtcgccgctgagggaggcctttcctcttcttgtccaccacagagttctttattccacccctctgaatctccctcaggttccaggccatcgactccgaaatccgattccgagctcgtttctaagtccactgagcgtacagggcagaagaatcctgagatgctgtggctctggggtgaactgccccaggcggctaagtccagctccccgcataagatgaaggagtcttccccattgtcttctcgcaagatttgcgacaagtcccattttcaagcgattcacagtgagagcagtgataccttctctgatcaaagtcctacactggttggcggtgcccttctggaccaaaataagccacaaaccgagatgcagtttgttaacgaagaggacctggaaacacttggcgctgccgcaccactgctgcccatgatcgaagagctgaagcccccttccgcatctgtggtgcagactgctaacaaaacagatagcccctcaagaaagcgagacaagcgtagtagacacctgggtgccgatggagtgtatctggatgatctcactgatatggacccggaagttgctgccttgtacttccccaagaagtag

SEQ ID NO: 93807 - DNA, 291 bp, Artificial Sequence
  derived and/or modified sequence
atgaactacgtgggccagctggccggccaggtgttcgtgaccgtgaaggagctgtacaagggcctgaaccccgccaccctgagcggctgcatcgacatcatcgtgatcagacagcccaacggcaacctgcagtgcagccccttccacgtgagattcggcaagatgggcgtgctgagaagcagagagaaggtggtggacatcgagatcaacggcgagagcgtggacctgcacatgaagctgggcgacaacggcgaggccttcttcgtgcaggagaccgacaacgaccagtag

SEQ ID NO: 93808 - DNA, 1380 bp, Artificial Sequence
  derived and/or modified sequence
atgagcagagtgcagaccatgaactacgtgggccagctggccggccaggtgttcgtgaccgtgaaggagctgtacaagggcctgaaccccgccaccctgagcggctgcatcgacatcatcgtgatcagacagcccaacggcaacctgcagtgcagccccttccacgtgagattcggcaagatgggcgtgctgagaagcagagagaaggtggtggacatcgagatcaacggcgagagcgtggacctgcacatgaagctgggcgacaacggcgaggccttcttcgtgcaggagaccgacaacgaccaggaggtgatccccatgcacctggccaccagccccatcctgagcgagggcgccagcagaatggagtgccagctgaagagaggcagcgtggacagaatgagaggcctggaccccagcacccccgcccaggtgatcgcccccagcgagacccccagcagcagcagcgtggtgaagaagagaagaaagagaagaagaaagagccagctggacagcctgaagagagacgacaacatgaacaccagcgaggacgaggacatgttccccatcgagatgagcagcgacgaggccatggagctgctggagagcagcagaaccctgcccaacgacatcccccccttccaggacgacatccccgaggagaacctgagcctggccgtgatctacccccagagcgccagctaccccaacagcgacagagagtggagccccacccccagcagcctggtggactgcaagagaaccgccccccacctggccgtggccgccgagggcggcctgagcagcagctgccccccccagagcagcctgttccaccccagcgagagccccagcggcagcagacccagcacccccaagagcgacagcgagctggtgagcaagagcaccgagagaaccggccagaagaaccccgagatgctgtggctgtggggcgagctgccccaggccgccaagagcagcagcccccacaagatgaaggagagcagccccctgagcagcagaaagatctgcgacaagagccacttccaggccatccacagcgagagcagcgacaccttcagcgaccagagccccaccctggtgggcggcgccctgctggaccagaacaagccccagaccgagatgcagttcgtgaacgaggaggacctggagaccctgggcgccgccgcccccctgctgcccatgatcgaggagctgaagccccccagcgccagcgtggtgcagaccgccaacaagaccgacagccccagcagaaagagagacaagagaagcagacacctgggcgccgacggcgtgtacctggacgacctgaccgacatggaccccgaggtggccgccctgtacttccccaagaagtag

SEQ ID NO: 93809 - protein, 429 aa, Artificial Sequence
  derived and/or modified sequence
MGQELCAKTVQPGCSCYHCSEGGEAHSCRRSQPETTEAAFKLTDLKEASCSMTSFHPRGLQAARAQKFKSKRPRSNSDCFQEEDLRQGFQWRKSLPFGAASSYLNLEKLGEGSYATVYKGISRINGQLVALKVISMNAEEGVPFTAIREASLLKGLKHANIVLLHDIIHTKETLTFVFEYMHTDLAQYMSQHPGGLHPHNVRLFMFQLLRGLAYIHHQHVLHRDLKPQNLLISHLGELKLADFGLARAKSIPSQTYSSEVVTLWYRPPDALLGATEYSSELDIWGAGCIFIEMFQGQPLFPGVSNILEQLEKIWEVLGVPTEDTWPGVSKLPNYNPEWFPLPTPRSLHVVWNRLGRVPEAEDLASQMLKGFPRDRVSAQEALVHDYFSALPSQLYQLPDVSGVRLKPEMCDLLASYQKGHHPAQFSKCW

SEQ ID NO: 93810 - DNA, 1290 bp, Artificial Sequence
  derived and/or modified sequence
atgggccaggagctgtgcgccaagaccgtgcagcccggctgcagctgctaccactgcagcgagggcggcgaggcccacagctgcagaagaagccagcccgagaccaccgaggccgccttcaagctgaccgacctgaaggaggccagctgcagcatgaccagcttccaccccagaggcctgcaggccgccagagcccagaagttcaagagcaagagacccagaagcaacagcgactgcttccaggaggaggacctgagacagggcttccagtggagaaagagcctgcccttcggcgccgccagcagctacctgaacctggagaagctgggcgagggcagctacgccaccgtgtacaagggcatcagcagaatcaacggccagctggtggccctgaaggtgatcagcatgaacgccgaggagggcgtgcccttcaccgccatcagagaggccagcctgctgaagggcctgaagcacgccaacatcgtgctgctgcacgacatcatccacaccaaggagaccctgaccttcgtgttcgagtacatgcacaccgacctggcccagtacatgagccagcaccccggcggcctgcacccccacaacgtgagactgttcatgttccagctgctgagaggcctggcctacatccaccaccagcacgtgctgcacagagacctgaagccccagaacctgctgatcagccacctgggcgagctgaagctggccgacttcggcctggccagagccaagagcatccccagccagacctacagcagcgaggtggtgaccctgtggtacagaccccccgacgccctgctgggcgccaccgagtacagcagcgagctggacatctggggcgccggctgcatcttcatcgagatgttccagggccagcccctgttccccggcgtgagcaacatcctggagcagctggagaagatctgggaggtgctgggcgtgcccaccgaggacacctggcccggcgtgagcaagctgcccaactacaaccccgagtggttccccctgcccacccccagaagcctgcacgtggtgtggaacagactgggcagagtgcccgaggccgaggacctggccagccagatgctgaagggcttccccagagacagagtgagcgcccaggaggccctggtgcacgactacttcagcgccctgcccagccagctgtaccagctgcccgacgtgagcggcgtgagactgaagcccgagatgtgcgacctgctggccagctaccagaagggccaccaccccgcccagttcagcaagtgctggtag

SEQ ID NO: 93811 - DNA, 3659 bp, Artificial Sequence
  derived and/or modified sequence
ctctggcaaaaagggagagaacaaggataggagaggcagtgggggaaaggttcaagtgcgggttttctccttgaacctacaagattatgggtcaagagctgtgtgcaaagactgtacagcctggatgcagctgctaccattgttcagagggaggcgaggcacacagctgtcggaggagtcagcctgagaccacggaggctgcgttcaagctaacagacctaaaagaagcatcatgttccatgacttcatttcaccccaggggacttcaagctgcccgtgcccagaagttcaagagtaaaaggccacggagtaacagtgattgttttcaggaagaggatctgaggcagggttttcagtggaggaagagcctcccttttggggcagcctcatcttacttgaacttggagaagctgggtgaaggctcttatgcgacagtttacaaggggattagcagaataaatggacaactagtggctttaaaagtcatcagcatgaatgcagaggaaggagtcccatttacagctatccgagaagcttctctcctgaagggtttgaaacatgccaatattgtgctcctgcatgacataatccacaccaaagagacactgacattcgtttttgaatacatgcacacagacctggcccagtatatgtctcagcatccaggagggcttcatcctcataatgtcagacttttcatgtttcaacttttgcggggcctggcgtacatccaccaccaacacgttcttcacagggacctgaaacctcagaacttactcatcagtcacctgggagagctcaaactggctgattttggtcttgcccgggccaagtccattcccagccagacatactcttcagaagtcgtgaccctctggtaccggccccctgatgctttgctgggagccactgaatattcctctgagctggacatatggggtgcaggctgcatctttattgaaatgttccagggtcaacctttgtttcctggggtttccaacatccttgaacagctggagaaaatctgggaggtgctgggagtccctacagaggatacttggccgggagtctccaagctacctaactacaatccagaatggttcccactgcctacgcctcgaagccttcatgttgtctggaacaggctgggcagggttcctgaagctgaagacctggcctcccagatgctaaaaggctttcccagagaccgcgtctccgcccaggaagcacttgttcatgattatttcagcgccctgccatctcagctgtaccagcttcctgatgtttcaggagtgaggctaaagccagaaatgtgtgaccttttggcctcctaccagaaaggtcaccacccagcccagtttagcaaatgctggtgaaaagaaagggcgagatcaccaaggttcttccagggctgtatttctgcagtttcggttttcatttgcttcagcttactaagaagcttcaaatctaactccatactgaacaaggggctttatgtcctcacctatgacctggaatagtttaaatatggtgttcaaggcaatagtacataatagtggaagaaaattcagtggaaggttattgctattgtcatttgcatagaatttaagtgattgatttaaaaaaactggacataaactaagtctaagaagagggcttctgaataacttcattcattttggcatttgttaagagattcctgggctagaaggttgatttcccaaaaagacagataagagactgacaatttaaaagaatctggagacagagctggtgcttacagagacctgccactcctgtgttcacttacaatttctcccaacaaaaggatttctgtggcaaggagaaaactagcctaaagtttagaaaaagatggtttcttggataacattgttaacaaaaggacttcctgaggactatttattattattttgtagggggcacttcctccttcactaaactggattatcagaacgtattaccacccaacccatattttagaagtttggatttggctgctgattagaaatgaatttcaggctatctcctcctactgaatcttaattgtctgtgatgatggcaacagtgatggggaatctaagcgctggtttgatggtggagatattgaataagtagttgggagcagagttccaaagatgtaatttaagccctgttgcaccaccacacacacacacacacacacacacacacacacacacacacccctcaagtaaaatgagagatctgtcttagctaacacgtgtgccgttttatacaatgactccttctaaaagcagccagggaaactcaaatcgcttctgtccagggatcatctcaggaaatgtagcagcctagaaaccagagacctctgtatatcctttggaagagcaaggaggaactaattaagagataattaaaaaatagtaactatcccccaatgtctgagatggaaaaaggaaaaagacacatgggtagcccaaatcaacctgcctgagtaagtatctgattttagtaaggcatttgacaaagactgtccagctatacctgaaagatgaaacagtgtaggctgggtgatggagcagatatatgtactcaaatcatggtgtttatttaacccagagaaaggccagccgtggtgtgctacaaggttcagtcttgagtcctattctggtcaaatatttttattaattactcgaataaatcagagtacatggacaactttatacaactccttgaagtaagtactattattattaatttatgacttccatttcacaaaagaggagactgaggctcagtgaagttaggtaactccttcatagtagcatgccagagtgaagatgcaaacctcagacctggttctccaatgttcctgacacctatcgaatttagagaatacacaactcttgcagaggcagctgctatttagtattggatcatgattcaaaagacaccttgctagaagccaatgaacagcaggccaaaacaacacttacttgcatcaaatttcatctgacttaaattcttacactttgggctacaacttaaaaaaggctatgacttagtggaaattggcacttttaagtacaatatgaattaatagtataatttcgctgtcccccagagataatgctagtaccaatcgaaagctcagggatgctactgttgacgcatcagcaagagttcttgagcagttttacctgtccatcaatacaaagagttcccacaacagtagtgggattcctctgcctctctgaagatatgagagctataggagggattcccatgttggaggttagaagagctgacctccaatgtcccgtctaattccaagattctccaataatgactttggaacagctgtgtacagattatacttggaattatgcttagatactattgctgcaggaatgaatagacaaattttgttattaaaaaattgattttattaagtggaagttgacagaattatcctctttataatggaggaacattatgcttatgcatatgcatataccttatgcatatgattatgcttgtgcttccttctttaatggatttacctattcaaaagcttaataaatgttataagactctaaaacatttaaatctttcatttctcaattttatcaaataaacattcctggaatttgtgcata

SEQ ID NO: 93812 - DNA, 1290 bp, Artificial Sequence
  derived and/or modified sequence
atgggtcaggaattatgtgctaagacagttcagcccggatgctcctgctatcattgttcagaagggggtgaggcgcactcgtgtcgtagaagccaacccgaaacgacagaggcagcgtttaaactaaccgatttaaaggaggcctcctgtagcatgacttcgtttcatcccagaggcttacaggccgctcgggcccagaaatttaagagtaaaagaccaagatctaactctgactgtttccaggaggaagaccttagacaaggtttccagtggagaaagagcctgccgtttggcgcagcttcatcgtacctgaatctggaaaagcttggggagggatcttacgccacagtgtacaagggaataagtcgcatcaatgggcagttggttgccctcaaagtgattagtatgaatgctgaagagggcgtacccttcacggctatcagagaagccagcctcttgaaaggtctcaagcatgccaacatagtgctgctgcacgatatcatacacactaaggaaactcttaccttcgtatttgaatacatgcataccgacttggctcaatatatgtctcaacatccaggcggtcttcacccacataacgttcgactgttcatgttccagcttctcaggggtcttgcctacatacaccatcaacacgtgttgcaccgggatttaaagcctcagaacctcctgatcagtcatttgggggagcttaagctggccgacttcgggctagcccgcgccaaaagtatcccttcacaaacctatagtagtgaggtagtgactttatggtacaggcctcccgacgctctgttaggcgccacagagtattcctccgagctggatatctggggtgcagggtgcatcttcatcgagatgttccagggtcagccactattccccggtgtgagtaatattctcgagcagctcgagaagatctgggaagtgctcggggttcccacagaggacacatggcctggcgtgagtaagctccctaattataacccagaatggttccctctgccaactcccagatccctgcacgtggtgtggaataggctgggtcgagttccagaagcagaggatttggcgtcacagatgctcaaaggattccctcgagatcgcgtgtcggctcaggaagcattggtgcacgactattttagtgcactccccagccagttataccagctccccgacgtcagcggtgttaggctgaaaccggagatgtgcgacttactggcatcgtaccagaaaggacaccacccagcacagttctctaaatgttggtag

SEQ ID NO: 93813 - DNA, 1290 bp, Artificial Sequence
  derived and/or modified sequence
atgggccaggagctgtgtgccaagacagtgcagcccggctgcagctgctaccactgcagcgagggcggggaggcccacagctgcagaagaagccagcctgagaccacagaggccgccttcaagctgacagacctgaaggaggccagctgcagcatgaccagcttccacccccggggcctgcaggccgcccgggcccagaagttcaagagcaagaggcccaggagcaacagcgactgcttccaggaggaggacctgcggcagggcttccagtggaggaagagcctgccctttggagctgccagcagctacctgaacctggagaagctgggggagggcagctatgccaccgtgtacaagggcatcagccgcatcaatggccagctggtggccctgaaggtgatctccatgaatgctgaggagggcgtgcccttcaccgccatccgggaggccagcctgctgaagggcctgaagcacgccaacatcgtgctgctgcatgacatcatccacaccaaggagaccctgacctttgtgtttgagtacatgcacacagacctggcccagtacatgagccagcaccctgggggcctgcacccccacaacgtgcggctcttcatgttccagctgctgcggggcctggcctacatccaccaccagcacgtgctgcaccgggacctgaagccccagaacctgctgatcagccacctgggggagctgaagctggccgactttggcctggcccgggccaagagcatccccagccagacctacagcagcgaggtggtgaccctgtggtacagacctccagatgccctgctgggcgccacagagtacagcagcgagctggacatctggggcgccggctgcatcttcatcgagatgttccagggccagcccctcttccctggggtgagcaacatcctggagcagctggagaagatctgggaggtgctgggcgtgcccacagaggacacctggccaggagtgtccaagctgcccaactacaaccctgagtggttccccctgcccacccccaggagcctgcacgtggtgtggaaccggctgggccgggtgcctgaggccgaggacctggccagccagatgctgaagggcttcccccgggacagagtgtctgcccaggaggccctggtgcatgactacttcagcgccctgcccagccagctgtaccagctgcctgatgtgtctggagtgcggctgaagccagagatgtgtgacctgctggccagctaccagaagggccaccacccagcccagttcagcaagtgctggtag

SEQ ID NO: 93814 - DNA, 1290 bp, Artificial Sequence
  derived and/or modified sequence
atgggccaggagctgtgcgccaagaccgtgcagcccggctgcagctgttatcattgttctgaaggtggagaggcccacagctgtagacgtagccagcccgagactaccgaggctgccttcaaactcacagacctgaaagaagcatcctgttcaatgactagctttcatccacgggggttgcaagctgcaagagcacagaaattcaagtccaagcggcccagatccaacagcgattgtttccaagaagaagatctcaggcagggcttccagtggcgaaaatctcttccattcggcgcagcctcctcttacctcaacctagagaagctcggtgagggctcgtacgccactgtatataaaggtatttctcggataaacggccagctggttgctctaaaagtcatcagcatgaacgctgaagagggggtcccttttacagcgatccgggaagccagcctccttaagggcttgaagcatgccaatatagttctgctgcacgacattatacatacgaaggagacactgacttttgttttcgagtacatgcacacagacctcgctcaatacatgtcccagcacccaggggggcttcacccgcacaacgtgaggctctttatgttccagcttttgaggggtttagcatacatacaccatcaacacgtgctgcaccgggatctaaaaccacagaacttgttgatttcacacctaggggagcttaaactggcggatttcggcctggctagagccaagtcaatcccttcccagacctacagcagtgaggtcgtaactttatggtaccgtccaccggacgctcttctcggcgcgaccgagtattcgtctgagttggacatatggggcgcgggctgcattttcattgaaatgtttcagggccagccactttttcccggtgtttctaatatcctcgagcagctggagaagatctgggaagtcctgggggtgcccacagaggatacttggccaggggtctcaaagttgccgaactacaatcccgagtggttccccctaccaacccctagatcactgcatgtggtgtggaataggctggggagagtgcccgaagcagaagacttagcttcacagatgctgaaaggcttcccaagagatcgtgtgagcgcacaggaggccctggttcacgattattttagcgccctccccagtcagctctaccaactgccagacgtctcaggcgtcagactcaagcctgaaatgtgtgacttactcgcttcataccagaagggccatcaccccgcacagttctctaagtgttggtag

SEQ ID NO: 93815 - DNA, 1290 bp, Artificial Sequence
  derived and/or modified sequence
atgggtcaggaactgtgcgccaaaacggtccagcctggttgttcatgctatcattgctctgaaggcggagaggcccactcgtgtcgcagaagccagccagagaccactgaggccgctttcaagcttacagatttgaaggaagcatcctgctcaatgacatctttccacccccgagggctgcaggccgctagggcccagaaatttaagtccaaacgccctagatcgaactctgactgcttccaagaagaggacctccgccaaggatttcaatggagaaaatcactgccattcggcgcagcatcttcataccttaacctggaaaagttaggtgagggtagttacgcaaccgtatataaggggatcagcaggataaatggccaactagttgccttaaaggtcattagtatgaacgctgaggaaggggtgccgttcaccgccatcagggaagcttcactgttaaaagggttgaaacatgctaatatagtgttgctgcatgacatcattcacaccaaagaaacccttaccttcgtgtttgaatacatgcacaccgacctcgctcagtatatgtcccagcatcctggcggattgcatccccacaacgttcgtctttttatgttccagcttctaagggggctcgcatatatccaccaccagcatgtgctgcatcgagatcttaagccacagaacctcctcatttcacatttgggcgaactcaaacttgccgactttggccttgcaagggcgaagtcgatcccgtcccagacctatagctcagaagtggttaccctctggtaccggccacctgatgcgcttctcggtgccacagagtacagctccgaacttgacatatggggagcaggatgtatttttatagagatgttccagggccagcctctgttcccaggggtgagcaatatccttgaacagctcgagaaaatctgggaggttctcggcgttcccaccgaagatacctggcccggagtgagcaagctgcccaattacaaccccgagtggttccctctaccaaccccaaggtctctccacgtggtatggaaccgtctagggcgtgtaccagaggccgaggacttggctagtcagatgttgaagggatttcctcgtgatcgagtctccgcccaggaagctctggttcatgactacttctccgctctgccatcacagttatatcagctgcccgatgtgagcggtgtacgactcaagcctgagatgtgcgatcttctggcttcctatcaaaaaggccaccatccggctcagttctctaagtgttggtag

SEQ ID NO: 93816 - protein, 400 aa, Artificial Sequence
  derived and/or modified sequence
MGQELCAKTVQPGCSCYHCSEGGEAHSCRRSQPETTEAAFKLTDLKEASCSMTSFHPRGLQAARAQKFKSKRPRSNSDCFQEEDLRQGFQWRKSLPFGAASSYLNLEKLGEGSYATVYKGISRINGQLVALKVISMNAEEGVPFTAIREASLLKGLKHANIVLLHDIIHTKETLTFVFEYMHTDLAQYMSQHPGGLHPHNVRLFMFQLLRGLAYIHHQHVLHRDLKPQNLLISHLGELKLADFGLARAKSIPSQTYSSEVVTLWYRPPDALLGATEYSSELDIWGAGCIFIEMFQGQPLFPGVSNILEQLEKIWEVLGVPTEDTWPGVSKLPNYNPEWFPLPTPRSLHVVWNRLGRVPEAEDLASQMLKGFPRDRVSAQEALVHDYFSALPSQLYQLPDE

SEQ ID NO: 93817 - DNA, 1203 bp, Artificial Sequence
  derived and/or modified sequence
atgggccaggagctgtgcgccaagaccgtgcagcccggctgcagctgctaccactgcagcgagggcggcgaggcccacagctgcagaagaagccagcccgagaccaccgaggccgccttcaagctgaccgacctgaaggaggccagctgcagcatgaccagcttccaccccagaggcctgcaggccgccagagcccagaagttcaagagcaagagacccagaagcaacagcgactgcttccaggaggaggacctgagacagggcttccagtggagaaagagcctgcccttcggcgccgccagcagctacctgaacctggagaagctgggcgagggcagctacgccaccgtgtacaagggcatcagcagaatcaacggccagctggtggccctgaaggtgatcagcatgaacgccgaggagggcgtgcccttcaccgccatcagagaggccagcctgctgaagggcctgaagcacgccaacatcgtgctgctgcacgacatcatccacaccaaggagaccctgaccttcgtgttcgagtacatgcacaccgacctggcccagtacatgagccagcaccccggcggcctgcacccccacaacgtgagactgttcatgttccagctgctgagaggcctggcctacatccaccaccagcacgtgctgcacagagacctgaagccccagaacctgctgatcagccacctgggcgagctgaagctggccgacttcggcctggccagagccaagagcatccccagccagacctacagcagcgaggtggtgaccctgtggtacagaccccccgacgccctgctgggcgccaccgagtacagcagcgagctggacatctggggcgccggctgcatcttcatcgagatgttccagggccagcccctgttccccggcgtgagcaacatcctggagcagctggagaagatctgggaggtgctgggcgtgcccaccgaggacacctggcccggcgtgagcaagctgcccaactacaaccccgagtggttccccctgcccacccccagaagcctgcacgtggtgtggaacagactgggcagagtgcccgaggccgaggacctggccagccagatgctgaagggcttccccagagacagagtgagcgcccaggaggccctggtgcacgactacttcagcgccctgcccagccagctgtaccagctgcccgacgagtag

SEQ ID NO: 93818 - DNA, 2240 bp, Artificial Sequence
  derived and/or modified sequence
gggaaaggttcaagtgcgggttttctccttgaacctacaagattatgggtcaagagctgtgtgcaaagactgtacagcctggatgcagctgctaccattgttcagagggaggcgaggcacacagctgtcggaggagtcagcctgagaccacggaggctgcgttcaagctaacagacctaaaagaagcatcatgttccatgacttcatttcaccccaggggacttcaagctgcccgtgcccagaagttcaagagtaaaaggccacggagtaacagtgattgttttcaggaagaggatctgaggcagggttttcagtggaggaagagcctcccttttggggcagcctcatcttacttgaacttggagaagctgggtgaaggctcttatgcgacagtttacaaggggattagcagaataaatggacaactagtggctttaaaagtcatcagcatgaatgcagaggaaggagtcccatttacagctatccgagaagcttctctcctgaagggtttgaaacatgccaatattgtgctcctgcatgacataatccacaccaaagagacactgacattcgtttttgaatacatgcacacagacctggcccagtatatgtctcagcatccaggagggcttcatcctcataatgtcagacttttcatgtttcaacttttgcggggcctggcgtacatccaccaccaacacgttcttcacagggacctgaaacctcagaacttactcatcagtcacctgggagagctcaaactggctgattttggtcttgcccgggccaagtccattcccagccagacatactcttcagaagtcgtgaccctctggtaccggccccctgatgctttgctgggagccactgaatattcctctgagctggacatatggggtgcaggctgcatctttattgaaatgttccagggtcaacctttgtttcctggggtttccaacatccttgaacagctggagaaaatctgggaggtgctgggagtccctacagaggatacttggccgggagtctccaagctacctaactacaatccagaatggttcccactgcctacgcctcgaagccttcatgttgtctggaacaggctgggcagggttcctgaagctgaagacctggcctcccagatgctaaaaggctttcccagagaccgcgtctccgcccaggaagcacttgttcatgattatttcagcgccctgccatctcagctgtaccagcttcctgatgagtgaagcagctgcgataattatgctgtcagcctcgggaagctaatgaggagtcaccagagtggaaggttttgcatttgtgagattgctgaaggagagccgcgctgcagcttttttcgttttttatttccctttctttctttcttcctcctttttctttttctatgagttgggaaggagagtctggcagtccacagccaaattggaatccttttgattaaccggttgccttcccagcatgttctgccagatagtgtctctctctctctccctccctccctgcttttgaggagctgctgcttttgaggggcaaggaagccggagggaaatcccagcttttcatgccactgtccccaaggcaagaggatacttctccccgagagaagttccccaaatggtttggatttgagttgatttgagaataattggtaaagtatacgcactgtttattttagccatttaactgtctatgctatgacaagatctaatagaaagtagaatacaaaattgcatattataatatccgtgtgaaaatgtcttatgcatatcaacaaatggtatgatggctcccctttccagcctatttggaatatgcgattccaaatacaagacaacgagaccccagattacccacagcatttaagggcagaagtttaggccaggcgaggcagagctggcaagtttatttcttccctttgggtgtgagcagcttccagcaaacagtattatttaaggcattttatgcttttggtgcagtaataacagaaggctctctttttgttaaattgtgagatattttgagcaccccagatttatgcaaattgtgaacctgggaaaagcaatgcccaagtggaaaggggccctgagtaaattttgcggatgtgctttggtgacaatgtggctgctgcctcttgctatttttctcagatatctgtgctaatacttgtaacaatggctaccatttattaaaaacatattgtgtatcataaactaacacaa

SEQ ID NO: 93819 - DNA, 1203 bp, Artificial Sequence
  derived and/or modified sequence
atggggcaagagctgtgtgcgaagaccgtgcaacccggatgttcttgttaccactgtagcgaaggtggcgaggcccattcttgccgcaggtcacagccggaaacgacagaagcagcctttaaactgacagacctgaaggaggcctcttgtagtatgacatcatttcaccctcgcggtctgcaagcagcccgagcccagaagttcaaatcaaagcggcctcggtccaacagcgactgcttccaggaagaagacctgaggcaaggcttccagtggagaaaatcattgccttttggcgcggcttcctcctacctgaatttagaaaagttgggagagggctcctacgccacagtctacaagggcatatctcggattaatggacagttagtcgcattgaaagtgatttccatgaatgcagaggagggcgtgccatttaccgctatacgcgaggcttcacttctcaaggggttgaaacatgccaacatcgtgcttctgcacgacatcatccacaccaaagagactttgacattcgtatttgagtatatgcatacagacttagctcaatacatgtcgcagcaccccgggggcctacatccccacaacgtccgtttatttatgttccagcttctcaggggcttggcctatatccatcaccagcatgtattgcacagggacctcaagccccagaatcttctaatcagtcatttgggggaattaaagttagcagatttcggactcgctcgggcgaagagcatcccatcccaaacctactcctctgaggtggtgaccctctggtacaggcctcctgatgctctactgggggcaactgagtactcatctgaactggatatatggggggcgggatgtatcttcattgagatgtttcagggccagcctctttttcctggggttagtaacatactcgaacaacttgagaagatctgggaggtgctgggagttccaactgaggacacttggcccggagtaagtaaactgcccaattataaccctgaatggttccctctacccactccaagaagtcttcatgtggtctggaacagactgggtagagtccccgaggccgaggacctggcttcccagatgttgaaaggctttccgcgtgatcgtgtctccgcacaagaagccctcgtgcacgactacttctcggctcttccttcccagctctaccagctgcccgatgagtag

SEQ ID NO: 93820 - DNA, 1203 bp, Artificial Sequence
  derived and/or modified sequence
atgggccaggagctgtgtgccaagacagtgcagcccggctgcagctgctaccactgcagcgagggcggggaggcccacagctgcagaagaagccagcctgagaccacagaggccgccttcaagctgacagacctgaaggaggccagctgcagcatgaccagcttccacccccggggcctgcaggccgcccgggcccagaagttcaagagcaagaggcccaggagcaacagcgactgcttccaggaggaggacctgcggcagggcttccagtggaggaagagcctgccctttggagctgccagcagctacctgaacctggagaagctgggggagggcagctatgccaccgtgtacaagggcatcagccgcatcaatggccagctggtggccctgaaggtgatctccatgaatgctgaggagggcgtgcccttcaccgccatccgggaggccagcctgctgaagggcctgaagcacgccaacatcgtgctgctgcatgacatcatccacaccaaggagaccctgacctttgtgtttgagtacatgcacacagacctggcccagtacatgagccagcaccctgggggcctgcacccccacaacgtgcggctcttcatgttccagctgctgcggggcctggcctacatccaccaccagcacgtgctgcaccgggacctgaagccccagaacctgctgatcagccacctgggggagctgaagctggccgactttggcctggcccgggccaagagcatccccagccagacctacagcagcgaggtggtgaccctgtggtacagacctccagatgccctgctgggcgccacagagtacagcagcgagctggacatctggggcgccggctgcatcttcatcgagatgttccagggccagcccctcttccctggggtgagcaacatcctggagcagctggagaagatctgggaggtgctgggcgtgcccacagaggacacctggccaggagtgtccaagctgcccaactacaaccctgagtggttccccctgcccacccccaggagcctgcacgtggtgtggaaccggctgggccgggtgcctgaggccgaggacctggccagccagatgctgaagggcttcccccgggacagagtgtctgcccaggaggccctggtgcatgactacttcagcgccctgcccagccagctgtaccagctgcctgatgaatag

SEQ ID NO: 93821 - DNA, 1203 bp, Artificial Sequence
  derived and/or modified sequence
atgggccaggagctgtgcgccaagaccgtgcagcccggctgcagctgttaccactgttctgagggtggggaagcccattcctgtcggcggagccagccagagaccaccgaagcagccttcaagctgacggatctgaaggaagcctcatgtagtatgacctcatttcatccaagaggactgcaagcagcccgtgcccagaagttcaaatccaaaaggccaagaagtaatagtgactgtttccaggaggaggacctaagacagggtttccagtggagaaaatccctgccctttggcgccgcatcgtcttatctcaatcttgagaagctgggcgaaggctcctatgctacagtgtataagggcattagtcgcataaatggacaactcgtggccctcaaagttatttccatgaatgcagaagaaggggtgccatttaccgccatccgggaggcgagccttcttaaaggtcttaagcacgcgaacatcgtcctcctgcacgacatcattcacacgaaagagacactcacttttgtgttcgaatacatgcataccgaccttgctcaatacatgtctcagcatcctggtggtcttcacccccataacgtcaggttgtttatgttccagttacttagaggccttgcctacatacaccaccagcatgtgctgcacagagaccttaagccccagaatttgctcatctcccacctcggagaactgaagctggctgatttcggactcgccagggctaagagcatccccagccagacatactccagcgaggtggttaccctgtggtaccgaccacccgatgcactcctcggggccaccgagtactctagcgagctggatatatggggcgcaggttgcatttttatagagatgttccaggggcaacccttatttcccggcgtttccaatatcctcgagcagctggaaaaaatttgggaagttctcggagtgccaaccgaagacacctggcccggtgtcagcaagttgcctaactacaacccagaatggtttccactgcccactcccagatctctccacgtagtctggaatcgcctgggaagagtccctgaggcagaagacctagctagtcagatgttaaaagggtttccccgggaccgagttagcgcacaggaagcactggttcacgattacttttccgcgctgcccagtcagctctatcagctcccagacgaatag

SEQ ID NO: 93822 - DNA, 1203 bp, Artificial Sequence
  derived and/or modified sequence
atgggccaggaattatgtgctaaaactgtacagcctggatgtagttgctatcattgcagcgagggcggtgaggcgcatagctgcaggagatcccaacccgagaccaccgaagccgctttcaaactgactgatctcaaggaggccagctgctctatgacctctttccaccccagggggctccaggctgcaagggcacagaaattcaaaagtaagaggccaaggtccaacagcgattgtttccaggaagaggatctgcggcagggcttccagtggcggaagtcactccccttcggagcagcttcatcatatttaaacctggagaaattgggggagggcagctacgcgacggtctataagggaatttcaaggattaatggccaactggttgcactgaaagtcatcagtatgaacgcagaggaaggggttccgtttactgcaatccgggaggcgtcgctgttgaaggggctgaagcacgctaatatcgtcctccttcacgacattatccatactaaagagactttgaccttcgtgtttgagtatatgcacactgatctcgctcagtatatgtcgcagcaccctggaggactgcacccccacaacgtaagactgttcatgtttcagctcctgaggggtctggcttatattcatcaccagcacgtgctccatagggacttaaaacctcagaaccttctgatcagccaccttggtgaactgaagctggcggacttcgggttagcaagggccaaatcgatacccagccaaacatatagctcagaggtggtgaccctgtggtacaggcctcccgacgctttgctcggggctaccgaatactcctctgaactagatatctggggcgcaggatgcatattcattgaaatgtttcagggacagcccttattcccaggcgtgagcaatatactggagcagctggagaaaatttgggaagtgctgggagtgcctacagaagatacatggcctggagtttctaagctgccgaactataatccggagtggtttcccctgcccacaccacgttctttacacgttgtgtggaaccggcttgggagagtgccagaggctgaagatctggccagtcagatgcttaagggattcccacgagacagagttagtgcacaggaggccctggtccacgactattttagcgccctaccctcacagctgtaccagctgccagatgaatag

SEQ ID NO: 93823 - DNA, 1338 bp, Artificial Sequence
  derived and/or modified sequence
atggaccccggcagcctgccccccctggacagcgaggacctgttccaggacctgagccacttccaggagacctggctggccgaggcccaggtgcccgacagcgacgagcagttcgtgcccgacttccacagcgagaacctggccttccacagccccaccaccagaatcaagaaggagccccagagccccagaaccgaccccgccctgagctgcagcagaaagccccccctgccctaccaccacggcgagcagtgcctgtacagcagcgcctacgacccccccagacagatcgccatcaagagccccgcccccggcgccctgggccagagccccctgcagcccttccccagagccgagcagagaaacttcctgagaagcagcggcaccagccagccccaccccggccacggctacctgggcgagcacagcagcgtgttccagcagcccctggacatctgccacagcttcaccagccagggcggcggcagagagcccctgcccgccccctaccagcaccagctgagcgagccctgccccccctacccccagcagagcttcaagcaggagtaccacgaccccctgtacgagcaggccggccagcccgccgtggaccagggcggcgtgaacggccacagataccccggcgccggcgtggtgatcaagcaggagcagaccgacttcgcctacgacagcgacgtgaccggctgcgccagcatgtacctgcacaccgagggcttcagcggccccagccccggcgacggcgccatgggctacggctacgagaagcccctgagacccttccccgacgacgtgtgcgtggtgcccgagaagttcgagggcgacatcaagcaggagggcgtgggcgccttcagagagggccccccctaccagagaagaggcgccctgcagctgtggcagttcctggtggccctgctggacgaccccaccaacgcccacttcatcgcctggaccggcagaggcatggagttcaagctgatcgagcccgaggaggtggccagactgtggggcatccagaagaacagacccgccatgaactacgacaagctgagcagaagcctgagatactactacgagaagggcatcatgcagaaggtggccggcgagagatacgtgtacaagttcgtgtgcgagcccgaggccctgttcagcctggccttccccgacaaccagagacccgccctgaaggccgagttcgacagacccgtgagcgaggaggacaccgtgcccctgagccacctggacgagagccccgcctacctgcccgagctggccggccccgcccagcccttcggccccaagggcggctacagctactag

SEQ ID NO: 93824 - DNA, 1338 bp, Artificial Sequence
  derived and/or modified sequence
atggaccccggatctctaccccccctggatagtgaggatctattccaggatctgagccacttccaggagacctggctggcagaagctcaagtccccgacagtgacgagcagtttgtacccgactttcacagcgagaacttggcgttccattcgcccaccactcgaatcaagaaggagccacaaagccctcgaacggatcccgcactaagctgcagtcgaaagccaccgctgccttaccaccatggtgagcagtgtctgtattcctcagcatacgatcctcctagacagatcgcaattaaaagccccgctcctggtgctttggggcagtcccctttgcagcccttcccacgcgccgaacagcgtaacttcctgcggagttctggcacaagtcagccccaccccgggcacggctaccttggcgagcacagcagcgtgttccagcaaccactggacatttgccattccttcacctcgcagggtgggggaagagaacccctgcctgctccgtaccaacaccaactttctgagccatgtcctccctatccccaacaaagctttaaacaagagtaccacgatccattgtacgagcaagcaggccagccagccgttgatcaaggcggcgtgaatggccaccgctaccccggcgcaggagtcgttatcaaacaggagcagacagactttgcctatgactctgacgtgacggggtgcgcttccatgtacctccacacggagggcttcagtgggccaagccccggtgacggggcaatgggttacggttacgagaaaccactccggccattccctgacgacgtctgtgtcgtacccgagaaattcgagggtgatattaagcaggaaggcgtgggagcttttcgcgaaggccccccataccagcgaaggggcgcgctccaactctggcagttcctcgttgccctcttggatgaccccaccaacgctcatttcatagcctggacaggcagaggcatggaattcaaactgatcgaacctgaagaggtggcacgcttgtggggtattcagaagaacagacccgcaatgaattacgacaaattaagcagatcgctccggtactactatgaaaagggtattatgcagaaagtcgcgggagaacgatatgtgtataagttcgtatgcgagccggaggcacttttttctctcgcctttcctgataatcagcggcccgctctgaaagctgaattcgatagacccgtgagtgaagaggatactgtcccactgtcccaccttgatgaaagcccggcttaccttcctgagctggccggaccggcccaacctttcggtcccaagggagggtatagctactag

SEQ ID NO: 93825 - DNA, 1338 bp, Artificial Sequence
  derived and/or modified sequence
atggacccaggttcactgccccccctggactctgaggacctgtttcaggacctcagccacttccaggagacctggctagcggaggcccaggtgccggatagtgacgagcagttcgttccagatttccattctgaaaatttggctttccattcacccaccacacgcattaagaaggagcctcagagcccccgcacagaccccgccctgtcttgctcacgcaaaccacccctgccttatcatcacggagaacagtgcctatactctagcgcttacgatcccccccggcaaatagctattaaatctcccgcccccggagcactgggccaatcccccctgcagccgtttccacgggccgagcagcggaatttcctgcgcagctctggaaccagtcagccacaccctggccacggctatttgggtgaacattcttctgtgtttcaacaaccactggatatttgccactcattcaccagccagggcgggggacgggaaccgctccccgccccttatcagcaccagctctcagaaccctgtcccccatacccccagcagtcctttaagcaagagtaccatgaccctctctacgagcaggccggacagcctgccgtggatcaaggaggagtgaacggacataggtacccgggggccggcgtcgtaatcaaacaggagcagacagacttcgcttacgactccgatgtgactggctgcgcctccatgtatctccataccgagggattttctggccccagccctggagacggagccatgggttacgggtacgagaagcccctgcgaccatttccagacgatgtatgcgttgttccggaaaagtttgaaggagacatcaaacaggagggcgtgggcgcgttcagagagggacctccttaccagcggcggggcgcgctacagctgtggcagttcttggtggcactgttggatgaccctaccaatgcccattttatcgcctggacaggacgcggcatggagtttaagctcatcgagcctgaagaggtcgctcggttgtggggtatacaaaaaaatcggcccgccatgaattacgataagctgagtcgttctcttcgttactattacgagaagggtattatgcagaaagtcgcaggcgagaggtatgtgtacaagttcgtatgcgaacctgaagcactcttctctttggcctttccagataaccagcggcctgcactgaaggcagagttcgaccgcccagtgagcgaggaagatacagtgccgttatcccacctggacgaatcccccgcctacttgcccgaacttgccgggccagcgcagccgttcggtccaaaaggtggctactcgtattag

SEQ ID NO: 93826 - DNA, 1338 bp, Artificial Sequence
  derived and/or modified sequence
atggaccccggcagcctgccccccctggacagcgaggacctcttccaggacctgagccacttccaggagacctggctggccgaggcccaggtgcctgacagtgatgagcagtttgtgcctgacttccacagcgagaacctggccttccacagccccaccacccgcatcaagaaggagccccagagccccaggacagatcctgccctgagctgcagcaggaagccacccctgccctaccaccacggggagcagtgcctgtacagcagcgcctatgaccccccccggcagatcgccatcaagagccctgcccctggggccctgggccagagccccctgcagcccttccccagggctgagcagaggaacttcctgcggagcagcggcaccagccagccccaccctggccacggctacctgggggagcacagcagcgtcttccagcagcccctggacatctgccacagcttcaccagccagggcggcggccgggagcccctgcctgccccctaccagcaccagctgtctgagccctgccccccctacccccagcagagcttcaagcaggagtaccatgaccccctgtatgagcaggccggccagcctgctgtggaccagggcggcgtgaatggccaccgctacccaggggccggcgtggtgatcaagcaggagcagacagactttgcctatgacagtgatgtgacaggctgtgcctccatgtacctgcacacagagggcttcagcggccccagccctggagatggagccatgggctacggctatgagaagcccctgcggcccttcccagatgatgtgtgtgtggtgcctgagaagtttgaaggagacatcaagcaggagggcgtgggcgccttccgggagggccccccctaccagaggagaggagccctgcagctgtggcagttcctggtggccctgctggatgaccccaccaatgcccacttcatcgcctggacaggccggggcatggagttcaagctgattgagcctgaggaggtggcccggctgtggggcatccagaagaacagacctgccatgaactatgacaagctgagccgcagcctgcgctactactatgagaagggcatcatgcagaaggtggccggggagagatatgtgtacaagtttgtgtgtgagcctgaggccctcttcagcctggccttcccagacaaccagaggcctgccctgaaggccgagtttgacaggcctgtgtctgaggaggacacagtgcccctgagccacctggatgagagccctgcctacctgcctgagctggccggccctgcccagcccttcggccccaagggcggctacagctactag

SEQ ID NO: 93827 - DNA, 1338 bp, Artificial Sequence
  derived and/or modified sequence
atggaccccggcagcctgccccccctggacagcgaggacctgttccaggatttaagtcattttcaggagacctggctggcggaggcccaggttcctgattctgacgagcagttcgtccccgactttcacagcgaaaatttggcttttcattcacctacgacccgcatcaaaaaagaacctcagtctcccagaaccgaccccgcactgtcttgctcccgaaaacctccactgccgtatcaccacggggagcagtgcttatactcgtccgcatacgatcccccacgccaaattgcaattaagagccctgcccctggcgctctgggccagagcccactgcagccgttccctagggcggaacaaagaaatttccttcgaagctcgggtacaagccaacctcatcctggtcacggctatctcggggagcacagctccgtgttccagcagccacttgacatatgccactcttttacctcccaagggggggggcgagagcctctgccagcaccctaccagcaccagctgagcgagccatgccccccatatccccagcagagcttcaaacaagaatatcacgatcctctgtacgagcaagcagggcagcccgctgtggatcagggaggcgtaaatggtcacagataccccggggctggtgtcgttatcaaacaggaacagactgactttgcctatgacagtgacgtaactgggtgcgcctcgatgtatctacacacggagggattcagtggaccctcccccggggacggggcaatgggctacggctatgagaagcctctgcgaccctttccagacgacgtgtgcgtggtacctgagaaattcgagggggatatcaaacaggaaggggtgggggccttcagagaaggacctccataccaaaggcgtggtgcgctgcagctctggcagtttctggtcgccctgctggacgaccccacaaacgcacactttatagcctggactggacggggcatggagtttaagctgatcgagccagaggaggtagcccgtctgtggggtatccaaaagaatcgaccggctatgaactatgataagctgtcccggtccctgagatactactatgagaaagggattatgcagaaagtggctggcgagcgatacgtgtacaagtttgtgtgtgagccagaggccctgttttccttagcctttcccgacaaccagagacccgcattgaaggcagaattcgatcgccctgtctccgaagaggatacagtgccactgtcacatctggacgaatcacccgcatatttacctgaactggccgggccagcccagccattcggtccaaagggtggctactcctactag

SEQ ID NO: 93828 - DNA, 1338 bp, Artificial Sequence
  derived and/or modified sequence
atggaccccggcagcctgccccccctggacagcgaggacctgttccaggacttgtctcactttcaggagacatggctggcagaggcccaagtgcctgatagcgacgaacagttcgtgcccgacttccacagcgagaacttggctttccactcccctacaacgcgaataaaaaaggagcctcagtccccccggacggacccagccctgagctgttctcgaaagccaccactcccatatcaccatggcgagcagtgcttgtatagctctgcttacgatccgccacgtcagattgccattaagtcacccgcacctggggcattgggtcagagtcctctccagcctttccctcgggccgagcaacgtaatttcctccgctcaagcggtacgtctcagccgcatccagggcatggctacctgggggagcattcttccgtcttccagcagcctcttgatatctgccacagttttacatcccagggcgggggacgggaacctctgccagctccctaccagcaccaactgtccgaaccgtgtcccccttatcctcagcagtccttcaaacaggaataccacgatccactttacgagcaggctggtcagccggctgtggatcaggggggggtcaatggacatcggtaccccggcgcaggcgtggttattaaacaagaacagacagactttgcctatgactccgacgtaactgggtgtgcctccatgtacctgcacactgaaggatttagcggcccaagtcctggcgatggggctatgggttacgggtatgagaagcctctcagaccatttcccgatgacgtgtgcgtcgtgccggagaagttcgagggcgacattaagcaggaaggggtgggagccttccgcgaggggccgccgtatcagaggcgtggcgcactgcaactgtggcagttcctggtagcacttctcgatgatccaacaaatgctcactttatcgcctggaccggtcggggtatggaatttaaactcatagagcccgaagaagtggccaggttatgggggatccagaaaaaccgacctgcaatgaactacgataaattatcacggtccctgcggtattattatgagaaaggcattatgcagaaagtggcaggcgagcgctatgtttacaagttcgtgtgcgagcctgaagctcttttcagcctggctttcccagataaccagcgccccgcattgaaggccgagtttgatcgtcccgtctctgaagaggacactgtgcccctctctcatctggacgaatccccagcctatctccccgagcttgctgggccggcacagccttttggccccaaaggagggtatagctactag

SEQ ID NO: 93829 - DNA, 1338 bp, Artificial Sequence
  derived and/or modified sequence
atggatcctgggtcactgcctccactcgacagtgaggacttatttcaggacctgagtcacttccaggaaacctggctggccgaggctcaagtgccagactctgacgagcaatttgtgccagactttcactctgagaatttagcttttcactcaccaacaaccagaattaaaaaagaacctcagtccccgaggacggatccagcacttagttgcagcaggaagccccctctcccataccatcacggcgaacaatgcctctattcatccgcatacgacccccctaggcagattgccatcaagtctccagcacctggcgcattaggccagtctccactgcagcccttccctagagccgaacagcggaactttctacggagtagcggaacgtcccagccccaccccggacatggctatctgggcgagcactcttccgtctttcagcagccccttgacatctgtcattccttcaccagtcagggaggaggtagagagcctctcccagccccataccaacaccaactgtccgagccttgtcctccgtatccccaacagagttttaagcaggagtaccatgatccactctatgaacaggcaggccaaccagctgttgaccagggcggtgtgaatgggcaccgctacccaggagccggagtggtcatcaagcaggagcagacagacttcgcttatgattccgatgtgaccggctgcgctagcatgtacttacacaccgaaggcttctcgggaccaagccccggagacggtgctatgggatatgggtacgaaaagcctcttcgcccattccccgatgatgtgtgcgttgtccctgagaagttcgaaggcgacattaagcaggaaggcgtaggtgccttcagggagggacccccataccagagaagaggcgcactgcaactttggcaattcttggtagcgctcttggatgacccaaccaacgctcactttatcgcctggaccggtaggggcatggagttcaagttgattgaaccagaggaggtggctcgtctgtggggcatccaaaaaaacaggcccgctatgaattatgacaagctgtcccggtctctacgctattattatgaaaaggggatcatgcagaaggttgcaggcgagaggtacgtgtataagttcgtgtgtgaacccgaagcgttattttctctcgccttcccagacaatcagcgtcccgctcttaaggccgagtttgacagacccgtgagcgaagaagacaccgtgccacttagtcacctggatgagtcccctgcttatctccctgagcttgcgggacccgcacaaccgttcggacccaagggtggatatagttattag

SEQ ID NO: 93830 - DNA, 1338 bp, Artificial Sequence
  derived and/or modified sequence
atggatcctggatcactacctccactggactcggaagatctttttcaagatctgtctcatttccaagagacctggctggcagaagcacaggtgcccgacagcgatgagcagtttgtgccggattttcactctgagaatctggcattccacagcccaacaacaagaattaagaaggaacctcagagcccacgtaccgatccagccctaagctgcagtcggaagccacctctcccataccaccatggcgagcaatgcttgtactcgtctgcctacgaccccccacgccaaatcgccatcaaatctcccgctcccggagctctcggccaatctcctctgcagcctttccctcgcgcagagcaaagaaacttcctgagaagctccggaacatcacagccccacccaggacacggctacctcggggaacacagctccgtgtttcagcaacctcttgacatatgtcattcatttactagccagggcggtggtcgagagcccctacctgccccataccaacaccagctctcggagccatgccccccatacccgcagcagtcttttaagcaggagtaccatgatcccttgtacgagcaggcaggccagcccgcagtggatcaagggggtgttaatggacacaggtatcccggagccggagtggtgatcaaacaggagcagaccgacttcgcttatgacagcgatgtcacgggctgcgcttctatgtatctgcatacggaggggttcagtgggccaagcccaggcgatggagctatgggttacggttatgagaaaccattgaggcctttcccagacgatgtgtgtgtggtacccgaaaagtttgagggtgacatcaagcaagagggcgtcggggctttccgagagggtcctccctaccaaaggcgaggtgcgttacaactgtggcagtttctcgttgcgctgcttgatgatccgactaatgcgcactttattgcgtggacgggccgtggaatggagttcaagctaatcgagcctgaagaggtcgcccgtctttggggcattcagaagaatcgccctgccatgaattacgacaaattgtcccgctccctccgatattattatgaaaagggtataatgcagaaagtcgccggagagcggtacgtgtacaaatttgtctgcgaacccgaggcattgttttcactcgctttccccgacaatcagcgtccggcactgaaggctgaatttgacagacccgtcagcgaggaagacactgttcctcttagtcacttggacgagtcacccgcttatctccccgagctggccggacccgctcaacctttcgggcctaagggaggatacagttactag

SEQ ID NO: 93831 - DNA, 525 bp, Artificial Sequence
  derived and/or modified sequence
atgttcgatgtcggcggccaacgtgacgagaggcgcaagtggatacaatgtttcaacgatgtaaccgccattatctatgtcgccgcttgctcaagttacaacatggtaattagggaagataataacaccaatcgtcttcgagagagcctggacctgtttgagtccatatggaacaaccggtggctcagaaccatcagcattatcttgttcctcaataaacaagacatgctggccgaaaaggttctggctggtaagtcgaagattgaagattacttcccggagtacgccaattatacggtgccagaggatgcgactcccgatgcgggtgaggacccgaaggtaacacgcgcgaaattcttcatccgggatctgtttctcagaattagcaccgccactggtgatgggaagcactattgctacccacattttacatgcgccgtcgacacggagaacattcggcgggtattcaacgattgtcgtgacattattcagagaatgcacctgaagcagtatgagcttctatag

SEQ ID NO: 93832 - DNA, 525 bp, Artificial Sequence
  derived and/or modified sequence
atgtttgatgtgggcggccagagagatgaaagaaggaagtggatccagtgcttcaatgatgtgacagccatcatctacgtggccgcctgcagcagctacaacatggtgatccgggaggacaacaacaccaaccggctgcgggagagcctggacctgtttgagagcatctggaacaaccgctggctgcggaccatcagcatcatcctcttcctgaacaagcaggacatgctggccgagaaggtgctggccggcaagagcaagattgaggactacttcccagaatatgccaactacacagtgcctgaagatgccaccccagatgctggggaggaccccaaggtgacccgggccaagttcttcatccgggacctcttcctgcgcatcagcacagccactggagatggcaagcactactgctacccccacttcacctgtgctgtggacacagagaacatcagaagagtcttcaatgactgccgggacatcatccagaggatgcacctgaagcagtatgagctgctgtag

SEQ ID NO: 93833 - DNA, 525 bp, Artificial Sequence
  derived and/or modified sequence
atgttcgacgtgggcggccagcgggacgagcggcggaagtggatccagtgcttcaacgacgtgactgcaattatatacgtcgccgcctgttcaagctacaacatggtcatacgcgaggataacaatacgaaccgtcttcgtgagtctctcgacctatttgagtcaatatggaacaatcgttggctgcgtacaatttctattatcctgttcctgaacaaacaggacatgcttgccgaaaaggtcctagcaggcaaatcgaagattgaggactattttcccgagtacgccaactataccgtgcctgaggatgctacacctgatgctggtgaggacccgaaggtcaccagggcaaagttctttatcagggatctattcctgcgtatctccacagccaccggcgacggaaaacactactgttatcctcattttacttgcgctgttgacacagaaaatattaggagagtgttcaacgattgcagggacattattcagcgcatgcacctgaaacaatacgaactgctgtag

SEQ ID NO: 93834 - DNA, 525 bp, Artificial Sequence
  derived and/or modified sequence
atgttcgacgtgggcggacagcgagacgaaagaagaaagtggatacaatgcttcaacgacgttactgccataatctatgtggctgcatgttcatcctataacatggtgatccgcgaagacaataatactaaccgccttcgggaatctctagacctgtttgagtcaatttggaacaacaggtggcttagaaccatctcaataatactcttcttgaacaagcaagatatgctggcagagaaagtcctggccggaaaatcaaaaatcgaagactatttccccgaatatgccaactatactgtgcccgaggacgccacgcccgacgccggagaggatcctaaagtgactagggcgaaattcttcatccgcgacctgtttctccgaatctctacagctacaggcgacgggaagcactattgttaccctcacttcacctgcgcagtggacacagagaacattaggagggtcttcaatgactgtcgggacataatccagagaatgcatctgaaacagtacgagctgctgtag

SEQ ID NO: 93835 - DNA, 525 bp, Artificial Sequence
  derived and/or modified sequence
atgttcgacgtgggcggccagagagacgagagaagaaagtggatccagtgcttcaacgacgtgaccgccatcatctacgtggccgcctgcagcagctacaacatggtgatcagagaggacaacaacaccaacagactgagagagagcctggacctgttcgagagcatctggaacaacagatggctgagaaccatcagcatcatcctgttcctgaacaagcaggacatgctggccgagaaggtgctggccggcaagagcaagatcgaggactacttccccgagtacgccaactacaccgtgcccgaggacgccacccccgacgccggcgaggaccccaaggtgaccagagccaagttcttcatcagagacctgttcctgagaatcagcaccgccaccggcgacggcaagcactactgctacccccacttcacctgcgccgtggacaccgagaacatcagaagagtgttcaacgactgcagagacatcatccagagaatgcacctgaagcagtacgagctgctgtag

SEQ ID NO: 93836 - DNA, 1494 bp, Artificial Sequence
  derived and/or modified sequence
atgaacggccccgaggacctgcccaagagctacgactacgacctgatcatcatcggcggcggcagcggcggcctggccgccgccaaggaggccgcccagtacggcaagaaggtgatggtgctggacttcgtgacccccacccccctgggcaccagatggggcctgggcggcacctgcgtgaacgtgggctgcatccccaagaagctgatgcaccaggccgccctgctgggccaggccctgcaggacagcagaaactacggctggaaggtggaggagaccgtgaagcacgactgggacagaatgatcgaggccgtgcagaaccacatcggcagcctgaactggggctacagagtggccctgagagagaagaaggtggtgtacgagaacgcctacggccagttcatcggcccccacagaatcaaggccaccaacaacaagggcaaggagaagatctacagcgccgagagattcctgatcgccaccggcgagagacccagatacctgggcatccccggcgacaaggagtactgcatcagcagcgacgacctgttcagcctgccctactgccccggcaagaccctggtggtgggcgccagctacgtggccctggagtgcgccggcttcctggccggcatcggcctggacgtgaccgtgatggtgagaagcatcctgctgagaggcttcgaccaggacatggccaacaagatcggcgagcacatggaggagcacggcatcaagttcatcagacagttcgtgcccatcaaggtggagcagatcgaggccggcacccccggcagactgagagtggtggcccagagcaccaacagcgaggagatcatcgagggcgagtacaacaccgtgatgctggccatcggcagagacgcctgcaccagaaagatcggcctggagaccgtgggcgtgaagatcaacgagaagaccggcaagatccccgtgaccgacgaggagcagaccaacgtgccctacatctacgccatcggcgacatcctggaggacaaggtggagctgacccccgtggccatccaggccggcagactgctggcccagagactgtacgccggcagcaccgtgaagtgcgactacgagaacgtgcccaccaccgtgttcacccccctggagtacggcgcctgcggcctgagcgaggagaaggccgtggagaagttcggcgaggagaacatcgaggtgtaccacagctacttctggcccctggagtggaccatccccagcagagacaacaacaagtgctacgccaagatcatctgcaacaccaaggacaacgagagagtggtgggcttccacgtgctgggccccaacgccggcgaggtgacccagggcttcgccgccgccctgaagtgcggcctgaccaagaagcagctggacagcaccatcggcatccaccccgtgtgcgccgaggtgttcaccaccctgagcgtgaccaagagaagcggcgccagcatcctgcaggccggctgctag

SEQ ID NO: 93837 - DNA, 1626 bp, Artificial Sequence
  derived and/or modified sequence
atgctgagcagactggtgctgaacagctgggcccaggccatcatcagacccagaccccccaaggtgctgggcctgcaggtgaccaccttcagcgaggcctaccaggagggcagactgcagaagctgctgaagatgaacggccccgaggacctgcccaagagctacgactacgacctgatcatcatcggcggcggcagcggcggcctggccgccgccaaggaggccgcccagtacggcaagaaggtgatggtgctggacttcgtgacccccacccccctgggcaccagatggggcctgggcggcacctgcgtgaacgtgggctgcatccccaagaagctgatgcaccaggccgccctgctgggccaggccctgcaggacagcagaaactacggctggaaggtggaggagaccgtgaagcacgactgggacagaatgatcgaggccgtgcagaaccacatcggcagcctgaactggggctacagagtggccctgagagagaagaaggtggtgtacgagaacgcctacggccagttcatcggcccccacagaatcaaggccaccaacaacaagggcaaggagaagatctacagcgccgagagattcctgatcgccaccggcgagagacccagatacctgggcatccccggcgacaaggagtactgcatcagcagcgacgacctgttcagcctgccctactgccccggcaagaccctggtggtgggcgccagctacgtggccctggagtgcgccggcttcctggccggcatcggcctggacgtgaccgtgatggtgagaagcatcctgctgagaggcttcgaccaggacatggccaacaagatcggcgagcacatggaggagcacggcatcaagttcatcagacagttcgtgcccatcaaggtggagcagatcgaggccggcacccccggcagactgagagtggtggcccagagcaccaacagcgaggagatcatcgagggcgagtacaacaccgtgatgctggccatcggcagagacgcctgcaccagaaagatcggcctggagaccgtgggcgtgaagatcaacgagaagaccggcaagatccccgtgaccgacgaggagcagaccaacgtgccctacatctacgccatcggcgacatcctggaggacaaggtggagctgacccccgtggccatccaggccggcagactgctggcccagagactgtacgccggcagcaccgtgaagtgcgactacgagaacgtgcccaccaccgtgttcacccccctggagtacggcgcctgcggcctgagcgaggagaaggccgtggagaagttcggcgaggagaacatcgaggtgtaccacagctacttctggcccctggagtggaccatccccagcagagacaacaacaagtgctacgccaagatcatctgcaacaccaaggacaacgagagagtggtgggcttccacgtgctgggccccaacgccggcgaggtgacccagggcttcgccgccgccctgaagtgcggcctgaccaagaagcagctggacagcaccatcggcatccaccccgtgtgcgccgaggtgttcaccaccctgagcgtgaccaagagaagcggcgccagcatcctgcaggccggctgctag

SEQ ID NO: 93838 - DNA, 1839 bp, Artificial Sequence
  derived and/or modified sequence
atgcccgtggacgactactggctgtgcctgcccgccagctgcgccagacccttcgtgcagaccgtgagagtggtgcagagctgcccccactgctgctggttccccggcgtgctgcccagcgtgcccgagcccctgagaatgcccgccatgctgcccaccggcagccacagcgccgtgctgccccccagccactgcagcaccgccccccccagcaccagccaggagcccagcagcagcgccgaccccaagctgtgcctgagcccccccaccagcgacagcagacaggagagaaacgtgcagttcggcctggcctaccaggagggcagactgcagaagctgctgaagatgaacggccccgaggacctgcccaagagctacgactacgacctgatcatcatcggcggcggcagcggcggcctggccgccgccaaggaggccgcccagtacggcaagaaggtgatggtgctggacttcgtgacccccacccccctgggcaccagatggggcctgggcggcacctgcgtgaacgtgggctgcatccccaagaagctgatgcaccaggccgccctgctgggccaggccctgcaggacagcagaaactacggctggaaggtggaggagaccgtgaagcacgactgggacagaatgatcgaggccgtgcagaaccacatcggcagcctgaactggggctacagagtggccctgagagagaagaaggtggtgtacgagaacgcctacggccagttcatcggcccccacagaatcaaggccaccaacaacaagggcaaggagaagatctacagcgccgagagattcctgatcgccaccggcgagagacccagatacctgggcatccccggcgacaaggagtactgcatcagcagcgacgacctgttcagcctgccctactgccccggcaagaccctggtggtgggcgccagctacgtggccctggagtgcgccggcttcctggccggcatcggcctggacgtgaccgtgatggtgagaagcatcctgctgagaggcttcgaccaggacatggccaacaagatcggcgagcacatggaggagcacggcatcaagttcatcagacagttcgtgcccatcaaggtggagcagatcgaggccggcacccccggcagactgagagtggtggcccagagcaccaacagcgaggagatcatcgagggcgagtacaacaccgtgatgctggccatcggcagagacgcctgcaccagaaagatcggcctggagaccgtgggcgtgaagatcaacgagaagaccggcaagatccccgtgaccgacgaggagcagaccaacgtgccctacatctacgccatcggcgacatcctggaggacaaggtggagctgacccccgtggccatccaggccggcagactgctggcccagagactgtacgccggcagcaccgtgaagtgcgactacgagaacgtgcccaccaccgtgttcacccccctggagtacggcgcctgcggcctgagcgaggagaaggccgtggagaagttcggcgaggagaacatcgaggtgtaccacagctacttctggcccctggagtggaccatccccagcagagacaacaacaagtgctacgccaagatcatctgcaacaccaaggacaacgagagagtggtgggcttccacgtgctgggccccaacgccggcgaggtgacccagggcttcgccgccgccctgaagtgcggcctgaccaagaagcagctggacagcaccatcggcatccaccccgtgtgcgccgaggtgttcaccaccctgagcgtgaccaagagaagcggcgccagcatcctgcaggccggctgctag

SEQ ID NO: 93839 - DNA, 1500 bp, Artificial Sequence
  derived and/or modified sequence
atgaacggccccgaggacctgcccaagagctacgactacgacctgatcatcatcggcggcggcagcggcggcctggccgccgccaaggaggccgcccagtacggcaagaaggtgatggtgctggacttcgtgacccccacccccctgggcaccagatggggcctgggcggcacctgcgtgaacgtgggctgcatccccaagaagctgatgcaccaggccgccctgctgggccaggccctgcaggacagcagaaactacggctggaaggtggaggagaccgtgaagcacgactgggacagaatgatcgaggccgtgcagaaccacatcggcagcctgaactggggctacagagtggccctgagagagaagaaggtggtgtacgagaacgcctacggccagttcatcggcccccacagaatcaaggccaccaacaacaagggcaaggagaagatctacagcgccgagagattcctgatcgccaccggcgagagacccagatacctgggcatccccggcgacaaggagtactgcatcagcagcgacgacctgttcagcctgccctactgccccggcaagaccctggtggtgggcgccagctacgtggccctggagtgcgccggcttcctggccggcatcggcctggacgtgaccgtgatggtgagaagcatcctgctgagaggcttcgaccaggacatggccaacaagatcggcgagcacatggaggagcacggcatcaagttcatcagacagttcgtgcccatcaaggtggagcagatcgaggccggcacccccggcagactgagagtggtggcccagagcaccaacagcgaggagatcatcgagggcgagtacaacaccgtgatgctggccatcggcagagacgcctgcaccagaaagatcggcctggagaccgtgggcgtgaagatcaacgagaagaccggcaagatccccgtgaccgacgaggagcagaccaacgtgccctacatctacgccatcggcgacatcctggaggacaaggtggagctgacccccgtggccatccaggccggcagactgctggcccagagactgtacgccggcagcaccgtgaagtgcgactacgagaacgtgcccaccaccgtgttcacccccctggagtacggcgcctgcggcctgagcgaggagaaggccgtggagaagttcggcgaggagaacatcgaggtgtaccacagctacttctggcccctggagtggaccatccccagcagagacaacaacaagtgctacgccaagatcatctgcaacaccaaggacaacgagagagtggtgggcttccacgtgctgggccccaacgccggcgaggtgacccagggcttcgccgccgccctgaagtgcggcctgaccaagaagcagctggacagcaccatcggcatccaccccgtgtgcgccgaggtgttcaccaccctgagcgtgaccaagagaagcggcgccagcatcctgcaggccggctgctgaggctag

SEQ ID NO: 93840 - DNA, 1632 bp, Artificial Sequence
  derived and/or modified sequence
atgctgagcagactggtgctgaacagctgggcccaggccatcatcagacccagaccccccaaggtgctgggcctgcaggtgaccaccttcagcgaggcctaccaggagggcagactgcagaagctgctgaagatgaacggccccgaggacctgcccaagagctacgactacgacctgatcatcatcggcggcggcagcggcggcctggccgccgccaaggaggccgcccagtacggcaagaaggtgatggtgctggacttcgtgacccccacccccctgggcaccagatggggcctgggcggcacctgcgtgaacgtgggctgcatccccaagaagctgatgcaccaggccgccctgctgggccaggccctgcaggacagcagaaactacggctggaaggtggaggagaccgtgaagcacgactgggacagaatgatcgaggccgtgcagaaccacatcggcagcctgaactggggctacagagtggccctgagagagaagaaggtggtgtacgagaacgcctacggccagttcatcggcccccacagaatcaaggccaccaacaacaagggcaaggagaagatctacagcgccgagagattcctgatcgccaccggcgagagacccagatacctgggcatccccggcgacaaggagtactgcatcagcagcgacgacctgttcagcctgccctactgccccggcaagaccctggtggtgggcgccagctacgtggccctggagtgcgccggcttcctggccggcatcggcctggacgtgaccgtgatggtgagaagcatcctgctgagaggcttcgaccaggacatggccaacaagatcggcgagcacatggaggagcacggcatcaagttcatcagacagttcgtgcccatcaaggtggagcagatcgaggccggcacccccggcagactgagagtggtggcccagagcaccaacagcgaggagatcatcgagggcgagtacaacaccgtgatgctggccatcggcagagacgcctgcaccagaaagatcggcctggagaccgtgggcgtgaagatcaacgagaagaccggcaagatccccgtgaccgacgaggagcagaccaacgtgccctacatctacgccatcggcgacatcctggaggacaaggtggagctgacccccgtggccatccaggccggcagactgctggcccagagactgtacgccggcagcaccgtgaagtgcgactacgagaacgtgcccaccaccgtgttcacccccctggagtacggcgcctgcggcctgagcgaggagaaggccgtggagaagttcggcgaggagaacatcgaggtgtaccacagctacttctggcccctggagtggaccatccccagcagagacaacaacaagtgctacgccaagatcatctgcaacaccaaggacaacgagagagtggtgggcttccacgtgctgggccccaacgccggcgaggtgacccagggcttcgccgccgccctgaagtgcggcctgaccaagaagcagctggacagcaccatcggcatccaccccgtgtgcgccgaggtgttcaccaccctgagcgtgaccaagagaagcggcgccagcatcctgcaggccggctgctgaggctag

SEQ ID NO: 93841 - DNA, 1707 bp, Artificial Sequence
  derived and/or modified sequence
atgcccgccatgctgcccaccggcagccacagcgccgtgctgccccccagccactgcagcaccgccccccccagcaccagccaggagcccagcagcagcgccgaccccaagctgtgcctgagcccccccaccagcgacagcagacaggagagaaacgtgcagttcggcctggcctaccaggagggcagactgcagaagctgctgaagatgaacggccccgaggacctgcccaagagctacgactacgacctgatcatcatcggcggcggcagcggcggcctggccgccgccaaggaggccgcccagtacggcaagaaggtgatggtgctggacttcgtgacccccacccccctgggcaccagatggggcctgggcggcacctgcgtgaacgtgggctgcatccccaagaagctgatgcaccaggccgccctgctgggccaggccctgcaggacagcagaaactacggctggaaggtggaggagaccgtgaagcacgactgggacagaatgatcgaggccgtgcagaaccacatcggcagcctgaactggggctacagagtggccctgagagagaagaaggtggtgtacgagaacgcctacggccagttcatcggcccccacagaatcaaggccaccaacaacaagggcaaggagaagatctacagcgccgagagattcctgatcgccaccggcgagagacccagatacctgggcatccccggcgacaaggagtactgcatcagcagcgacgacctgttcagcctgccctactgccccggcaagaccctggtggtgggcgccagctacgtggccctggagtgcgccggcttcctggccggcatcggcctggacgtgaccgtgatggtgagaagcatcctgctgagaggcttcgaccaggacatggccaacaagatcggcgagcacatggaggagcacggcatcaagttcatcagacagttcgtgcccatcaaggtggagcagatcgaggccggcacccccggcagactgagagtggtggcccagagcaccaacagcgaggagatcatcgagggcgagtacaacaccgtgatgctggccatcggcagagacgcctgcaccagaaagatcggcctggagaccgtgggcgtgaagatcaacgagaagaccggcaagatccccgtgaccgacgaggagcagaccaacgtgccctacatctacgccatcggcgacatcctggaggacaaggtggagctgacccccgtggccatccaggccggcagactgctggcccagagactgtacgccggcagcaccgtgaagtgcgactacgagaacgtgcccaccaccgtgttcacccccctggagtacggcgcctgcggcctgagcgaggagaaggccgtggagaagttcggcgaggagaacatcgaggtgtaccacagctacttctggcccctggagtggaccatccccagcagagacaacaacaagtgctacgccaagatcatctgcaacaccaaggacaacgagagagtggtgggcttccacgtgctgggccccaacgccggcgaggtgacccagggcttcgccgccgccctgaagtgcggcctgaccaagaagcagctggacagcaccatcggcatccaccccgtgtgcgccgaggtgttcaccaccctgagcgtgaccaagagaagcggcgccagcatcctgcaggccggctgctgaggctag

SEQ ID NO: 93842 - DNA, 420 bp, Artificial Sequence
  derived and/or modified sequence
atgctgagcagactggtgctgaacagctgggcccaggccatcatcagacccagaccccccaaggtgctgggcctgcaggtgaccaccttcagcgaggcctaccaggagggcagactgcagaagctgctgaagatgaacggccccgaggacctgcccaagagctacgactacgacctgatcatcatcggcggcggcagcggcggcctggccgccgccaaggaggccgcccagtacggcaagaaggtgatggtgctggacttcgtgacccccacccccctgggcaccagatggggcctgggcggcacctgcgtgaacgtgggctgcatccccaagaagctgatgcaccaggccgccctgctgggccaggccctgcaggacagcagaaactacggctggaaggtggaggagaccggcatgtag

SEQ ID NO: 93843 - DNA, 1644 bp, Artificial Sequence
  derived and/or modified sequence
atggaggacggcagagccctggagggcaccctgagcgagctggccgccgagaccgacctgcccgtggtgttcgtgaagcagagaaagatcggcggccacggccccaccctgaaggcctaccaggagggcagactgcagaagctgctgaagatgaacggccccgaggacctgcccaagagctacgactacgacctgatcatcatcggcggcggcagcggcggcctggccgccgccaaggaggccgcccagtacggcaagaaggtgatggtgctggacttcgtgacccccacccccctgggcaccagatggggcctgggcggcacctgcgtgaacgtgggctgcatccccaagaagctgatgcaccaggccgccctgctgggccaggccctgcaggacagcagaaactacggctggaaggtggaggagaccgtgaagcacgactgggacagaatgatcgaggccgtgcagaaccacatcggcagcctgaactggggctacagagtggccctgagagagaagaaggtggtgtacgagaacgcctacggccagttcatcggcccccacagaatcaaggccaccaacaacaagggcaaggagaagatctacagcgccgagagattcctgatcgccaccggcgagagacccagatacctgggcatccccggcgacaaggagtactgcatcagcagcgacgacctgttcagcctgccctactgccccggcaagaccctggtggtgggcgccagctacgtggccctggagtgcgccggcttcctggccggcatcggcctggacgtgaccgtgatggtgagaagcatcctgctgagaggcttcgaccaggacatggccaacaagatcggcgagcacatggaggagcacggcatcaagttcatcagacagttcgtgcccatcaaggtggagcagatcgaggccggcacccccggcagactgagagtggtggcccagagcaccaacagcgaggagatcatcgagggcgagtacaacaccgtgatgctggccatcggcagagacgcctgcaccagaaagatcggcctggagaccgtgggcgtgaagatcaacgagaagaccggcaagatccccgtgaccgacgaggagcagaccaacgtgccctacatctacgccatcggcgacatcctggaggacaaggtggagctgacccccgtggccatccaggccggcagactgctggcccagagactgtacgccggcagcaccgtgaagtgcgactacgagaacgtgcccaccaccgtgttcacccccctggagtacggcgcctgcggcctgagcgaggagaaggccgtggagaagttcggcgaggagaacatcgaggtgtaccacagctacttctggcccctggagtggaccatccccagcagagacaacaacaagtgctacgccaagatcatctgcaacaccaaggacaacgagagagtggtgggcttccacgtgctgggccccaacgccggcgaggtgacccagggcttcgccgccgccctgaagtgcggcctgaccaagaagcagctggacagcaccatcggcatccaccccgtgtgcgccgaggtgttcaccaccctgagcgtgaccaagagaagcggcgccagcatcctgcaggccggctgctag

SEQ ID NO: 93844 - DNA, 1494 bp, Artificial Sequence
  derived and/or modified sequence
atgaatgggcccgaggatttgcctaaaagttacgattacgacttgatcatcatcgggggtggatccggaggcctggcggccgccaaggaggcagcccaatacggcaagaaagtgatggtgttggactttgtcacgccaacccccttgggcacccgttggggcctgggggggacatgcgtgaacgtgggctgcattccaaagaaactgatgcaccaggctgccttgctcgggcaggcactgcaagattcacgcaactatggatggaaagtagaggagactgtgaagcatgactgggatcggatgattgaggctgttcagaaccacatagggtccctcaactggggctatcgggtcgcactgcgcgagaaaaaggtggtgtatgagaatgcttacgggcagttcatcggccctcacagaatcaaagcaactaacaacaagggtaaagaaaagatttatagtgcggaaagatttttgatcgcgacaggggagcgacccagatatttgggtatccccggagacaaagagtattgcatttcaagcgacgacttattctctttgccgtactgtcctggcaagaccctggtagtcggagcgagttatgtggccttggaatgcgccggatttctggctggcattggcttggacgtaaccgtgatggtgcgctccattttgctgagaggcttcgatcaggacatggctaataaaattggggaacatatggaggagcatggtattaagttcatcaggcagtttgtgcccatcaaagtggagcagatcgaggcaggcacccctgggcgactgagggtggtggcacagagtaccaattctgaggagatcattgagggcgagtacaataccgtaatgcttgccatcggtagagacgcatgcacacggaaaattgggctggaaaccgtgggcgtaaaaatcaatgaaaaaactggaaaaatcccagtgacagacgaggagcaaaccaacgttccttacatttacgctatcggggacatcctcgaagataaagtagagctgactcctgtcgcaatccaggcgggccggctcttggcccaaagactgtatgcagggtctacagtgaagtgtgactacgagaacgtacctaccacggtctttacgcctctcgagtacggggcctgtgggctcagcgaggaaaaggccgttgagaagttcggcgaagagaacattgaggtttaccactcctacttctggccgctggagtggaccatacccagtagagacaataacaaatgctatgctaagataatctgtaacactaaagacaatgagagagtggtcggcttccacgtgctcggcccaaacgctggagaagtcactcaaggctttgctgccgccctcaagtgcggcttgacaaaaaagcagctcgatagcacgatcggcatccatccggtgtgtgctgaagtctttacaaccctgtccgtcaccaaacggtctggggcatcaatcctgcaagccgggtgttag

SEQ ID NO: 93845 - DNA, 1626 bp, Artificial Sequence
  derived and/or modified sequence
atgcttagtcggctcgtccttaactcctgggcccaagccattattcgcccgcgtcctcccaaggtgttgggcctgcaggtcactacctttagcgaggcctaccaggagggcaggctccagaagttactcaagatgaatgggcctgaagatctccccaagtcttatgattacgacctgattattatcggtggcggatcaggcgggttagctgccgccaaggaagctgcacagtatgggaaaaaagttatggtccttgactttgtaacacccacacctctcggcactagatggggactggggggcacttgtgttaatgtggggtgcattcccaagaagctgatgcaccaggcagcgctgctgggtcaggccctgcaggatagccggaactacgggtggaaggtcgaggaaaccgtgaaacacgactgggatcgcatgatcgaggccgtccagaatcacattggcagccttaactggggataccgcgtggcattacgcgaaaaaaaagttgtttacgagaacgcgtacgggcagttcatagggcctcatcgcatcaaggcgacgaataataaggggaaagagaagatctactctgctgagagattcctgatagccaccggcgagcgtccccggtatctagggattccaggagataaggaatattgcatctcatcagacgatctcttttccttgccatattgccctgggaaaaccctagtggtcggggcaagctacgtcgccttggaatgtgcaggattcctcgctggcattggccttgacgtgactgtgatggtccgaagcatactactaagaggcttcgatcaggatatggccaacaagatcggagagcacatggaggagcatggtattaagttcatcaggcagtttgtcccaataaaagtggaacagattgaagctgggacaccaggacgcctcagagtggttgctcagtctaccaacagcgaggagatcattgagggagagtataacacggtgatgcttgcaatcggaagagacgcatgcactcgcaaaattggactggagacagtgggcgtgaagataaatgaaaagaccgggaaaatccctgtcaccgacgaggaacagaccaatgtaccatacatttacgctataggggatatcctggaggataaggtggagctcactcctgtagccatacaggctgggcgcttacttgcccaaaggttgtatgctggctctaccgtaaagtgtgactacgagaacgtgcccaccacagtatttaccccactcgaatacggtgcctgtggcctgagcgaggagaaagcagttgagaagtttggcgaggagaacatagaagtgtatcacagttacttctggcccctggagtggacaatcccatccagggacaataacaagtgctacgccaaaatcatttgtaacacaaaggacaacgagcgggttgtggggttccacgttctggggcctaatgctggcgaggttacccagggtttcgccgctgctctgaagtgcggacttactaagaagcagcttgattctacaataggcatccaccctgtctgcgcggaggtgtttacgacattgagcgtcaccaagagatcaggcgctagcattcttcaagcaggatgctag

SEQ ID NO: 93846 - DNA, 1839 bp, Artificial Sequence
  derived and/or modified sequence
atgccagtcgacgactattggctctgcctcccagcctcctgtgccagaccgttcgtccaaaccgtcagggttgtgcaatcttgtccccactgctgttggtttcccggcgttctgccatcagtccccgaacctttacgcatgccagcaatgctgcctaccggttcccacagcgctgtgctgccaccctcacactgctctaccgctcctccctctactagccaggaaccatcctccagtgccgatccaaaactgtgcctgagccctcctacaagcgattcacgccaagagcggaacgtgcaattcggactagcttaccaggagggccggctgcaaaaattattaaagatgaatggacctgaggatctgcccaaatcttatgactatgatctcattatcattggagggggctctggggggctagctgccgccaaagaggcagcccagtacggcaaaaaggtcatggttttggattttgtaacgcccacacccttaggcacacgatggggcctgggcgggacgtgcgtgaatgtgggctgtattcccaaaaagctcatgcaccaggccgcactgcttgggcaggccttgcaagatagccgcaattatggttggaaggtcgaggaaacagtgaaacatgattgggaccgaatgattgaagcggtgcaaaatcatatcggtagccttaactgggggtaccgtgtcgccctcagggagaaaaaagtagtgtatgaaaatgcttatggccaatttattgggccgcacaggataaaagcgaccaataataagggcaaggagaagatctatagtgctgaaagattcctaattgcaaccggagagcggcctaggtacctgggaatccccggcgacaaggagtactgtatctcctcagacgacttgttttctcttccgtactgtccaggcaaaaccctcgtcgtcggagcgtcatatgtggcccttgaatgtgctggttttctggccggcatcggactggacgtcaccgtcatggtgcggtcaatcctgttgcgtggatttgatcaagacatggcaaacaagatcggtgagcatatggaagaacacggcattaagttcataagacaattcgtgcccatcaaagttgagcagatcgaggccgggaccccaggacgactgcgagttgtggctcagagcactaactctgaggagattattgagggggagtataataccgtcatgttggccatcggtagagatgcttgcacgaggaaaatagggctggagactgtgggcgtcaagattaacgaaaaaactggaaaaatcccggtcactgatgaagaacagactaacgtcccctatatctatgccataggcgacattctggaggacaaagtagaacttacgcctgtggctattcaagctggcaggttacttgcacagagactgtatgctgggagcaccgtgaagtgcgattatgaaaacgtgcccactaccgtgtttaccccactggagtatggggcatgcggtctgtctgaagagaaggcagtcgaaaagtttggggaggagaatatcgaagtatatcattcttatttctggccacttgaatggacaataccctccagggacaacaataagtgctatgcgaaaataatatgcaacactaaggataacgagagggtggtgggctttcatgttctgggacctaatgccggggaagtgactcaggggttcgccgccgcactcaagtgcgggcttaccaaaaagcaactcgatagcactatcgggatccacccagtgtgcgccgaggtttttaccaccctctcggtaacaaagcggagcggagcaagtatcctccaggcaggctgttag

SEQ ID NO: 93847 - DNA, 1500 bp, Artificial Sequence
  derived and/or modified sequence
atgaatggaccggaagatcttcctaaaagctacgactacgacttgattatcataggcggcggtagcggggggctcgccgcagcaaaggaggccgcacagtacggaaagaaggtgatggtactggactttgtcacccccacgcccttagggacacgctggggcctcggtgggacatgcgttaacgtgggatgcattccaaagaaattaatgcatcaggccgcgctgctgggacaggctcttcaggactccagaaactatgggtggaaggtcgaagaaaccgtgaagcacgattgggaccggatgatcgaagccgtgcagaatcatattggatcattgaattggggctacagagtggcacttagggaaaagaaggtcgtctacgagaatgcttacggacagttcatcgggccgcaccgcataaaggcaacaaacaataagggaaaagagaaaatctattcagcagaaagattcctgatagctacgggcgagagacctcgatatcttggaatcccaggtgataaggagtactgcatctcctcagacgacctgttcagtctcccatattgtccgggtaagaccttggtcgttggtgcctcatacgtggcattggaatgcgcaggcttcctagctggaatcggactcgacgttactgttatggtcagatctattctgttacgaggcttcgaccaggacatggcaaataaaatcggtgaacacatggaagagcacggcattaagttcatcagacagttcgtgccaatcaaagtcgagcagatagaggccgggacccccggtcgcctacgggttgtggctcagtcaaccaattccgaagagatcattgaaggagagtataacacagttatgttggctataggcagggacgcctgcacaagaaaaattggtctcgagacagtaggagtgaagattaacgagaagacaggtaaaatccccgtgactgacgaagagcaaacaaatgtgccctatatctatgccattggagacatcctggaggacaaggtggagctgacacctgttgccatccaggcaggcaggttgcttgctcagcgcttgtacgcgggctctaccgttaagtgtgactatgaaaacgtccccacaaccgtcttcacgccgctggagtatggtgcatgcgggctgagcgaggaaaaggcagttgagaagtttggtgaagaaaacattgaggtgtaccatagctacttctggcctctggaatggactatcccctccagggataataacaagtgctacgcgaagataatctgcaacaccaaggataatgagcgagtcgtgggattccatgtgctcggcccaaacgccggagaagtgactcaggggtttgcagccgcactgaagtgtggcctcaccaaaaagcagttggattccaccatcggcattcatcctgtatgtgccgaagtgtttactactttgagcgtaacaaaaagatcgggcgcttcgatccttcaggccgggtgttgagggtag

SEQ ID NO: 93848 - DNA, 1500 bp, Artificial Sequence
  derived and/or modified sequence
atgaacggaccagaggaccttcccaaaagctatgactacgatctgatcattattggaggtggaagcgggggactcgcggctgccaaagaggcagcccagtatggcaagaaagtgatggtcctggacttcgttacacctacacctctgggtacacgatgggggttaggcggcacgtgcgttaatgtgggatgtattccgaagaagctaatgcaccaggccgccttgctcgggcaggcattacaagactcaaggaactatggatggaaggtcgaggaaactgtaaagcacgactgggacaggatgatagaagctgtccagaaccacatcggttccttaaattgggggtaccgagtggccctgagagagaagaaagtggtttatgaaaacgcatatggacagtttattggaccccaccgcatcaaagctacgaataataagggcaaggagaagatctactcggcagaaagattcctaatcgccactggcgagaggcctcgctatctaggcattccaggggacaaagaatattgtatctcctcggatgaccttttctctctcccttattgtcccggtaaaaccctcgtggtgggagcatcctacgtggctcttgagtgcgccggattcctggctggcattggtctggacgtgacggtaatggtgagaagtattctactgagagggttcgatcaggacatggcgaacaagattggagagcatatggaggaacacggcatcaaatttattagacaattcgtgcctattaaggtcgagcagattgaagctgggaccccaggccgccttcgggtggtggcccagtccaccaatagtgaggaaataatcgagggtgaatataatacagtgatgctcgcaattggccgggacgcatgcactagaaaaatcggcctggaaaccgtcggggtgaaaatcaatgagaagactggaaaaatcccagtgacggatgaagagcaaactaacgtcccatacatttatgcgataggcgatattctggaggataaagtcgaattaacccctgtggccattcaggctggcagattgttggcccagcggttgtacgccggcagcacagtaaagtgtgattacgaaaacgtgcctaccaccgtgtttacacctctggaatacggggcttgtggcctgagtgaggagaaagctgtggaaaaattcggagaggagaatattgaagtctaccatagttacttttggccattggaatggaccatcccctctagagacaataataagtgttatgcaaagattatttgcaacacaaaagataatgagcgtgtggtaggctttcacgtcctcggaccaaacgcaggcgaagtcacccagggattcgccgccgcactaaaatgcggccttaccaagaagcagctggacagcacaatagggattcatccagtctgcgctgaagtgtttaccaccctgtccgttacgaaacggtcgggggccagtatactgcaggcggggtgctgagggtag

SEQ ID NO: 93849 - DNA, 1632 bp, Artificial Sequence
  derived and/or modified sequence
atgctgtcccggttggtgctcaatagctgggcccaggccatcattcgcccccgtcccccaaaagtgctcggactgcaggttacaacatttagcgaggcataccaggaaggcaggctacagaagcttctgaagatgaatggaccagaggaccttcctaaatcttacgactatgacctcattattattgggggaggttcagggggacttgctgccgcaaaggaagcagcgcaatacggtaagaaggtgatggtgctcgactttgtcacacccaccccactggggacacgttggggcctgggggggacctgtgtcaacgtcggatgtattcctaaaaagctgatgcatcaggcagccctgctaggtcaggctctgcaggattcacgcaactacgggtggaaagtggaggaaaccgttaagcatgactgggaccggatgattgaggcagttcagaaccacatagggtcccttaattggggctaccgagtggccctgcgtgaaaaaaaggtggtgtatgagaatgcctatggccagttcatcggccctcataggatcaaggccacaaacaataaggggaaggaaaagatctactccgctgagaggttcctgatcgcaaccggggaaaggccgaggtacctgggtatccctggagataaagaatactgtataagttccgatgacctgttttctctgccgtactgccccggcaaaaccctggtcgtgggtgcctcctacgtggccctggaatgcgctgggtttctcgcagggatcggactggacgtcaccgtgatggttcgctctatcttgctgcggggattcgaccaagacatggctaataaaataggggagcacatggaggagcacggcataaagttcattcgtcaatttgtccctattaaagttgaacagatcgaggctggtacaccaggtaggctgcgtgtcgtagctcagtctacgaattccgaagaaatcatcgagggggagtacaatacagtgatgcttgctatcggacgcgatgcctgtaccaggaaaatcggccttgaaactgtgggcgtgaagatcaatgaaaagacagggaagatccccgtcaccgatgaagagcagactaatgtgccttatatttacgctatcggcgacatcctggaagacaaggtcgagctgactcccgttgccatacaggccggtagactgttggctcagagactgtacgcaggttcaaccgtgaagtgcgattacgagaatgtaccaacgacagtgtttactcccctggaatacggcgcgtgcgggctgtccgaggaaaaggcggtggagaagttcggggaagagaatatcgaggtgtaccacagttacttctggcccctggaatggactattccctcccgagacaataacaagtgctacgcaaaaattatctgcaacaccaaagataatgagagagttgtcggttttcatgtgttagggcctaatgctggagaggtaacacagggcttcgcagccgcacttaagtgcgggctaactaaaaagcagcttgactcaaccatcgggatccaccctgtatgcgcagaggtcttcactacactttcagtcactaagcgctccggggcatccatattgcaggccggatgttgaggttag

SEQ ID NO: 93850 - DNA, 1707 bp, Artificial Sequence
  derived and/or modified sequence
atgccagcgatgctgccaaccggctcacactcagcagtgttgccgcccagtcattgcagcacagctccaccttccacgtctcaggagcccagctcatcagctgaccctaaactctgtttgagtccgcccacaagtgactcccggcaagagcgcaatgtgcagtttggcctagcataccaggaggggagattgcagaagctgctgaagatgaatgggcctgaagatctgccgaagagctacgattacgatctgattatcataggggggggcagtggagggctggcggctgctaaggaagccgcccagtacggaaagaaagtcatggttctcgacttcgtgacacccacccccttaggaacacgctggggtctgggcgggacctgcgtgaatgtgggatgtattcccaagaagctcatgcatcaggcggcactgcttggccaggcactccaggacagccgtaactacgggtggaaagtggaggaaactgttaagcacgattgggaccggatgattgaggccgttcagaatcacatagggtctttaaattgggggtatcgcgtggctctacgagagaagaaggtggtctacgaaaacgcctacgggcagtttatcggaccccatcgaattaaagcaacaaataataagggaaaggaaaagatctatagcgccgagagatttctaattgccacaggggagcgcccacggtaccttggtatcccaggagacaaggaatattgtatctcgtcggacgatctgttctctctaccctattgcccagggaaaaccttggttgtcggtgccagctacgtggcactggagtgtgccggttttcttgcaggcataggactcgatgtcacggtgatggtgcggagcattctcctgaggggctttgaccaggatatggcgaataagattggcgagcatatggaagaacatgggattaaatttatacgccagttcgtcccaatcaaggtggaacagattgaggctggaaccccaggacgtctcagagtggtggctcagtctacaaattcagaggagattatcgagggcgaatacaacacagtaatgttagccatcggccgggatgcatgcactcgaaagatcggcctggagaccgtgggggtgaagattaacgagaaaactggcaagatcccagtgactgatgaagaacaaaccaatgtaccgtatatctacgccatcggtgatatcctcgaagataaggtggaactcactcctgtggctattcaggctggcagacttctggcccagagattgtatgcaggtagtaccgtcaagtgtgactacgagaatgtgccaacaacagtctttacacccctcgaatacggcgcctgtggcctgagcgaggagaaggccgtggaaaagtttggagaggagaatattgaggtctaccattcatatttctggccgcttgagtggactattccttctagagacaataacaagtgctacgcgaaaatcatttgcaacactaaggacaacgagcgcgtggtcgggtttcacgtgcttgggccgaacgctggcgaggtgacacaggggtttgccgcggccctgaagtgtggcctgactaaaaaacagctggactctaccattggaattcatcctgtgtgtgccgaggtgttcacgacgttgtctgtcaccaaacgaagcggcgccagcatactccaggctggttgctgaggatag

SEQ ID NO: 93851 - DNA, 420 bp, Artificial Sequence
  derived and/or modified sequence
atgctgtctagacttgtcctcaatagctgggcccaggcaattatcaggcctcgaccccccaaggtgctaggcttacaggtgacgacgttttcggaagcctatcaggagggccgcttacagaagcttcttaagatgaacggtccagaagaccttccaaaaagctatgattatgacctgataattattggcgggggcagcggtggcctagccgcggccaaggaagctgcacaatatggaaagaaggttatggtcctcgacttcgtgacccccaccccactgggcacaaggtggggtttaggagggacatgcgtcaacgtcgggtgcatccctaaaaagctgatgcaccaggctgctctgctcgggcaggcactacaggactctcggaactacggctggaaggtggaagagactggaatgtag

SEQ ID NO: 93852 - DNA, 1644 bp, Artificial Sequence
  derived and/or modified sequence
atggaggatgggcgcgccctagagggtaccctgtccgagcttgcagccgagaccgacctgcctgtcgtcttcgtcaagcagcgcaaaattggcggacacggtccaacattgaaagcttaccaggaaggacgccttcagaagctgctgaagatgaatggacctgaggacttgccaaagagctacgactacgaccttatcattattgggggaggttcagggggcttggcagcggctaaggaggcagcgcagtacggaaagaaggtgatggtgctggattttgtgacccccacgcctctcgggacacgttgggggttaggaggaacctgtgtcaacgtggggtgtattcctaaaaagctgatgcatcaggccgccctattaggccaggcgctgcaagatagccgcaactatggctggaaggtcgaagaaacagtgaaacatgactgggatagaatgatagaggctgtgcagaatcatatcgggtctctgaattgggggtaccgggtggccttgagagaaaaaaaggtcgtgtatgaaaacgcctacgggcaattcatcggaccccaccgaatcaaagctactaacaacaaaggcaaggagaaaatttacagcgctgagaggttcttgattgccactggcgagcggccgaggtatcttgggatccctggggacaaggagtactgtatctcatccgacgatctcttttcccttccctactgtccaggaaaaaccttggtggttggcgccagttatgttgcccttgaatgtgctgggttcctggccggaattggactcgacgtgacggtgatggtccggtcaatcctgctgcggggttttgaccaggatatggctaacaagataggcgagcatatggaagagcatggcattaagttcattcggcagtttgtgccaatcaaagtcgaacaaatcgaagcaggtacacccggacgcctgcgcgtagtcgcgcagtcaaccaactccgaagagataatagaaggggaatacaatactgtgatgttggcaatcggtcgcgacgcttgcacccgtaagattggcttagagacagtgggggtgaagatcaacgagaagacaggaaaaattccagtcactgacgaggaacagaccaatgtgccatacatctacgccattggcgatatcctcgaggataaggttgagttgacgcctgtggcaatccaggccggcagattactcgctcagcgactgtatgcaggtagtaccgtgaagtgtgattatgaaaacgttcctacgactgtttttacgcctctcgagtatggtgcctgcggactgtcggaggaaaaggcggtggaaaagttcggcgaggagaatattgaagtctaccattcttatttctggccacttgagtggactatcccatcgagagacaacaacaagtgctacgctaagataatatgcaacactaaggacaacgaaagagtggtcgggtttcacgtcttaggcccgaatgcaggggaggtcactcagggattcgcggccgctcttaaatgtgggttgaccaagaaacagctggattcgaccattgggatacaccccgtttgtgctgaggtcttcacaaccctatcagtgactaaacggagcggggccagcatcttgcaagctgggtgttag

SEQ ID NO: 93853 - DNA, 1494 bp, Artificial Sequence
  derived and/or modified sequence
atgaatggacctgaggacctgcccaagagctatgactatgacctgatcatcatcggcggcggcagcggcggcctggccgccgccaaggaggccgcccagtatggcaagaaggtgatggtgctggactttgtgacccccacccccctgggcacccgctggggcctgggcggcacctgtgtgaatgtgggctgcatccccaagaagctgatgcaccaggccgccctgctgggccaggccctgcaggacagcaggaactacggctggaaggtggaggagaccgtgaagcatgactgggacaggatgattgaggccgtgcagaaccacatcggcagcctgaactggggctacagagtggccctgcgggagaagaaggtggtgtatgaaaatgcctacggccagttcatcggcccccaccgcatcaaggccaccaacaacaagggcaaggagaagatctacagcgctgagcgcttcctgattgccactggagagcggccccgctacctgggcatccctggggacaaggagtactgcatcagcagtgatgacctcttcagcctgccctactgccctgggaagaccctggtggtgggcgccagctatgtggccctggagtgtgccggcttcctggccggcatcggcctggatgtgacagtgatggtgcgcagcatcctgctgcggggctttgaccaggacatggccaacaagatcggggagcacatggaggagcacggcatcaagttcatccggcagtttgtgcccatcaaggtggagcagattgaagctggcaccccaggccgcctgcgggtggtggcccagagcaccaacagcgaggagatcatcgagggggagtacaacacagtgatgctggccatcggcagagatgcctgcaccaggaagattggcctggagaccgtgggcgtgaagatcaatgagaagacaggcaagatccctgtgacagatgaggagcagaccaacgtgccctacatctatgccatcggggacatcctggaggacaaggtggagctgacccctgtggccatccaggccggccgcctgctggcccagaggctgtatgccggcagcacagtgaagtgtgactatgaaaatgtgcccaccaccgtcttcacccccctggagtatggagcctgtggcctgtctgaggagaaggctgtggagaagtttggagaagaaaatattgaggtgtaccacagctacttctggcccctggagtggaccatccccagccgggacaacaacaagtgctacgccaagatcatctgcaacaccaaggacaatgaaagagtggtgggcttccacgtgctgggccccaatgctggggaggtgacccagggctttgctgctgccctgaagtgtggcctgaccaagaagcagctggacagcaccatcggcatccaccctgtgtgtgccgaggtgttcaccaccctgtctgtgaccaagaggtctggggccagcatcctgcaggccggctgctag

SEQ ID NO: 93854 - DNA, 1626 bp, Artificial Sequence
  derived and/or modified sequence
atgctgagccggctggtgctgaacagctgggcccaggccatcatccggcccaggcctcccaaggtgctgggcctgcaggtgaccaccttcagcgaggcctaccaggagggccgcctgcagaagctgctgaagatgaatggacctgaggacctgcccaagagctatgactatgacctgatcatcatcggcggcggcagcggcggcctggccgccgccaaggaggccgcccagtatggcaagaaggtgatggtgctggactttgtgacccccacccccctgggcacccgctggggcctgggcggcacctgtgtgaatgtgggctgcatccccaagaagctgatgcaccaggccgccctgctgggccaggccctgcaggacagcaggaactacggctggaaggtggaggagaccgtgaagcatgactgggacaggatgattgaggccgtgcagaaccacatcggcagcctgaactggggctacagagtggccctgcgggagaagaaggtggtgtatgaaaatgcctacggccagttcatcggcccccaccgcatcaaggccaccaacaacaagggcaaggagaagatctacagcgctgagcgcttcctgattgccactggagagcggccccgctacctgggcatccctggggacaaggagtactgcatcagcagtgatgacctcttcagcctgccctactgccctgggaagaccctggtggtgggcgccagctatgtggccctggagtgtgccggcttcctggccggcatcggcctggatgtgacagtgatggtgcgcagcatcctgctgcggggctttgaccaggacatggccaacaagatcggggagcacatggaggagcacggcatcaagttcatccggcagtttgtgcccatcaaggtggagcagattgaagctggcaccccaggccgcctgcgggtggtggcccagagcaccaacagcgaggagatcatcgagggggagtacaacacagtgatgctggccatcggcagagatgcctgcaccaggaagattggcctggagaccgtgggcgtgaagatcaatgagaagacaggcaagatccctgtgacagatgaggagcagaccaacgtgccctacatctatgccatcggggacatcctggaggacaaggtggagctgacccctgtggccatccaggccggccgcctgctggcccagaggctgtatgccggcagcacagtgaagtgtgactatgaaaatgtgcccaccaccgtcttcacccccctggagtatggagcctgtggcctgtctgaggagaaggctgtggagaagtttggagaagaaaatattgaggtgtaccacagctacttctggcccctggagtggaccatccccagccgggacaacaacaagtgctacgccaagatcatctgcaacaccaaggacaatgaaagagtggtgggcttccacgtgctgggccccaatgctggggaggtgacccagggctttgctgctgccctgaagtgtggcctgaccaagaagcagctggacagcaccatcggcatccaccctgtgtgtgccgaggtgttcaccaccctgtctgtgaccaagaggtctggggccagcatcctgcaggccggctgctag

SEQ ID NO: 93855 - DNA, 1839 bp, Artificial Sequence
  derived and/or modified sequence
atgcctgtggatgactactggctgtgcctgcctgccagctgtgcccggccctttgtgcagacagtgcgggtggtgcagagctgcccccactgctgctggttccctggggtgctgcccagcgtgcctgagcccctgaggatgcctgccatgctgcccaccggcagccacagcgctgtgctgccccccagccactgcagcacagccccacccagcaccagccaggagcccagcagcagcgctgaccccaagctgtgcctgagcccccccaccagtgacagccggcaggagagaaatgtgcagtttggcctggcctaccaggagggccgcctgcagaagctgctgaagatgaatggacctgaggacctgcccaagagctatgactatgacctgatcatcattggaggcggcagcggcggcctggccgccgccaaggaggccgcccagtatggcaagaaggtgatggtgctggactttgtgacccccacccccctgggcacccgctggggcctgggcggcacctgtgtgaatgtgggctgcatccccaagaagctgatgcaccaggccgccctgctgggccaggccctgcaggacagcagaaattatggctggaaggtggaggagaccgtgaagcatgactgggacaggatgattgaagctgtgcagaaccacatcggcagcctgaactggggctacagagtggccctgcgggagaagaaggtggtgtatgaaaatgcctacggccagttcatcggcccccaccgcatcaaggccaccaacaacaagggcaaggagaagatctacagcgctgagcgcttcctgattgccaccggggagcggccccgctacctgggcatccctggggacaaggagtactgcatcagcagtgatgacctcttcagcctgccctactgccctgggaagaccctggtggtgggcgccagctatgtggccctggagtgtgccggcttcctggccggcatcggcctggatgtgacagtgatggtgcgcagcatcctgctgcggggctttgaccaggacatggccaacaagattggagagcacatggaggagcacggcatcaagttcatccggcagtttgtgcccatcaaggtggagcagatcgaggccggcaccccaggccgcctgcgggtggtggcccagagcaccaacagcgaggagatcattgaaggagagtacaacacagtgatgctggccatcggcagagatgcctgcaccaggaagattggcctggagaccgtgggcgtgaagatcaatgagaagacaggcaagatccctgtgacagatgaggagcagaccaacgtgccctacatctatgccatcggggacatcctggaggacaaggtggagctgacccctgtggccatccaggccggccgcctgctggcccagaggctgtatgccggcagcacagtgaagtgtgactatgaaaatgtgcccaccaccgtcttcacccccctggagtatggagcctgtggcctgtctgaggagaaggctgtggagaagtttggagaggagaacatcgaggtgtaccacagctacttctggcccctggagtggaccatccccagccgggacaacaacaagtgctacgccaagatcatctgcaacaccaaggacaatgaaagagtggtgggcttccacgtgctgggccccaatgctggggaggtgacccagggctttgctgctgccctgaagtgtggcctgaccaagaagcagctggacagcaccatcggcatccaccctgtgtgtgccgaggtgttcaccaccctgtctgtgaccaagaggtctggggccagcatcctgcaggccggctgctag

SEQ ID NO: 93856 - DNA, 1494 bp, Artificial Sequence
  derived and/or modified sequence
atgaatggacctgaggacctgcccaagagctatgactatgacctgatcatcatcggcggcggcagcggcggcctggccgccgccaaggaggccgcccagtatggcaagaaggtgatggtgctggactttgtgacccccacccccctgggcacccgctggggcctgggcggcacctgtgtgaatgtgggctgcatccccaagaagctgatgcaccaggccgccctgctgggccaggccctgcaggacagcaggaactacggctggaaggtggaggagaccgtgaagcatgactgggacaggatgattgaggccgtgcagaaccacatcggcagcctgaactggggctacagagtggccctgcgggagaagaaggtggtgtatgaaaatgcctacggccagttcatcggcccccaccgcatcaaggccaccaacaacaagggcaaggagaagatctacagcgctgagcgcttcctgattgccactggagagcggccccgctacctgggcatccctggggacaaggagtactgcatcagcagtgatgacctcttcagcctgccctactgccctgggaagaccctggtggtgggcgccagctatgtggccctggagtgtgccggcttcctggccggcatcggcctggatgtgacagtgatggtgcgcagcatcctgctgcggggctttgaccaggacatggccaacaagatcggggagcacatggaggagcacggcatcaagttcatccggcagtttgtgcccatcaaggtggagcagattgaagctggcaccccaggccgcctgcgggtggtggcccagagcaccaacagcgaggagatcatcgagggggagtacaacacagtgatgctggccatcggcagagatgcctgcaccaggaagattggcctggagaccgtgggcgtgaagatcaatgagaagacaggcaagatccctgtgacagatgaggagcagaccaacgtgccctacatctatgccatcggggacatcctggaggacaaggtggagctgacccctgtggccatccaggccggccgcctgctggcccagaggctgtatgccggcagcacagtgaagtgtgactatgaaaatgtgcccaccaccgtcttcacccccctggagtatggagcctgtggcctgtctgaggagaaggctgtggagaagtttggagaagaaaatattgaggtgtaccacagctacttctggcccctggagtggaccatccccagccgggacaacaacaagtgctacgccaagatcatctgcaacaccaaggacaatgaaagagtggtgggcttccacgtgctgggccccaatgctggggaggtgacccagggctttgctgctgccctgaagtgtggcctgaccaagaagcagctggacagcaccatcggcatccaccctgtgtgtgccgaggtgttcaccaccctgtctgtgaccaagaggtctggggccagcatcctgcaggccggcggctag

SEQ ID NO: 93857 - DNA, 1626 bp, Artificial Sequence
  derived and/or modified sequence
atgctgagccggctggtgctgaacagctgggcccaggccatcatccggcccaggcctcccaaggtgctgggcctgcaggtgaccaccttcagcgaggcctaccaggagggccgcctgcagaagctgctgaagatgaatggacctgaggacctgcccaagagctatgactatgacctgatcatcatcggcggcggcagcggcggcctggccgccgccaaggaggccgcccagtatggcaagaaggtgatggtgctggactttgtgacccccacccccctgggcacccgctggggcctgggcggcacctgtgtgaatgtgggctgcatccccaagaagctgatgcaccaggccgccctgctgggccaggccctgcaggacagcaggaactacggctggaaggtggaggagaccgtgaagcatgactgggacaggatgattgaggccgtgcagaaccacatcggcagcctgaactggggctacagagtggccctgcgggagaagaaggtggtgtatgaaaatgcctacggccagttcatcggcccccaccgcatcaaggccaccaacaacaagggcaaggagaagatctacagcgctgagcgcttcctgattgccactggagagcggccccgctacctgggcatccctggggacaaggagtactgcatcagcagtgatgacctcttcagcctgccctactgccctgggaagaccctggtggtgggcgccagctatgtggccctggagtgtgccggcttcctggccggcatcggcctggatgtgacagtgatggtgcgcagcatcctgctgcggggctttgaccaggacatggccaacaagatcggggagcacatggaggagcacggcatcaagttcatccggcagtttgtgcccatcaaggtggagcagattgaagctggcaccccaggccgcctgcgggtggtggcccagagcaccaacagcgaggagatcatcgagggggagtacaacacagtgatgctggccatcggcagagatgcctgcaccaggaagattggcctggagaccgtgggcgtgaagatcaatgagaagacaggcaagatccctgtgacagatgaggagcagaccaacgtgccctacatctatgccatcggggacatcctggaggacaaggtggagctgacccctgtggccatccaggccggccgcctgctggcccagaggctgtatgccggcagcacagtgaagtgtgactatgaaaatgtgcccaccaccgtcttcacccccctggagtatggagcctgtggcctgtctgaggagaaggctgtggagaagtttggagaagaaaatattgaggtgtaccacagctacttctggcccctggagtggaccatccccagccgggacaacaacaagtgctacgccaagatcatctgcaacaccaaggacaatgaaagagtggtgggcttccacgtgctgggccccaatgctggggaggtgacccagggctttgctgctgccctgaagtgtggcctgaccaagaagcagctggacagcaccatcggcatccaccctgtgtgtgccgaggtgttcaccaccctgtctgtgaccaagaggtctggggccagcatcctgcaggccggcggctag

SEQ ID NO: 93858 - DNA, 1701 bp, Artificial Sequence
  derived and/or modified sequence
atgcctgccatgctgcccaccggcagccacagcgctgtgctgccccccagccactgcagcacagccccacccagcaccagccaggagcccagcagcagcgctgaccccaagctgtgcctgagcccccccaccagtgacagccggcaggagagaaatgtgcagtttggcctggcctaccaggagggccgcctgcagaagctgctgaagatgaatggacctgaggacctgcccaagagctatgactatgacctgatcatcattggaggcggcagcggcggcctggccgccgccaaggaggccgcccagtatggcaagaaggtgatggtgctggactttgtgacccccacccccctgggcacccgctggggcctgggcggcacctgtgtgaatgtgggctgcatccccaagaagctgatgcaccaggccgccctgctgggccaggccctgcaggacagcagaaattatggctggaaggtggaggagaccgtgaagcatgactgggacaggatgattgaagctgtgcagaaccacatcggcagcctgaactggggctacagagtggccctgcgggagaagaaggtggtgtatgaaaatgcctacggccagttcatcggcccccaccgcatcaaggccaccaacaacaagggcaaggagaagatctacagcgctgagcgcttcctgattgccaccggggagcggccccgctacctgggcatccctggggacaaggagtactgcatcagcagtgatgacctcttcagcctgccctactgccctgggaagaccctggtggtgggcgccagctatgtggccctggagtgtgccggcttcctggccggcatcggcctggatgtgacagtgatggtgcgcagcatcctgctgcggggctttgaccaggacatggccaacaagattggagagcacatggaggagcacggcatcaagttcatccggcagtttgtgcccatcaaggtggagcagatcgaggccggcaccccaggccgcctgcgggtggtggcccagagcaccaacagcgaggagatcattgaaggagagtacaacacagtgatgctggccatcggcagagatgcctgcaccaggaagattggcctggagaccgtgggcgtgaagatcaatgagaagacaggcaagatccctgtgacagatgaggagcagaccaacgtgccctacatctatgccatcggggacatcctggaggacaaggtggagctgacccctgtggccatccaggccggccgcctgctggcccagaggctgtatgccggcagcacagtgaagtgtgactatgaaaatgtgcccaccaccgtcttcacccccctggagtatggagcctgtggcctgtctgaggagaaggctgtggagaagtttggagaggagaacatcgaggtgtaccacagctacttctggcccctggagtggaccatccccagccgggacaacaacaagtgctacgccaagatcatctgcaacaccaaggacaatgaaagagtggtgggcttccacgtgctgggccccaatgctggggaggtgacccagggctttgctgctgccctgaagtgtggcctgaccaagaagcagctggacagcaccatcggcatccaccctgtgtgtgccgaggtgttcaccaccctgtctgtgaccaagaggtctggggccagcatcctgcaggccggctgctag

SEQ ID NO: 93859 - DNA, 420 bp, Artificial Sequence
  derived and/or modified sequence
atgctgagccggctggtgctgaacagctgggcccaggccatcatccggcccaggcctcccaaggtgctgggcctgcaggtgaccaccttcagcgaggcctaccaggagggccgcctgcagaagctgctgaagatgaatggacctgaggacctgcccaagagctatgactatgacctgatcatcatcggcggcggcagcggcggcctggccgccgccaaggaggccgcccagtatggcaagaaggtgatggtgctggactttgtgacccccacccccctgggcacccgctggggcctgggcggcacctgtgtgaatgtgggctgcatccccaagaagctgatgcaccaggccgccctgctgggccaggccctgcaggacagcaggaactacggctggaaggtggaggagaccggcatgtag

SEQ ID NO: 93860 - DNA, 1644 bp, Artificial Sequence
  derived and/or modified sequence
atggaggatggccgggccctggagggcaccctgtctgagctggccgctgagacagacctgcctgtggtgtttgtgaagcagaggaagattggaggccacggccccaccctgaaggcctaccaggagggccgcctgcagaagctgctgaagatgaatggacctgaggacctgcccaagagctatgactatgacctgatcatcatcggcggcggcagcggcggcctggccgccgccaaggaggccgcccagtatggcaagaaggtgatggtgctggactttgtgacccccacccccctgggcacccgctggggcctgggcggcacctgtgtgaatgtgggctgcatccccaagaagctgatgcaccaggccgccctgctgggccaggccctgcaggacagcaggaactacggctggaaggtggaggagaccgtgaagcatgactgggacaggatgattgaggccgtgcagaaccacatcggcagcctgaactggggctacagagtggccctgcgggagaagaaggtggtgtatgaaaatgcctacggccagttcatcggcccccaccgcatcaaggccaccaacaacaagggcaaggagaagatctacagcgctgagcgcttcctgattgccactggagagcggccccgctacctgggcatccctggggacaaggagtactgcatcagcagtgatgacctcttcagcctgccctactgccctgggaagaccctggtggtgggcgccagctatgtggccctggagtgtgccggcttcctggccggcatcggcctggatgtgacagtgatggtgcgcagcatcctgctgcggggctttgaccaggacatggccaacaagatcggggagcacatggaggagcacggcatcaagttcatccggcagtttgtgcccatcaaggtggagcagattgaagctggcaccccaggccgcctgcgggtggtggcccagagcaccaacagcgaggagatcatcgagggggagtacaacacagtgatgctggccatcggcagagatgcctgcaccaggaagattggcctggagaccgtgggcgtgaagatcaatgagaagacaggcaagatccctgtgacagatgaggagcagaccaacgtgccctacatctatgccatcggggacatcctggaggacaaggtggagctgacccctgtggccatccaggccggccgcctgctggcccagaggctgtatgccggcagcacagtgaagtgtgactatgaaaatgtgcccaccaccgtcttcacccccctggagtatggagcctgtggcctgtctgaggagaaggctgtggagaagtttggagaagaaaatattgaggtgtaccacagctacttctggcccctggagtggaccatccccagccgggacaacaacaagtgctacgccaagatcatctgcaacaccaaggacaatgaaagagtggtgggcttccacgtgctgggccccaatgctggggaggtgacccagggctttgctgctgccctgaagtgtggcctgaccaagaagcagctggacagcaccatcggcatccaccctgtgtgtgccgaggtgttcaccaccctgtctgtgaccaagaggtctggggccagcatcctgcaggccggctgctag

SEQ ID NO: 93861 - DNA, 1494 bp, Artificial Sequence
  derived and/or modified sequence
atgaacggccccgaggacctgcccaagagctacgactacgacctgatcatcatcggtggaggcagcggaggactggcggcagctaaggaggccgcccagtacggtaagaaggtaatggtccttgattttgtgacaccaacccctttagggacaagatggggactcggggggacctgtgtgaacgtggggtgcatccccaaaaaactgatgcaccaggccgcgctgctgggccaggccctgcaggattcccgaaactacggctggaaagtggaagagaccgttaagcacgattgggacagaatgatcgaagcagtgcagaatcatatcgggtcactgaattggggctatagggtagccctacgcgagaagaaggtcgtatatgaaaacgcatatgggcagtttataggcccacaccggatcaaggcaactaacaataaaggcaaagaaaagatttattccgcggagagattcctgatcgctacaggcgaaagacccagatacttgggaatcccaggcgacaaggaatattgtattagttcagacgacctctttagcctgccctattgtcccggtaagacactggttgttggggcaagctatgttgccttggagtgcgcaggatttctggccggcataggattggatgtcactgttatggtgagatccatcttgctccggggctttgatcaagacatggcgaataaaataggggagcatatggaggagcatggcataaaattcatccggcagttcgtgccaatcaaggtcgagcagatcgaggcaggcacacctggtagactgcgggtggtagcacagagcactaacagtgaggaaatcatagagggagagtataatactgttatgttggctattggccgggacgcttgtacgagaaaaataggcctggaaacggtgggggttaagatcaatgaaaagacaggtaagataccagtcaccgatgaagaacagactaatgtcccatacatttacgccattggtgacattctcgaggacaaagtcgaattaacacccgtggctatacaggcaggtagactgcttgcacagcgcctttacgcagggtcgaccgtcaaatgtgattacgagaacgtgccaaccactgtcttcacccctctggagtatggggcttgcggtttgagcgaggaaaaagctgttgaaaagtttggagaggaaaacatcgaggtctatcactcttacttctggcctctggagtggaccattccgagccgcgataacaacaaatgttatgcaaagataatttgcaacaccaaagataacgaacgcgtggtcggcttccacgtgctaggccctaatgcgggagaagtgacacaagggttcgctgccgccctgaagtgtgggctcactaaaaagcagcttgacagtacaattggtattcacccggtgtgcgccgaggtcttcacaactctttcagttaccaaaaggtctggagccagtatcttacaggcaggatgctag

SEQ ID NO: 93862 - DNA, 1626 bp, Artificial Sequence
  derived and/or modified sequence
atgctgagccggctggtgctgaacagctgggcccaggccatcatccgaccaaggcctccaaaggtcctggggctgcaggtgactacattctctgaggcataccaggaggggcggctgcaaaaattacttaagatgaacggcccagaagatctgccaaaatcctacgactacgatttaattatcattgggggaggatccggaggactagccgccgccaaagaggccgctcagtacggcaaaaaagtgatggtgctagatttcgtgacccccactcccttaggaaccaggtggggtctgggagggacttgcgtgaatgtagggtgtattccgaagaaactcatgcaccaggcagccctcctgggccaggccctccaggatagcagaaactatggctggaaggtcgaggaaaccgtgaaacatgactgggatcgaatgatagaggccgtacagaatcacatagggtccttaaactggggctacagggtggctctgagagaaaagaaagtagtgtatgagaacgcttacggacagttcatcggtccacatcggattaaggccaccaataacaagggcaaggaaaagatttactctgcagagaggttcctgattgctacgggagaacggcccagatacttggggatccccggagacaaggagtactgcatttcctcagatgacctgttcagcctgccctactgccctggcaagaccttagttgtcggggcctcctacgtggcgctagagtgtgccggatttctcgccgggatcggcctggatgtcactgtgatggtccgcagtatcttactgcgaggctttgatcaggacatggctaacaaaataggcgagcatatggaggaacacggtatcaaattcatcagacagttcgtgccaattaaggtcgagcaaatagaagcagggacccctgggagactgcgcgtagtggcccagtccacaaattctgaggagataatagaaggagaatataacactgttatgttggcgattggcagagacgcatgcacccggaaaataggactggagaccgtcggagtcaagattaacgagaagaccggtaaaatcccagtcaccgacgaggaacaaaccaatgtaccttatatatacgccatcggggatattctcgaggataaagtggagctcacgcccgtggctatccaagcaggccgcctcctggcccagcgtttgtacgccgggagtaccgtcaaatgcgactacgagaacgtgccaacaaccgtgttcactcctctggagtatggagcctgtggcctgtccgaggaaaaagcggtggagaaattcggagaggaaaacattgaggtttaccatagctatttctggccattggagtggaccattccatccagagacaacaacaaatgctatgcaaagataatctgtaacacaaaggacaatgaaagggtcgtcgggttccacgtactggggccaaatgccggtgaggttactcaggggttcgccgcagcccttaagtgcgggcttacgaaaaagcagcttgactcaaccattggcatccaccctgtatgtgccgaggtgttcacgactctgtccgtcacaaagagaagtggtgcatctatactccaagctggttgctag

SEQ ID NO: 93863 - DNA, 1839 bp, Artificial Sequence
  derived and/or modified sequence
atgcccgtggacgactactggctgtgcctgcccgccagctgcgcccgccccttcgtgcaaacagtccgagtagttcagtcttgtccacactgctgttggttccctggggtgctgcctagtgtgcctgagccacttcgcatgcccgccatgttgcccaccgggagtcactcggctgtcctgcccccaagtcattgtagtaccgcccctccgtcaacctcccaagagccgtctagtagcgcagacccgaagctttgtttgagcccaccaacctctgattcaagacaggagcggaatgtccagttcggcctggcttatcaggagggacgcttacagaaactgctcaaaatgaatggcccagaggatcttcctaaatcttacgattacgatctcataatcatagggggaggctcagggggcctggctgccgctaaggaagctgctcagtacgggaagaaggtcatggtattggactttgttactcccacgcctctcggcactcgctgggggctgggggggacctgcgtgaacgtgggatgcattccaaagaagctgatgcatcaagctgcactgctcggccaggcccttcaggactccaggaactacggatggaaagttgaggagacagtgaagcacgactgggataggatgatcgaggccgtccaaaaccatatcgggagcctcaactggggttatagagttgctctgcgggaaaagaaagtggtgtacgaaaacgcctacgggcagtttataggaccccataggatcaaggcgacaaataacaagggcaaggaaaagatctattctgccgaacgctttctcatcgccacaggcgaaagaccaagatacctgggcatccccggagacaaggagtattgtatctcgtctgatgacctgtttagcctaccatattgtcctggcaagaccctggtagttggcgctagctacgtggcattagaatgtgcgggcttcctggcgggaatcggcttggatgtcactgtgatggtacgctcaattctcctgaggggcttcgatcaggacatggccaacaaaattggcgagcacatggaagagcacggaatcaaattcatccgtcagttcgtaccgatcaaggtggagcaaatcgaggccggtactcccggacggctgagggtggtggcgcagtcaacgaatagcgaagagatcatcgaaggagagtacaacaccgtgatgcttgccattggtagagatgcgtgtacaaggaagattggcctcgaaactgtgggcgtgaagattaacgagaagacaggtaagattccagtcactgacgaggagcaaacgaacgtgccctacatttatgcaatcggcgatatcctggaagataaggttgaactgacacccgtagctatccaggctgggcgtttactggctcaaagactgtacgcgggcagcacagtgaaatgcgactacgagaacgtacctaccaccgtctttacacccctggagtacggagcttgtggcctttccgaagagaaagccgtggaaaagttcggggaagagaacattgaggtttaccattcctacttctggcctctcgagtggacaattccctcgcgagacaacaataagtgttatgccaagattatctgcaatacgaaggacaacgagcgtgtagtgggattccatgtgttagggccaaatgccggcgaggttacacaggggttcgccgctgctctgaaatgcggcttgactaaaaagcagctggattctacaattgggatacatcccgtgtgcgccgaagttttcacaacgctctccgtcactaagcgttccggcgcctcaattcttcaggcaggatgttag

SEQ ID NO: 93864 - DNA, 1500 bp, Artificial Sequence
  derived and/or modified sequence
atgaacggccccgaggacctgcccaagagctacgactacgacctgattattatcgggggtggatccggggggctggccgccgcaaaagaagctgctcagtacgggaagaaagtgatggtgctggacttcgtgacacccaccccactgggcacccgttggggcctaggtggtacctgcgtaaatgtgggctgtattcctaagaaattgatgcaccaagccgcgttactcgggcaggctctgcaggattcacggaattacggatggaaggtggaggaaaccgttaaacacgattgggaccgaatgattgaagctgtgcaaaaccacatcggcagcctgaattggggctaccgggtcgccctaagggagaagaaagtagtttacgaaaatgcttacggtcagttcattggacctcaccgaatcaaagccaccaataataagggcaaagagaaaatctattctgcagagaggtttctcatcgccacaggtgaaaggccccgctacctggggattccgggcgataaggaatactgtatctcctctgatgatttgttctcccttccatattgcccaggtaagaccctggtggtaggggcgagctatgtggcacttgagtgcgccggatttctggccggcatcggtctggacgttacggtgatggtacggtctattttactgcggggctttgatcaggacatggcaaataaaatcggcgagcatatggaggagcatggtattaaattcatccgccagtttgtgcctattaaggttgagcagattgaggccggaaccccaggcaggctgcgggtcgtagcacaaagcaccaactctgaagaaatcatcgagggcgaatataacaccgtcatgctggctattggaagggacgcctgcactagaaagattggccttgaaaccgtgggcgtgaaaataaacgagaaaacgggcaaaatcccggtgaccgacgaggagcagaccaacgtaccatacatctatgcaatcggtgatattctggaagacaaggttgaacttaccccagtggcaatccaggcagggcggctcctagctcaacgcctatacgccggcagcactgtcaagtgcgattatgagaacgtgccaacaactgtgttcaccccactcgaatacggcgcctgcgggctgagcgaagaaaaagccgttgagaagtttggggaagaaaacattgaagtctaccacagttatttttggccactggaatggacaatcccttcccgtgataacaacaaatgctacgctaaaattatatgcaatactaaagacaacgaaagagtggtggggttccatgtactcggccctaatgctggagaagtcactcaaggttttgccgctgcgctgaagtgcgggcttaccaagaaacagctggatagcacgatcggtattcaccccgtgtgtgccgaggtcttcaccaccctgagtgtgacaaaaaggtcaggtgctagcatcctccaggcaggatgttgaggttag

SEQ ID NO: 93865 - DNA, 1500 bp, Artificial Sequence
  derived and/or modified sequence
atgaacggccccgaggacctgcccaagagctacgactacgacctgataattatcggtggaggctccggcggcctagctgccgcaaaggaagcagcacagtatggcaagaaagtcatggtgttggacttcgttacgcctacgcccttaggtactcggtggggactgggggggacgtgcgttaacgttgggtgtattcctaagaagctaatgcatcaggctgccctgctgggccaagcccttcaggactctagaaactatggttggaaagttgaagagaccgtcaagcacgactgggatcgtatgattgaggccgtgcagaatcacatcggatcactgaattggggctaccgcgtagcactcagggagaagaaggttgtgtatgaaaacgcttacgggcagttcattggtccccatagaattaaagccaccaacaacaaagggaaggaaaaaatttactccgccgagcgtttcctgatcgctaccggggagcggccccggtatctggggatccccggcgataaggaatattgcatttcatccgatgatctgttcagtctcccatactgcccaggaaaaactcttgtggtcggtgcatcatacgtggccctggagtgcgcgggctttctagcagggatcgggttagacgtgaccgtgatggttcgttcaatattgctccgaggttttgaccaagacatggccaacaagattggagagcatatggaggagcacggaattaagttcatccgccagttcgtcccaatcaaggtggagcagatcgaggcgggcacacccgggagactccgagtggtggcgcagtcaactaactcggaggaaatcatcgaaggcgaatacaacactgttatgctggcaatcggccgcgacgcttgcactaggaaaatcggtctcgagacagtaggcgttaagattaacgagaaaacaggaaagattcctgtgacagatgaggagcagaccaatgtgccctacatatacgctattggcgacattctggaggacaaggttgagctcacccctgtggcaattcaagccggacgacttctggcccagcgcctgtatgctggctccactgtcaagtgtgactatgagaacgtgcctaccacggtgttcacccccctcgaatacggcgcttgcgggctatcggaggagaaggcagtagaaaagtttggcgaggaaaacattgaagtgtatcactcatatttctggccattagaatggacaattccctcaagagacaataacaaatgttacgcaaagatcatctgcaacaccaaagataatgagcgggtcgttggcttccacgttctaggtccgaatgctggcgaggtgacacagggtttcgccgccgccctgaaatgcggccttacaaaaaagcaactggatagtaccattggaattcaccctgtctgcgccgaggtgtttacaactctgagtgtcaccaagaggtcgggcgcttctatcctccaggcaggctgctgaggctag

SEQ ID NO: 93866 - DNA, 1632 bp, Artificial Sequence
  derived and/or modified sequence
atgctgagccggctggtgctgaacagctgggcccaggccatcatcaggccaagaccaccaaaagtgctaggcctgcaggtgacaacattcagcgaagcctaccaggagggtcgtctgcaaaagctccttaagatgaacgggcccgaggacctgcccaagagttatgattacgacttgatcatcataggcggcggaagcggagggctggcagccgctaaggaggccgcacagtacggcaaaaaggttatggtgctggatttcgtgaccccaacgcctctgggcactcgatggggtcttggcggtacgtgcgtaaacgtgggctgtattccgaagaagctgatgcaccaggccgctctgctgggacaagccctgcaggatagtcggaattacggatggaaagtagaggagactgttaagcatgattgggatcgaatgattgaggcggtgcaaaatcatattgggagtcttaactggggatatagagtggcccttcgcgagaagaaggtcgtgtatgagaacgcttacggccagttcataggaccacaccgcattaaggcgaccaacaacaaagggaaagagaagatctattcagctgagcgatttctgatcgctactggagaacgaccccggtatttgggtatccccggcgataaggagtactgcatttcctccgacgacctgttctctctcccatactgtcccggaaagacccttgtggtgggtgccagctatgtcgccctagagtgcgcaggattccttgcgggcatagggctggacgtaactgttatggtacgctctatactgctccgcggctttgatcaagacatggctaataagatcggagaacatatggaggaacacgggattaaattcatacgccagttcgtgccaattaaagtggagcaaatagaggctgggactcccgggaggctgcgcgttgttgcccagtcaacaaactctgaagaaatcatagagggggaatacaacacggtgatgctggccatcgggcgcgatgcctgtactcgtaagatcgggctggagaccgttggcgtgaagattaacgagaagacaggaaagattccggtcaccgacgaagaacagactaatgtgccttacatctatgccatcggagatatcctcgaagataaggtggagttgacccccgtagctattcaggccgggcgactactggcccagcgtttatacgctgggagcacggtgaaatgcgattacgaaaacgtgcccacaactgttttcacccccctggaatacggcgcatgcgggctgtctgaagagaaagccgtggaaaagttcggagaagaaaacattgaggtttatcatagttatttctggccgctcgagtggacaataccgagcagggataacaacaaatgttatgctaagattatctgcaatacaaaggacaacgagcgagtggtgggctttcacgtgcttggaccgaacgccggagaagtcacccaggggttcgccgccgcactaaaatgtggtctgacaaagaagcaacttgattccactatcggaattcatccagtatgtgctgaagtttttaccacactgtcagtgaccaagaggtccggggcctccatcctgcaggcgggctgttgaggatag

SEQ ID NO: 93867 - DNA, 1707 bp, Artificial Sequence
  derived and/or modified sequence
atgcccgccatgctgcccaccggcagccacagcgccgtgctgcccccaagtcactgcagcaccgcgccgccttcgacatcgcaagagccaagcagttcggccgatccaaaactttgtttgagcccccctacatctgatagcaggcaggaacgtaacgtgcagtttggactggcataccaggaaggtaggcttcaaaagttattgaagatgaacggacctgaagacctgcctaagagctatgattacgatcttatcattattggcggcgggtcaggaggcttggccgcagcgaaggaggccgcccaatatggcaagaaagtcatggtcttggacttcgttacaccaactcctctgggaaccaggtggggcctcggcggtacctgcgtaaatgtcggctgcattcctaagaagctgatgcaccaggcagcacttctcggacaggccctgcaggattctcgtaattatggttggaaggtggaagagacggtcaaacacgactgggaccgaatgatcgaggctgtccagaaccacattggaagcttgaactggggctatcgggtggcattgcgggagaaaaaggtggtgtatgaaaacgcttatggccaatttattggaccccaccggatcaaggcaaccaacaataaggggaaggagaaaatatacagcgcagaaaggtttttgatcgccactggagaaagaccccggtatctgggaattcccggcgacaaggagtattgtattagttccgacgaccttttctccctgccctactgtcccggcaaaacactggttgtgggagcctcatacgtggcactggagtgcgccggattcttggccggaatagggctggatgtcacggttatggtgaggtctatcctgctgcggggtttcgaccaggacatggccaacaaaataggggagcacatggaggagcatggaataaagttcattcgacagttcgtacccatcaaagtggagcagatagaggccggcacgccaggcagattacgggtggtggcccaatctactaacagcgaggaaattatcgaaggagagtacaataccgtaatgctagctattggccgggacgcatgtaccagaaagataggactggaaaccgtgggcgtaaagattaacgagaagacaggtaaaatcccagtgactgacgaggaacaaacaaacgtcccttatatctatgcaattggtgatattctcgaagacaaggtggagcttaccccagttgctatccaggccggtcgcctgctggcccagcgtctgtacgccggctccaccgttaagtgcgattacgaaaatgtgccgacaacagtgttcacacccctcgagtatggagcctgtgggttgtcagaggagaaagccgttgagaaattcggggaggagaacatcgaggtgtaccacagttacttttggcctctggaatggaccattccatcaagggacaataacaagtgctatgcaaagatcatatgcaacaccaaagacaatgagagagtagtaggattccacgtcctgggtcctaacgccggagaggtcacccagggcttcgctgcggccctcaaatgcggcctgacaaaaaagcagctcgattctaccataggcatacacccggtgtgtgcggaggtgttcaccacactgtccgtcacgaaacgctcgggggcctctatcttgcaagcaggttgctgaggctag

SEQ ID NO: 93868 - DNA, 420 bp, Artificial Sequence
  derived and/or modified sequence
atgctgagccggctggtgctgaacagctgggcccaggccatcatccggcctcgcccgcctaaagttttaggactccaggttaccacattctcagaagcatatcaggagggccggttgcagaagcttctaaagatgaacgggccggaggacctgcctaaaagctacgactacgacctgatcatcattgggggcggttccggcggcctggccgccgccaaagaggcggcccaatacggtaaaaaagtgatggtgttggattttgtgacccctacccccttgggcacacgttgggggttggggggaacctgtgtcaacgtggggtgtattccaaagaagttgatgcatcaggcagccctcctcggccaagcactgcaggactcccggaattacggatggaaggtcgaagagactggtatgtag

SEQ ID NO: 93869 - DNA, 1644 bp, Artificial Sequence
  derived and/or modified sequence
atggaggacggccgggccctggagggcaccctgagcgagctggccgccgagactgacctgcccgttgtctttgtcaagcagcgcaagataggaggacacggccccactctgaaagcctatcaggagggaagactccagaaactgctgaagatgaatgggcccgaggacctccccaagagctatgactatgacttaatcatcatcggagggggctcaggcggccttgcagccgccaaggaggctgcacagtacggaaagaaggttatggttctcgacttcgtcacccccactccgttgggcactcggtggggattgggaggaacctgtgtgaacgtgggctgcatacccaagaagctcatgcaccaagctgcccttctgggacaggcacttcaggactcccgaaattacggttggaaggtggaggaaactgtgaaacatgattgggacaggatgattgaggccgtacagaaccacattggcagcctaaattgggggtaccgagtggctctaagagaaaagaaagtagtgtacgagaacgcatacggtcagttcatcggccctcatcgaatcaaagccacaaacaacaagggtaaggagaagatttattccgccgaacgcttccttatcgccaccggggagcggcctagatacttaggcatcccaggtgacaaggagtattgcatcagctcagacgatctttttagtctgccttattgccctggcaagacattggtggtgggggcctcctacgtcgcactagagtgcgcaggatttcttgccggcatcggtctcgatgtgactgttatggttcgttcgatcttattgaggggatttgaccaggatatggcgaacaagattggagagcacatggaagaacacggcatcaaatttataaggcaattcgttccaattaaggttgagcaaattgaagccggtactcccgggcgtctgagagtagtcgcccaatccaccaactccgaggagatcatcgagggggaatataatactgtcatgctggccattggtagggacgcgtgcacaaggaagatagggctggaaacggttggagttaagatcaacgaaaaaacaggaaagatccccgtgaccgatgaggaacagactaacgtcccgtacatctacgccattggtgacatactggaagacaaggtggaactgaccccagttgccattcaggccgggaggctgctcgcccagaggctatacgctgggtccactgtgaagtgtgactacgagaacgttccgaccactgtgttcaccccgctggagtatggcgcatgtggtttgtccgaagagaaggctgtcgagaaatttggcgaagaaaacatcgaagtttaccattcttacttttggccactagaatggaccatcccatccagagataataacaagtgttatgctaagattatttgtaatacgaaggataacgagcgagtggtcgggtttcacgtgctagggcccaacgctggggaggtcacacagggattcgccgctgctctaaaatgtggcttgaccaaaaaacagctggattccacgatcgggattcacccggtgtgcgccgaagtatttacaaccttaagcgtcaccaaaaggagtggcgccagtatcctgcaggctgggtgttag

SEQ ID NO: 93870 - DNA, 1494 bp, Artificial Sequence
  derived and/or modified sequence
atgaatggacccgaagacctccccaagagttacgattacgatctgatcatcatcgggggtgggtcgggcggattagccgcagcaaaggaggctgcacagtacggtaaaaaggtaatggtcctcgatttcgttactcctacacccttggggacccggtggggactgggagggacatgcgtaaacgtaggatgcatccccaaaaaactaatgcaccaggcagcactgctggggcaggccctgcaggactccagaaattacggctggaaggttgaggagaccgtaaaacacgactgggacaggatgattgaggccgtccagaaccatatcgggtccctcaattggggatacagggtggcccttcgggagaaaaaggtggtgtacgagaacgcgtacgggcagttcatcgggcctcacagaattaaagcaactaacaataaaggaaaggaaaagatatactctgcagagagattcttaatagctacaggcgagagaccccgttacttaggaataccaggagataaagagtattgtattagctcagacgatctcttctctcttccctattgccccggaaaaaccttagtcgtgggggcttcttatgtggccctggagtgcgccggttttttggccggtattggactggatgtgacagtcatggtccgtagcatactcctgagaggcttcgaccaggacatggccaataaaattggagagcatatggaagagcacggtatcaaattcatccgccagtttgttccaattaaagttgagcaaatcgaggcgggtacaccgggacgactccgtgtggtggcacagagcaccaattccgaagagatcattgagggcgaatacaacactgtgatgctggccatcgggcgagacgcctgcactcgaaagatcgggctggaaaccgtcggtgttaaaatcaatgaaaaaacgggaaaaatccccgtaacagatgaagagcagacgaatgttccttacatctatgccattggggatatcctggaggacaaagttgagctcacccctgtggcaatacaggccggtcgacttttggctcagagattatatgcgggatccacagtcaaatgcgactacgagaacgtgccaactacggttttcaccccgctggagtatggggcatgtgggctttccgaggaaaaggccgttgagaagttcggcgaagagaacattgaagtgtatcacagctacttctggcctctggaatggacaatcccaagccgggataataacaagtgttacgccaaaataatatgtaataccaaggataacgaacgggtggtgggctttcatgtgttagggcctaatgctggggaagtgacccaaggtttcgcggcagccctcaagtgcggtctgaccaagaagcagctcgatagcacgatcggcatccaccctgtgtgcgccgaggtatttacgacactgagtgtgactaaacgtagcggggcttctattctgcaggccggatgctag

SEQ ID NO: 93871 - DNA, 1626 bp, Artificial Sequence
  derived and/or modified sequence
atgctcagcagacttgtgctgaattcatgggcacaagccatcattaggcccaggcctccaaaggtactgggcctgcaagtaacaaccttctctgaagcttatcaggaggggaggttgcagaagctcctgaagatgaacgggcctgaagacttgcccaaatcctatgactacgaccttatcattatcggaggcggaagtggtgggctggctgcagccaaggaagccgcacagtatggcaaaaaagtcatggtgctggacttcgtgactcctacacccctgggaaccagatggggcctgggcggtacatgtgttaatgtcggatgtatccccaagaaactaatgcaccaagcagccctgctcggtcaggccctgcaggatagtcgcaattatgggtggaaagttgaggagactgtcaaacatgactgggacagaatgattgaggccgtgcaaaaccatattggatccctgaactggggttaccgcgtagccctgcgggaaaaaaaggtcgtttatgagaatgcttacggccagtttattgggccacaccgcatcaaggcaactaacaacaaaggcaaggagaagatctactcagccgagaggttcctgattgccaccggcgaacgacctagatacctgggcattcctggcgataaagaatattgcatctccagtgatgatctgttctcccttccctattgtcccggtaagaccttagtagtgggagctagttacgtggccttggaatgtgctgggtttttagcagggattggcctggatgttacagtgatggtcagaagtatcttgctaaggggatttgaccaggatatggctaacaagattggcgagcacatggaagaacatgggatcaagtttattcgacagtttgttcccatcaaggtagaacagatcgaggcagggacacctgggagacttcgtgtggtggcacaatccaccaatagcgaggagattatcgagggggagtataatacagtcatgctagcgatcggtagggatgcctgtactcggaagattggcctggagactgttggagttaagattaatgagaagactggtaaaataccagtgaccgatgaagagcagacaaacgtcccctacatatatgcgattggggacatcctcgaggacaaggttgagctgactccagtggccattcaggccggtcgcttacttgctcagcgtctctatgccggttctacagtgaagtgtgactatgaaaacgttccaacaaccgtattcacacccttggagtatggtgcatgtggactgtctgaggagaaggccgtggagaagttcggggaagaaaatatcgaggtgtatcacagctatttctggcccctggagtggaccataccctcaagggacaacaacaagtgctacgccaagatcatctgtaatactaaggacaacgagcgggtggtcggattccacgtcctggggccaaacgcaggtgaagtgacacaaggttttgcagctgcgctgaagtgcggccttactaagaagcagctggactcgaccattgggattcaccccgtctgcgctgaggtcttcaccacactgagcgtgacaaagagatccggcgcttctatactgcaggccggatgctag

SEQ ID NO: 93872 - DNA, 1839 bp, Artificial Sequence
  derived and/or modified sequence
atgcctgtggatgactactggttgtgcctaccagcgagctgcgctcgtcccttcgtccagaccgtgagagtcgtccagtcatgtccacattgttgctggtttccgggagtactgccaagcgttccggagccccttcgcatgcccgctatgcttccaaccgggagccattcggcagtgctcccaccctcacactgctccacagctcccccttccacaagccaggaaccgtccagttccgcggatcctaagctctgcttatcccctccaacaagcgacagccgtcaggaaaggaatgttcagtttggcctggcataccaggaggggcgactccaaaagctcctgaagatgaacggcccagaggaccttcctaaatcgtatgactacgacttgatcattatcggcggaggttcagggggtttggctgctgcaaaggaagctgcccagtatggtaagaaggttatggtgcttgattttgtgactccaacgcccctggggacaagatggggtttgggaggcacatgcgtgaatgtgggttgcatccctaagaagttgatgcaccaggcagccctcctggggcaagccttacaggacagccgaaattatgggtggaaggtggaagagactgtgaaacacgattgggacaggatgattgaggcggtgcagaatcacataggttctctgaactgggggtaccgagtggctctccgggagaagaaggtagtttacgaaaatgcttatggtcaatttattgggccacaccgcatcaaagccactaacaataagggaaaagagaagatctacagtgcagaaaggtttcttatcgcaacaggggaacgacccaggtacttaggaatccctggggacaaggagtactgcattagttcagacgatctctttagcctgccctattgtccaggaaaaacacttgttgtgggcgcatcttatgtcgccctggagtgtgcaggcttcctggcaggtatcggcctggacgtgactgtgatggtccgcagcattctgctgcgaggcttcgatcaggacatggccaataaaattggagaacacatggaggaacacggaattaaatttattcggcagtttgtgccaataaaggtggagcagatcgaggctggtacacctggccgtctaagggtggtagcccagagtacaaactccgaagaaattatcgagggtgaatacaacaccgtaatgctggccataggtagagacgcctgcactaggaaaatcggtctggagactgtcggcgtcaagatcaatgaaaagaccggcaagatcccagtgaccgacgaagaacagacaaatgttccttatatctatgctattggggacattctggaagacaaagtcgaacttactccagtcgccatacaggctgggaggctgctcgcgcagcgcttgtacgccggatcaaccgtgaagtgtgattacgagaatgtgccaacaaccgtgtttactcccttggaatacggggcttgtggcttaagtgaagagaaggccgtcgagaagttcggtgaggagaacatcgaagtctatcattcctatttctggcccctggagtggaccatccctagtagagataataacaagtgctatgcgaaaataatttgtaacacgaaggataacgaaagagtggttggctttcacgtgctgggacccaatgctggcgaggtcacacagggcttcgccgctgccctgaaatgtggcctcacaaaaaaacagctggacagcacaattggaatacacccagtttgcgccgaagtcttcacgaccctgtctgttaccaaaagatcaggtgcgagtatcctccaagccggatgctag

SEQ ID NO: 93873 - DNA, 1500 bp, Artificial Sequence
  derived and/or modified sequence
atgaacggacccgaggacttgcccaagtcttatgactatgacctcatcataatcgggggtggctctgggggtctcgctgccgctaaggaagccgctcaatacgggaaaaaggtgatggtcctggattttgttacccccactcccctcggtaccagatggggccttggtggtacttgtgttaacgtcggatgtattccaaaaaagttaatgcaccaggcggcacttctgggacaagccctccaggactcccgaaactacggttggaaagtggaggagacagtgaaacatgactgggaccggatgattgaggcagtgcaaaaccacattggctctctcaattgggggtacagggtagccctgcgcgagaaaaaagtggtgtacgaaaacgcgtatggacagttcattggtccgcaccgcattaaagcaaccaacaacaagggcaaggaaaagatttactccgctgaacggttccttatagccaccggggagagacccaggtatctggggattccaggcgataaagaatattgtatcagtagtgatgatctattctcacttccctactgtccaggtaagacgctggtcgtgggcgcatcatacgtagccctggaatgtgccggttttctcgcagggatcggattggacgtgacggtgatggttagaagtatactgcttaggggtttcgaccaagatatggcaaataagattggcgaacacatggaagagcacggcatcaaatttattcggcagttcgttcccattaaagtagaacagatcgaagccggaacaccagggagactcagagtggttgctcaaagtacaaacagcgaggagatcatcgagggcgaatataatacggtcatgttagccatcgggcgagacgcttgtacccgcaaaatcggtctggagacggtgggcgtgaaaattaacgagaagacaggcaagataccagtcaccgatgaagaacagacaaacgtgccatacatctacgccattggcgatattttagaagacaaggtcgagctcaccccagtggccatacaggccggacggctcctcgctcagcgcttgtatgccggttcaacagttaagtgtgattatgaaaatgtgccaactacagtgttcacacccctcgaatatggcgcttgtgggctgtctgaggaaaaggcggtagagaaatttggagaggagaatattgaggtttatcatagctacttctggcccctggagtggaccattcccagtcgagacaacaacaagtgttacgcgaaaataatttgtaacacaaaggacaacgaacgagtcgtaggcttccacgtacttgggccaaacgccggagaagtgacccagggcttcgccgctgccctcaagtgcggtctgacgaagaagcagctggactctactatcggaattcatcctgtttgtgcagaggtatttactacactcagcgtgaccaagcggtccggcgcatccatacttcaagcaggctgctgaggatag

SEQ ID NO: 93874 - DNA, 1500 bp, Artificial Sequence
  derived and/or modified sequence
atgaacgggcctgaggacctgcctaagtcatacgactacgacttgattatcattggcggagggtcgggcggactcgcagccgcaaaggaggccgcacagtatggtaagaaagtgatggtactggacttcgttaccccaacacccctgggcacaaggtggggactgggcggaacttgtgtgaacgtgggatgtataccgaaaaagctcatgcaccaggctgccctcctggggcaggcgctgcaggattccaggaattatggatggaaagtagaggagaccgtgaaacacgattgggatcggatgatcgaagcagtgcagaatcacataggtagccttaactggggctaccgcgtcgccctgcgtgaaaagaaagtcgtctatgagaacgcatatggccagtttattggcccacacagaataaaggctacaaataacaagggcaaggaaaaaatatattccgctgagcggtttctaatcgctacgggcgaaagacctaggtatctaggcattcctggggacaaggaatattgcataagctcagacgatctcttttctttgccgtattgccctggtaaaaccttagtggtgggggcttcctacgtggcccttgagtgtgctggttttctggctggcattggattagacgtgacagtaatggtcagaagtattctacttaggggattcgatcaggatatggcaaataagatcggcgaacatatggaagagcacggaatcaagttcatacgccaatttgtacccatcaaagtagagcagattgaagcgggtacacccggaagactgagggtcgtggcccagagcaccaatagcgaggagatcatcgagggcgaatataacaccgttatgttggccattggcagagatgcctgtacacgcaagataggcctcgaaacagtaggtgtcaaaattaacgagaagacaggtaagattcctgtgacggacgaggaacagactaatgtgccatacatttacgccattggggatattctggaagataaggtagaactcactcccgtggcaattcaagccggacggttactggcccagagattgtacgctggttcaacggtgaagtgcgactacgagaatgtccctactaccgtctttactccattggaatatggtgcttgcgggctgagtgaagaaaaagccgtagagaagttcggcgaggagaacattgaggtgtaccactcttatttttggccactggagtggacgattccttctagggacaataataagtgctacgccaagattatatgcaacacgaaggataatgagcgggtggtcggatttcacgtgctgggacctaacgcaggcgaagtgactcagggatttgctgcagccttgaagtgcggacttaccaagaagcaattggacagtaccatcggcattcatcccgtctgtgctgaggtgtttacaacactgtccgtgaccaagcgctcgggcgcatctatcttgcaggctggctgctgagggtag

SEQ ID NO: 93875 - DNA, 1632 bp, Artificial Sequence
  derived and/or modified sequence
atgctgtcacggctggtgttgaacagttgggctcaagccatcatacgccctcggccacctaaagtgttaggtcttcaggtaacaacattctcagaggcgtaccaagagggtagattgcagaaactgttgaaaatgaacggccctgaagatctgcctaaaagctacgattatgatctcatcattatcggcggtggaagcggcggtctcgcagccgcaaaagaagccgctcagtacgggaagaaagtcatggtcctggactttgtaacacctacccctctggggactcgatggggcctgggcggaacctgcgttaatgtgggttgcattccaaaaaagcttatgcatcaggctgccttgttaggccaggcattgcaggatagccgcaattatggttggaaggtagaagagaccgtgaaacatgactgggatcgcatgatagaggcagtccagaatcatataggtagtttaaattggggctatcgagtggctctaagggaaaaaaaggtggtttatgagaatgcatacggccaattcatcgggcctcatagaataaaagccaccaacaacaagggaaaggaaaagatttacagcgccgaaaggttcctcattgctacaggagagcgcccacggtacttgggcatccctggggacaaagaatattgtatctcttccgatgacctattctcgcttccatactgtccaggtaagacactagttgtgggcgcatcctacgtggcactggagtgcgccggattcctggccggaatcggcctggacgtgactgttatggtgcgaagcatacttttgcggggatttgatcaagacatggcaaacaagattggggaacacatggaggaacatgggattaagttcatcaggcaattcgtgccaattaaagtagagcagatcgaagccggaacccctgggagactgagggtggtagcccagtctacaaattctgaggaaatcatcgagggcgaatataacaccgttatgctcgccattgggagagacgcgtgcactcgcaagatcggcctggagacagtcggcgtgaaaatcaacgagaaaacgggaaaaattcccgtgaccgatgaggagcaaacgaacgtaccctacatctacgcgatcggcgatattctggaggacaaggtggagctcacacccgtcgcgatccaggccggtaggcttctggcccagaggctctacgctggctccacagtgaagtgtgattacgaaaacgtgccaacaaccgtgttcacacctctcgagtatggggcttgcggcctttccgaggagaaagccgtggagaagtttggcgaggagaacatcgaggtgtatcactcttacttctggccgctggagtggacaatccccagtcgagacaataacaagtgctacgctaagattatatgtaacactaaagacaacgaacgcgtggttgggtttcatgtgctgggacccaatgccggtgaggtaacccaaggattcgcggctgcgctgaagtgtgggctgacgaagaaacagctagactctacaatcggaatacatcctgtttgtgctgaggtgttcacaactttgagtgttacgaagagatctggagcttccatcctgcaagcaggctgctgaggatag

SEQ ID NO: 93876 - DNA, 1707 bp, Artificial Sequence
  derived and/or modified sequence
atgcccgctatgctgccgaccggatcccatagtgcggtactgccgccttcccactgttcgacagcacccccttctaccagccaagagccaagttcttctgccgaccccaagttatgcctcagtccgccaacaagcgactcccggcaggagcggaatgtgcagttcgggctcgcctatcaggaagggcgtcttcagaaattgctcaaaatgaacggcccagaagatctccccaagtcctatgactatgatttgatcatcattggtggaggaagcggcggtttggccgcagccaaggaggcagcccagtatggtaagaaagttatggtgctggattttgtgaccccgactcctttgggcacccgatggggtcttgggggaacatgcgttaacgtcggttgcattcctaaaaagctgatgcatcaggctgctttacttgggcaggccctgcaagactctaggaactacggatggaaagtggaggagaccgtgaaacacgactgggacaggatgatcgaagcagtgcagaatcatattggctctcttaattgggggtaccgggtggctcttagggagaagaaggtagtatatgaaaatgcgtacggccagtttattggtccccaccggattaaggccaccaacaataagggcaaagaaaagatttattccgccgagcgattccttattgcaacaggcgaacgacctcggtatcttgggatccccggagacaaagaatactgtatttcatctgacgaccttttttcgctcccttactgtcctggcaagaccctagtggtgggagcgagctacgtggcactggaatgtgcaggcttcctcgctggaattggcctggacgtaactgttatggtgcggtcaatcctcctgaggggtttcgaccaggatatggcaaacaagatcggcgaacacatggaagagcacggtatcaagttcatccgacagttcgttcctatcaaggtcgagcagattgaagcgggtacgccagggagacttcgtgttgtcgctcagtccacaaactccgaggagattatagagggggaatataacaccgttatgctggcaataggcagggacgcatgcacccgcaagattggcttagaaactgttggcgttaaaattaacgagaagaccgggaaaattcccgtgacggacgaggagcagacgaatgttccatacatctatgccatcggggatatcctggaggataaggtggagttaacgccagttgccattcaagccggtcgccttctggcacagcggctgtatgctggtagtacagtgaagtgtgactacgaaaacgtgcctacaacggtcttcacgcccttggagtatggagcctgcggcctcagtgaggagaaggctgttgagaaatttggggaagaaaatatagaagtctaccacagctatttctggcctctcgagtggacgattccaagtcgtgacaacaataaatgctatgctaaaattatctgtaatacaaaagacaatgaaagagtcgtgggcttccatgtgcttgggccaaacgctggagaagtcacgcagggtttcgccgctgccctcaagtgcgggctaactaagaagcagctggattcaacgatcggcatacaccccgtgtgcgctgaagtcttcaccaccctgtccgtgacgaaacgttctggcgcaagtatcctgcaagccggatgctgaggctag

SEQ ID NO: 93877 - DNA, 420 bp, Artificial Sequence
  derived and/or modified sequence
atgctgtctcgccttgttcttaactcctgggcccaggccattataaggcccaggccacccaaggttctgggtctccaagttactaccttctcggaggcgtaccaagaaggtcgactccaaaagctgctgaaaatgaatggccctgaagacctgcccaagtcatacgactacgacttgattatcataggtgggggatcaggaggtctagccgctgccaaggaggccgcacagtatgggaagaaagtaatggttctcgatttcgtcacccctacaccattgggtactagatggggccttggtggaacctgcgttaacgtcgggtgcattcccaaaaaattaatgcatcaggctgcgctccttggacaagcacttcaagactccaggaattatggatggaaagtggaggagaccggaatgtag

SEQ ID NO: 93878 - DNA, 1644 bp, Artificial Sequence
  derived and/or modified sequence
atggaagacggcagagcactagaaggcaccctgtcagagctcgctgccgagactgacctgcccgtggtttttgtcaaacaaaggaagatcggcggacatgggccaacactgaaggcctaccaagagggtaggttacagaagctgcttaaaatgaacggacccgaggacctgcctaagtcctatgactatgatctgattatcatcggcggagggagtgggggtctagccgctgccaaagaggcagctcaatatgggaagaaagtgatggttctggattttgtgactcctacacctctcgggactaggtggggtctgggcggtacctgcgtgaatgtgggctgcattccaaaaaagcttatgcatcaggccgcactgctcggccaagctctacaggattctcgaaactatggctggaaagtcgaggagaccgtgaagcatgattgggataggatgattgaggcggtgcagaaccatatcggctcactgaattggggttatcgggtggccctgcgtgagaagaaagtcgtatatgaaaacgcgtacggccagtttattgggcctcaccgcattaaggcaactaataacaagggtaaagagaaaatttacagtgctgagcgcttcctcattgcaactggtgaacggccacgctatttaggaattcccggtgacaaggaatattgtatctcttccgacgacctattcagtctcccctactgccccggaaagacgttagtcgtgggcgcttcctatgtagctctggagtgcgcagggttccttgcaggtatcggtttagacgttaccgttatggtgcggagcatcctgcttcgaggttttgatcaggatatggcgaataaaatcggcgagcacatggaggagcacgggattaagttcatcaggcaatttgtgccaataaaagtggaacaaattgaagccggaacccccggtagactacgtgtcgtggctcagtccactaacagcgaggagattatagaaggcgagtacaatacggtcatgcttgctatcggcagggacgcttgcactcgtaaaatcggtctagagaccgttggcgttaagattaacgagaagacaggcaaaatacccgttacggacgaggagcagactaatgtaccctacatttacgctattggagatatccttgaggataaggttgagcttacccccgtggccatacaagccggacggctgctggcgcagcgactgtacgccggttccaccgtaaagtgtgactacgaaaatgtcccaaccactgttttcacccccctcgagtacggggcatgcgggctgagtgaggagaaggccgtcgaaaagtttggggaagagaatatagaggtctaccatagttacttttggccactcgaatggacaattccttcacgggacaataacaagtgttacgctaagattatttgtaacactaaggataacgagcgagttgtcggctttcatgtgttggggccaaacgcgggtgaagtgacccaaggattcgccgctgccctaaagtgcgggttgactaaaaaacagttggactccactattggcatacatccagtctgcgctgaagtttttacaactctctctgttaccaaaaggagcggagccagtattctgcaggccggatgctag

SEQ ID NO: 93879 - DNA, 3790 bp, Artificial Sequence
  derived and/or modified sequence
ggcagttagcccgcccgctcggcgcagggcgtggcttctcgtagccattaggaaacagcaaccctttcacctcagttttcttcactccggcatttgcagcagagcgaaaggtggtcgagtcctgaaggagggcctgatgtcttcatcattctcaaattcttgtaagctctgcgtcgggtgaaaccagacaaagccgcgagcccagggatgggagcacgcgggggacggcctgccggcggggacgacagcattgcgcctgggtgcagcagtgtgcgtctcggggaagggaagatattttaaggcgtgtctgagcagacggggaggcttttccaaacccaggcagcttcgtggcgtgtgcggtttcgacccggtcacacaaagcttcagcatgtcatgtggcttatcaggagggcagacttcaaaagctactaaaaatgaacggccctgaagatcttcccaagtcctatgactatgaccttatcatcattggaggtggctcaggaggtctggcagctgctaaggaggcagcccaatatggcaagaaggtgatggtcctggactttgtcactcccacccctcttggaactagatggggtctcggaggaacatgtgtgaatgtgggttgcatacctaaaaaactgatgcatcaagcagctttgttaggacaagccctgcaagactctcgaaattatggatggaaagtcgaggagacagttaagcatgattgggacagaatgatagaagctgtacagaatcacattggctctttgaattggggctaccgagtagctctgcgggagaaaaaagtcgtctatgagaatgcttatgggcaatttattggtcctcacaggattaaggcaacaaataataaaggcaaagaaaaaatttattcagcagagagatttctcattgccactggtgaaagaccacgttacttgggcatccctggtgacaaagaatactgcatcagcagtgatgatcttttctccttgccttactgcccgggtaagaccctggttgttggagcatcctatgtcgctttggagtgcgctggatttcttgctggtattggtttagacgtcactgttatggttaggtccattcttcttagaggatttgaccaggacatggccaacaaaattggtgaacacatggaagaacatggcatcaagtttataagacagttcgtaccaattaaagttgaacaaattgaagcagggacaccaggccgactcagagtagtagctcagtccaccaatagtgaggaaatcattgaaggagaatataatacggtgatgctggcaataggaagagatgcttgcacaagaaaaattggcttagaaaccgtaggggtgaagataaatgaaaagactggaaaaatacctgtcacagatgaagaacagaccaatgtgccttacatctatgccattggcgatatattggaggataaggtggagctcaccccagttgcaatccaggcaggaagattgctggctcagaggctctatgcaggttccactgtcaagtgtgactatgaaaatgttccaaccactgtatttactcctttggaatatggtgcttgtggcctttctgaggagaaagctgtggagaagtttggggaagaaaatattgaggtttaccatagttacttttggccattggaatggacgattccgtcaagagataacaacaaatgttatgcaaaaataatctgtaatactaaagacaatgaacgtgttgtgggctttcacgtactgggtccaaatgctggagaagttacacaaggctttgcagctgcgctcaaatgtggactgaccaaaaagcagctggacagcacaattggaatccaccctgtctgtgcagaggtattcacaacattgtctgtgaccaagcgctctggggcaagcatcctccaggctggctgctgaggttaagccccagtgtggatgctgttgccaagactgcaaaccactggctcgtttccgtgcccaaatccaaggcgaagttttctagagggttcttgggctcttggcacctgcgtgtcctgtgcttaccaccgcccaaggcccccttggatctcttggataggagttggtgaatagaaggcaggcagcatcacactggggtcactgacagacttgaagctgacatttggcagggcatcgaagggatgcatccatgaagtcaccagtctcaagcccatgtggtaggcggtgatggaacaactgtcaaatcagttttagcatgacctttccttgtggattttcttattctcgttgtcaagttttctagggttgaatttttttcttttttctccatggtgttaatgatattagagatgaaaaacgttagcagttgatttttgtccaaaagcaagtcatggctagagtatccatgcaaggtgtcttgttgcatggaagggatagtttggctcccttggaggctatgtaggcttgtcccgggaaagagaactgtcctgcagctgaaatggactgttctttactgacctgctcagcagtttcttctctcatatattcccaaaacaagtacatctgcgatcaactctagccaaatttgcccctgtgtgctacatgatggatgattattattttaaggtctgtttaggaagggaaatggctacttggccagccattgcctggcatttggtagtatagtatgattctcaccattatttgtcatggaggcagacatacaccagaaatgggggagaaacagtacatatctttctgtctttagtttattgtgtgctggtctaagcaagctgagatcatttgcaatggaaaacacgtaacttgtttaaaagtttttctggtagctttagctttatgctaaaaaaaataatgacattgggtatctatttctttctaagactacattagtaggaaaataagtcttttcatgcttatgatttagctgttttgtggtaattgctttttaaaggaagttattaatatcataagttattattaatattttgaacacaggtggatgtgaaggattttcatttaaaaaccaagtggttttgactttttctgttgaatgaacaactgtgccttgtggaatttttgcagaagtgtttatgctttgttagcatttcaacttgcattattataaagaggtattaatgcctcagttatgtgtttgtcaatgtactggctgaggattctatctcagctgtcttttctaactgtgtaggttgagttttgaacacgtgcttgtggacatcaggcctcctgccagcagttcttgaagcttctttttcattcctgctactctacctgtatttctcagttgcagcactgagtggtcaaaatacatttctgggccacctcagggaacccatgcatctgcctggcatttaggcagcagagcccctgaccgtcccccacagggctctgcctcacgtcctcatctcatttggctgtgtaaagaaatgggaaaagggaaaaggagagagcaattgaggcagttgaccatattcagttttatttatttatttttaatttgtttttttctccaagtccaccagtctctgaaattagaacagtaggcggtatgagataatcaggcctaatcatgttgtgattctcttttcttagtggagtggaatgttctatccccacaagaaggattatatcttatagacttgtcttgttcagattctgtatttacccattttattgaaacatatactaagttccatgtatttttgttacaaatcttctgaaaaaaaacaaaacaatgtgaaacattaaaattaaaaggcatt

SEQ ID NO: 93880 - DNA, 3488 bp, Artificial Sequence
  derived and/or modified sequence
atgttgtccaggctggtcttgaactcctgggctcaagcgatcatccggcctcggcctcctaaagtgctgggactgcaggtcacgacatttagtgaggcttatcaggagggcagacttcaaaagctactaaaaatgaacggccctgaagatcttcccaagtcctatgactatgaccttatcatcattggaggtggctcaggaggtctggcagctgctaaggaggcagcccaatatggcaagaaggtgatggtcctggactttgtcactcccacccctcttggaactagatggggtctcggaggaacatgtgtgaatgtgggttgcatacctaaaaaactgatgcatcaagcagctttgttaggacaagccctgcaagactctcgaaattatggatggaaagtcgaggagacagttaagcatgattgggacagaatgatagaagctgtacagaatcacattggctctttgaattggggctaccgagtagctctgcgggagaaaaaagtcgtctatgagaatgcttatgggcaatttattggtcctcacaggattaaggcaacaaataataaaggcaaagaaaaaatttattcagcagagagatttctcattgccactggtgaaagaccacgttacttgggcatccctggtgacaaagaatactgcatcagcagtgatgatcttttctccttgccttactgcccgggtaagaccctggttgttggagcatcctatgtcgctttggagtgcgctggatttcttgctggtattggtttagacgtcactgttatggttaggtccattcttcttagaggatttgaccaggacatggccaacaaaattggtgaacacatggaagaacatggcatcaagtttataagacagttcgtaccaattaaagttgaacaaattgaagcagggacaccaggccgactcagagtagtagctcagtccaccaatagtgaggaaatcattgaaggagaatataatacggtgatgctggcaataggaagagatgcttgcacaagaaaaattggcttagaaaccgtaggggtgaagataaatgaaaagactggaaaaatacctgtcacagatgaagaacagaccaatgtgccttacatctatgccattggcgatatattggaggataaggtggagctcaccccagttgcaatccaggcaggaagattgctggctcagaggctctatgcaggttccactgtcaagtgtgactatgaaaatgttccaaccactgtatttactcctttggaatatggtgcttgtggcctttctgaggagaaagctgtggagaagtttggggaagaaaatattgaggtttaccatagttacttttggccattggaatggacgattccgtcaagagataacaacaaatgttatgcaaaaataatctgtaatactaaagacaatgaacgtgttgtgggctttcacgtactgggtccaaatgctggagaagttacacaaggctttgcagctgcgctcaaatgtggactgaccaaaaagcagctggacagcacaattggaatccaccctgtctgtgcagaggtattcacaacattgtctgtgaccaagcgctctggggcaagcatcctccaggctggctgctgaggttaagccccagtgtggatgctgttgccaagactgcaaaccactggctcgtttccgtgcccaaatccaaggcgaagttttctagagggttcttgggctcttggcacctgcgtgtcctgtgcttaccaccgcccaaggcccccttggatctcttggataggagttggtgaatagaaggcaggcagcatcacactggggtcactgacagacttgaagctgacatttggcagggcatcgaagggatgcatccatgaagtcaccagtctcaagcccatgtggtaggcggtgatggaacaactgtcaaatcagttttagcatgacctttccttgtggattttcttattctcgttgtcaagttttctagggttgaatttttttcttttttctccatggtgttaatgatattagagatgaaaaacgttagcagttgatttttgtccaaaagcaagtcatggctagagtatccatgcaaggtgtcttgttgcatggaagggatagtttggctcccttggaggctatgtaggcttgtcccgggaaagagaactgtcctgcagctgaaatggactgttctttactgacctgctcagcagtttcttctctcatatattcccaaaacaagtacatctgcgatcaactctagccaaatttgcccctgtgtgctacatgatggatgattattattttaaggtctgtttaggaagggaaatggctacttggccagccattgcctggcatttggtagtatagtatgattctcaccattatttgtcatggaggcagacatacaccagaaatgggggagaaacagtacatatctttctgtctttagtttattgtgtgctggtctaagcaagctgagatcatttgcaatggaaaacacgtaacttgtttaaaagtttttctggtagctttagctttatgctaaaaaaaataatgacattgggtatctatttctttctaagactacattagtaggaaaataagtcttttcatgcttatgatttagctgttttgtggtaattgctttttaaaggaagttattaatatcataagttattattaatattttgaacacaggtggatgtgaaggattttcatttaaaaaccaagtggttttgactttttctgttgaatgaacaactgtgccttgtggaatttttgcagaagtgtttatgctttgttagcatttcaacttgcattattataaagaggtattaatgcctcagttatgtgtttgtcaatgtactggctgaggattctatctcagctgtcttttctaactgtgtaggttgagttttgaacacgtgcttgtggacatcaggcctcctgccagcagttcttgaagcttctttttcattcctgctactctacctgtatttctcagttgcagcactgagtggtcaaaatacatttctgggccacctcagggaacccatgcatctgcctggcatttaggcagcagagcccctgaccgtcccccacagggctctgcctcacgtcctcatctcatttggctgtgtaaagaaatgggaaaagggaaaaggagagagcaattgaggcagttgaccatattcagttttatttatttatttttaatttgtttttttctccaagtccaccagtctctgaaattagaacagtaggcggtatgagataatcaggcctaatcatgttgtgattctcttttcttagtggagtggaatgttctatccccacaagaaggattatatcttatagacttgtcttgttcagattctgtatttacccattttattgaaacatatactaagttccatgtatttttgttacaaatcttctgaaaaaaaacaaaacaatgtgaaacattaaaattaaaaggcatt

SEQ ID NO: 93881 - DNA, 3701 bp, Artificial Sequence
  derived and/or modified sequence
atgccagttgatgactactggctgtgtttaccagcctcttgtgctagaccttttgtgcagactgtcagagtggtgcagtcttgcccccactgttgctggtttccaggtgttctcccttcagtccctgagccactacgtatgcccgccatgctgccaacaggtagccacagtgctgtgcttcctccttcacattgctccaccgcacccccttccacatcccaagaaccttcttcttccgctgaccccaagctctgcctttcaccccctacatctgatagtaggcaagagagaaatgtgcagtttgggctggcttatcaggagggcagacttcaaaagctactaaaaatgaacggccctgaagatcttcccaagtcctatgactatgaccttatcatcattggaggtggctcaggaggtctggcagctgctaaggaggcagcccaatatggcaagaaggtgatggtcctggactttgtcactcccacccctcttggaactagatggggtctcggaggaacatgtgtgaatgtgggttgcatacctaaaaaactgatgcatcaagcagctttgttaggacaagccctgcaagactctcgaaattatggatggaaagtcgaggagacagttaagcatgattgggacagaatgatagaagctgtacagaatcacattggctctttgaattggggctaccgagtagctctgcgggagaaaaaagtcgtctatgagaatgcttatgggcaatttattggtcctcacaggattaaggcaacaaataataaaggcaaagaaaaaatttattcagcagagagatttctcattgccactggtgaaagaccacgttacttgggcatccctggtgacaaagaatactgcatcagcagtgatgatcttttctccttgccttactgcccgggtaagaccctggttgttggagcatcctatgtcgctttggagtgcgctggatttcttgctggtattggtttagacgtcactgttatggttaggtccattcttcttagaggatttgaccaggacatggccaacaaaattggtgaacacatggaagaacatggcatcaagtttataagacagttcgtaccaattaaagttgaacaaattgaagcagggacaccaggccgactcagagtagtagctcagtccaccaatagtgaggaaatcattgaaggagaatataatacggtgatgctggcaataggaagagatgcttgcacaagaaaaattggcttagaaaccgtaggggtgaagataaatgaaaagactggaaaaatacctgtcacagatgaagaacagaccaatgtgccttacatctatgccattggcgatatattggaggataaggtggagctcaccccagttgcaatccaggcaggaagattgctggctcagaggctctatgcaggttccactgtcaagtgtgactatgaaaatgttccaaccactgtatttactcctttggaatatggtgcttgtggcctttctgaggagaaagctgtggagaagtttggggaagaaaatattgaggtttaccatagttacttttggccattggaatggacgattccgtcaagagataacaacaaatgttatgcaaaaataatctgtaatactaaagacaatgaacgtgttgtgggctttcacgtactgggtccaaatgctggagaagttacacaaggctttgcagctgcgctcaaatgtggactgaccaaaaagcagctggacagcacaattggaatccaccctgtctgtgcagaggtattcacaacattgtctgtgaccaagcgctctggggcaagcatcctccaggctggctgctgaggttaagccccagtgtggatgctgttgccaagactgcaaaccactggctcgtttccgtgcccaaatccaaggcgaagttttctagagggttcttgggctcttggcacctgcgtgtcctgtgcttaccaccgcccaaggcccccttggatctcttggataggagttggtgaatagaaggcaggcagcatcacactggggtcactgacagacttgaagctgacatttggcagggcatcgaagggatgcatccatgaagtcaccagtctcaagcccatgtggtaggcggtgatggaacaactgtcaaatcagttttagcatgacctttccttgtggattttcttattctcgttgtcaagttttctagggttgaatttttttcttttttctccatggtgttaatgatattagagatgaaaaacgttagcagttgatttttgtccaaaagcaagtcatggctagagtatccatgcaaggtgtcttgttgcatggaagggatagtttggctcccttggaggctatgtaggcttgtcccgggaaagagaactgtcctgcagctgaaatggactgttctttactgacctgctcagcagtttcttctctcatatattcccaaaacaagtacatctgcgatcaactctagccaaatttgcccctgtgtgctacatgatggatgattattattttaaggtctgtttaggaagggaaatggctacttggccagccattgcctggcatttggtagtatagtatgattctcaccattatttgtcatggaggcagacatacaccagaaatgggggagaaacagtacatatctttctgtctttagtttattgtgtgctggtctaagcaagctgagatcatttgcaatggaaaacacgtaacttgtttaaaagtttttctggtagctttagctttatgctaaaaaaaataatgacattgggtatctatttctttctaagactacattagtaggaaaataagtcttttcatgcttatgatttagctgttttgtggtaattgctttttaaaggaagttattaatatcataagttattattaatattttgaacacaggtggatgtgaaggattttcatttaaaaaccaagtggttttgactttttctgttgaatgaacaactgtgccttgtggaatttttgcagaagtgtttatgctttgttagcatttcaacttgcattattataaagaggtattaatgcctcagttatgtgtttgtcaatgtactggctgaggattctatctcagctgtcttttctaactgtgtaggttgagttttgaacacgtgcttgtggacatcaggcctcctgccagcagttcttgaagcttctttttcattcctgctactctacctgtatttctcagttgcagcactgagtggtcaaaatacatttctgggccacctcagggaacccatgcatctgcctggcatttaggcagcagagcccctgaccgtcccccacagggctctgcctcacgtcctcatctcatttggctgtgtaaagaaatgggaaaagggaaaaggagagagcaattgaggcagttgaccatattcagttttatttatttatttttaatttgtttttttctccaagtccaccagtctctgaaattagaacagtaggcggtatgagataatcaggcctaatcatgttgtgattctcttttcttagtggagtggaatgttctatccccacaagaaggattatatcttatagacttgtcttgttcagattctgtatttacccattttattgaaacatatactaagttccatgtatttttgttacaaatcttctgaaaaaaaacaaaacaatgtgaaacattaaaattaaaaggcatt

SEQ ID NO: 93882 - DNA, 3930 bp, Artificial Sequence
  derived and/or modified sequence
agaccctcacgtgatgacaacagctagcaaagttctgtagctactgccttagggcatagtctaatttcttcagtaaaaacacacttattccaaatttggttccagaattgccttaaattgtttttgctctgttcttaggttgggggcggctatgagcaggcagaggatgtggtgtcacccaattaggagctctcagcttacgaggcaattagcataggttgccagggctgcacgaggagtggatttctgctttgtcattctgactctggcagttagcccgcccgctcggcgcagggcgtggcttctcgtagccattaggaaacagcaaccctttcacctcagttttcttcactccggcatttgcagcagagcgaaaggtggtcgagtcctgaaggagggcctgatgtcttcatcattctcaaattcttaggacggtcgggccctggaaggaacgctctcggaattggccgcggaaaccgatctgcccgttgtgtttgtgaaacagagaaagataggcggccatggtccaaccttgaaggcttatcaggagggcagacttcaaaagctactaaaaatgaacggccctgaagatcttcccaagtcctatgactatgaccttatcatcattggaggtggctcaggaggtctggcagctgctaaggaggcagcccaatatggcaagaaggtgatggtcctggactttgtcactcccacccctcttggaactagatggggtctcggaggaacatgtgtgaatgtgggttgcatacctaaaaaactgatgcatcaagcagctttgttaggacaagccctgcaagactctcgaaattatggatggaaagtcgaggagacagttaagcatgattgggacagaatgatagaagctgtacagaatcacattggctctttgaattggggctaccgagtagctctgcgggagaaaaaagtcgtctatgagaatgcttatgggcaatttattggtcctcacaggattaaggcaacaaataataaaggcaaagaaaaaatttattcagcagagagatttctcattgccactggtgaaagaccacgttacttgggcatccctggtgacaaagaatactgcatcagcagtgatgatcttttctccttgccttactgcccgggtaagaccctggttgttggagcatcctatgtcgctttggagtgcgctggatttcttgctggtattggtttagacgtcactgttatggttaggtccattcttcttagaggatttgaccaggacatggccaacaaaattggtgaacacatggaagaacatggcatcaagtttataagacagttcgtaccaattaaagttgaacaaattgaagcagggacaccaggccgactcagagtagtagctcagtccaccaatagtgaggaaatcattgaaggagaatataatacggtgatgctggcaataggaagagatgcttgcacaagaaaaattggcttagaaaccgtaggggtgaagataaatgaaaagactggaaaaatacctgtcacagatgaagaacagaccaatgtgccttacatctatgccattggcgatatattggaggataaggtggagctcaccccagttgcaatccaggcaggaagattgctggctcagaggctctatgcaggttccactgtcaagtgtgactatgaaaatgttccaaccactgtatttactcctttggaatatggtgcttgtggcctttctgaggagaaagctgtggagaagtttggggaagaaaatattgaggtttaccatagttacttttggccattggaatggacgattccgtcaagagataacaacaaatgttatgcaaaaataatctgtaatactaaagacaatgaacgtgttgtgggctttcacgtactgggtccaaatgctggagaagttacacaaggctttgcagctgcgctcaaatgtggactgaccaaaaagcagctggacagcacaattggaatccaccctgtctgtgcagaggtattcacaacattgtctgtgaccaagcgctctggggcaagcatcctccaggctggctgctgaggttaagccccagtgtggatgctgttgccaagactgcaaaccactggctcgtttccgtgcccaaatccaaggcgaagttttctagagggttcttgggctcttggcacctgcgtgtcctgtgcttaccaccgcccaaggcccccttggatctcttggataggagttggtgaatagaaggcaggcagcatcacactggggtcactgacagacttgaagctgacatttggcagggcatcgaagggatgcatccatgaagtcaccagtctcaagcccatgtggtaggcggtgatggaacaactgtcaaatcagttttagcatgacctttccttgtggattttcttattctcgttgtcaagttttctagggttgaatttttttcttttttctccatggtgttaatgatattagagatgaaaaacgttagcagttgatttttgtccaaaagcaagtcatggctagagtatccatgcaaggtgtcttgttgcatggaagggatagtttggctcccttggaggctatgtaggcttgtcccgggaaagagaactgtcctgcagctgaaatggactgttctttactgacctgctcagcagtttcttctctcatatattcccaaaacaagtacatctgcgatcaactctagccaaatttgcccctgtgtgctacatgatggatgattattattttaaggtctgtttaggaagggaaatggctacttggccagccattgcctggcatttggtagtatagtatgattctcaccattatttgtcatggaggcagacatacaccagaaatgggggagaaacagtacatatctttctgtctttagtttattgtgtgctggtctaagcaagctgagatcatttgcaatggaaaacacgtaacttgtttaaaagtttttctggtagctttagctttatgctaaaaaaaataatgacattgggtatctatttctttctaagactacattagtaggaaaataagtcttttcatgcttatgatttagctgttttgtggtaattgctttttaaaggaagttattaatatcataagttattattaatattttgaacacaggtggatgtgaaggattttcatttaaaaaccaagtggttttgactttttctgttgaatgaacaactgtgccttgtggaatttttgcagaagtgtttatgctttgttagcatttcaacttgcattattataaagaggtattaatgcctcagttatgtgtttgtcaatgtactggctgaggattctatctcagctgtcttttctaactgtgtaggttgagttttgaacacgtgcttgtggacatcaggcctcctgccagcagttcttgaagcttctttttcattcctgctactctacctgtatttctcagttgcagcactgagtggtcaaaatacatttctgggccacctcagggaacccatgcatctgcctggcatttaggcagcagagcccctgaccgtcccccacagggctctgcctcacgtcctcatctcatttggctgtgtaaagaaatgggaaaagggaaaaggagagagcaattgaggcagttgaccatattcagttttatttatttatttttaatttgtttttttctccaagtccaccagtctctgaaattagaacagtaggcggtatgagataatcaggcctaatcatgttgtgattctcttttcttagtggagtggaatgttctatccccacaagaaggattatatcttatagacttgtcttgttcagattctgtatttacccattttattgaaacatatactaagttccatgtatttttgttacaaatcttctgaaaaaaaacaaaacaatgtgaaacattaaaattaaaaggcatt

SEQ ID NO: 93883 - DNA, 1933 bp, Artificial Sequence
  derived and/or modified sequence
aggctggcggtttccttcctcttggtctttgtagagacagtttgcagaacagcggagaaaatggaggacggtcgggccctggaaggaacgctctcggaattggccgcggaaaccgatctgcccgttgtgtttgtgaaacagagaaagataggcggccatggtccaaccttgaaggcttatcaggagggcagacttcaaaagctactaaaaatgaacggccctgaagatcttcccaagtcctatgactatgaccttatcatcattggaggtggctcaggaggtctggcagctgctaaggaggcagcccaatatggcaagaaggtgatggtcctggactttgtcactcccacccctcttggaactagatggggtctcggaggaacatgtgtgaatgtgggttgcatacctaaaaaactgatgcatcaagcagctttgttaggacaagccctgcaagactctcgaaattatggatggaaagtcgaggagacagttaagcatgattgggacagaatgatagaagctgtacagaatcacattggctctttgaattggggctaccgagtagctctgcgggagaaaaaagtcgtctatgagaatgcttatgggcaatttattggtcctcacaggattaaggcaacaaataataaaggcaaagaaaaaatttattcagcagagagatttctcattgccactggtgaaagaccacgttacttgggcatccctggtgacaaagaatactgcatcagcagtgatgatcttttctccttgccttactgcccgggtaagaccctggttgttggagcatcctatgtcgctttggagtgcgctggatttcttgctggtattggtttagacgtcactgttatggttaggtccattcttcttagaggatttgaccaggacatggccaacaaaattggtgaacacatggaagaacatggcatcaagtttataagacagttcgtaccaattaaagttgaacaaattgaagcagggacaccaggccgactcagagtagtagctcagtccaccaatagtgaggaaatcattgaaggagaatataatacggtgatgctggcaataggaagagatgcttgcacaagaaaaattggcttagaaaccgtaggggtgaagataaatgaaaagactggaaaaatacctgtcacagatgaagaacagaccaatgtgccttacatctatgccattggcgatatattggaggataaggtggagctcaccccagttgcaatccaggcaggaagattgctggctcagaggctctatgcaggttccactgtcaagtgtgactatgaaaatgttccaaccactgtatttactcctttggaatatggtgcttgtggcctttctgaggagaaagctgtggagaagtttggggaagaaaatattgaggtttaccatagttacttttggccattggaatggacgattccgtcaagagataacaacaaatgttatgcaaaaataatctgtaatactaaagacaatgaacgtgttgtgggctttcacgtactgggtccaaatgctggagaagttacacaaggctttgcagctgcgctcaaatgtggactgaccaaaaagcagctggacagcacaattggaatccaccctgtctgtgcagaggtattcacaacattgtctgtgaccaagcgctctggggcaagcatcctccaggctggctgctgaggttaagccccagtgtggatgctgttgccaagactgcaaaccactggctcgtttccgtgcccaaatccaaggcgaagttttctagagggttcttgggctcttggcacctgcgtgtcctgtgcttaccaccgcccaaggcccccttggatctcttggataggagttggtgaatagaaggcaggcagcatcacactggggtcactgacagacttgaagctgacatttggca

SEQ ID NO: 93884 - DNA, 577 bp, Artificial Sequence
  derived and/or modified sequence
gaagaagctaaatcaagcctctgagtttcaccttggaagggcctggcaggacctggcagtggttgcctgtttgtttagagggagtgtggcttctgctggctgttaggagcccgcaacgctctcagctgagagtgcttcaatctggcattatccaaagaacagagcgaaaggtggtcgagtcctgaaggagggcctgatgtcttcatcattctcaaattcttaggacggtcgggccctggaaggaacgctctcggaattggccgcggaaaccgatctgcccgttgtgtttgtgaaacagagaaagataggcggccatggtccaaccttgaaggcttatcaggagggcagacttcaaaagctactaaaaatgaacggccctgaagatcttcccaagtcctatgactatgaccttatcatcattggaggtggctcaggaggtctggcagctgctaaggaggcagcccaatatggcaagaaggtgatggtcctggactttgtcactcccacccctcttggaactagatggggtctcggaggaacatgtgtgaatgtgggttgcatacctaaaaaactgatg

SEQ ID NO: 93885 - DNA, 3808 bp, Artificial Sequence
  derived and/or modified sequence
tagccattaggaaacagcaaccctttcacctcagttttcttcactccggcatttgcagcagagcgaaaggtggtcgagtcctgaaggagggcctgatgtcttcatcattctcaaattcttaggacggtcgggccctggaaggaacgctctcggaattggccgcggaaaccgatctgcccgttgtgtttgtgaaacagagaaagataggcggccatggtccaaccttgaaggggtaggggacccggaaaccccagggtctggaggagagcaaccaggaagctcttggggtgacttcgttttccttcagagatggaggtctcattatgttgtccaggctggtcttgaactcctgggctcaagcgatcatccggcctcggcctcctaaagtgctgggactgcaggtcacgacatttagtgaggcttatcaggagggcagacttcaaaagctactaaaaatgaacggccctgaagatcttcccaagtcctatgactatgaccttatcatcattggaggtggctcaggaggtctggcagctgctaaggaggcagcccaatatggcaagaaggtgatggtcctggactttgtcactcccacccctcttggaactagatggggtctcggaggaacatgtgtgaatgtgggttgcatacctaaaaaactgatgcatcaagcagctttgttaggacaagccctgcaagactctcgaaattatggatggaaagtcgaggagacagttaagcatgattgggacagaatgatagaagctgtacagaatcacattggctctttgaattggggctaccgagtagctctgcgggagaaaaaagtcgtctatgagaatgcttatgggcaatttattggtcctcacaggattaaggcaacaaataataaaggcaaagaaaaaatttattcagcagagagatttctcattgccactggtgaaagaccacgttacttgggcatccctggtgacaaagaatactgcatcagcagtgatgatcttttctccttgccttactgcccgggtaagaccctggttgttggagcatcctatgtcgctttggagtgcgctggatttcttgctggtattggtttagacgtcactgttatggttaggtccattcttcttagaggatttgaccaggacatggccaacaaaattggtgaacacatggaagaacatggcatcaagtttataagacagttcgtaccaattaaagttgaacaaattgaagcagggacaccaggccgactcagagtagtagctcagtccaccaatagtgaggaaatcattgaaggagaatataatacggtgatgctggcaataggaagagatgcttgcacaagaaaaattggcttagaaaccgtaggggtgaagataaatgaaaagactggaaaaatacctgtcacagatgaagaacagaccaatgtgccttacatctatgccattggcgatatattggaggataaggtggagctcaccccagttgcaatccaggcaggaagattgctggctcagaggctctatgcaggttccactgtcaagtgtgactatgaaaatgttccaaccactgtatttactcctttggaatatggtgcttgtggcctttctgaggagaaagctgtggagaagtttggggaagaaaatattgaggtttaccatagttacttttggccattggaatggacgattccgtcaagagataacaacaaatgttatgcaaaaataatctgtaatactaaagacaatgaacgtgttgtgggctttcacgtactgggtccaaatgctggagaagttacacaaggctttgcagctgcgctcaaatgtggactgaccaaaaagcagctggacagcacaattggaatccaccctgtctgtgcagaggtattcacaacattgtctgtgaccaagcgctctggggcaagcatcctccaggctggctgctgaggttaagccccagtgtggatgctgttgccaagactgcaaaccactggctcgtttccgtgcccaaatccaaggcgaagttttctagagggttcttgggctcttggcacctgcgtgtcctgtgcttaccaccgcccaaggcccccttggatctcttggataggagttggtgaatagaaggcaggcagcatcacactggggtcactgacagacttgaagctgacatttggcagggcatcgaagggatgcatccatgaagtcaccagtctcaagcccatgtggtaggcggtgatggaacaactgtcaaatcagttttagcatgacctttccttgtggattttcttattctcgttgtcaagttttctagggttgaatttttttcttttttctccatggtgttaatgatattagagatgaaaaacgttagcagttgatttttgtccaaaagcaagtcatggctagagtatccatgcaaggtgtcttgttgcatggaagggatagtttggctcccttggaggctatgtaggcttgtcccgggaaagagaactgtcctgcagctgaaatggactgttctttactgacctgctcagcagtttcttctctcatatattcccaaaacaagtacatctgcgatcaactctagccaaatttgcccctgtgtgctacatgatggatgattattattttaaggtctgtttaggaagggaaatggctacttggccagccattgcctggcatttggtagtatagtatgattctcaccattatttgtcatggaggcagacatacaccagaaatgggggagaaacagtacatatctttctgtctttagtttattgtgtgctggtctaagcaagctgagatcatttgcaatggaaaacacgtaacttgtttaaaagtttttctggtagctttagctttatgctaaaaaaaataatgacattgggtatctatttctttctaagactacattagtaggaaaataagtcttttcatgcttatgatttagctgttttgtggtaattgctttttaaaggaagttattaatatcataagttattattaatattttgaacacaggtggatgtgaaggattttcatttaaaaaccaagtggttttgactttttctgttgaatgaacaactgtgccttgtggaatttttgcagaagtgtttatgctttgttagcatttcaacttgcattattataaagaggtattaatgcctcagttatgtgtttgtcaatgtactggctgaggattctatctcagctgtcttttctaactgtgtaggttgagttttgaacacgtgcttgtggacatcaggcctcctgccagcagttcttgaagcttctttttcattcctgctactctacctgtatttctcagttgcagcactgagtggtcaaaatacatttctgggccacctcagggaacccatgcatctgcctggcatttaggcagcagagcccctgaccgtcccccacagggctctgcctcacgtcctcatctcatttggctgtgtaaagaaatgggaaaagggaaaaggagagagcaattgaggcagttgaccatattcagttttatttatttatttttaatttgtttttttctccaagtccaccagtctctgaaattagaacagtaggcggtatgagataatcaggcctaatcatgttgtgattctcttttcttagtggagtggaatgttctatccccacaagaaggattatatcttatagacttgtcttgttcagattctgtatttacccattttattgaaacatatactaagttccatgtatttttgttacaaatcttctgaaaaaaaacaaaacaatgtgaaacattaaaattaaaaggc

SEQ ID NO: 93886 - DNA, 400 bp, Artificial Sequence
  derived and/or modified sequence
aggtggtcgagtcctgaaggagggcctgatgtcttcatcattctcaaattcttgcttatcaggagggcagacttcaaaagctactaaaaatgaacggccctgaagatcttcccaagtcctatgactatgaccttatcatcattggaggtggctcaggaggtctggcagctgctaaggaggcagcccaatatggcaagaaggtgatggtcctggactttgtcactcccacccctcttggaactagatggggtctcggaggaacatgtgtgaatgtgggttgcatacctaaaaaactgatgcatcaagcagctttgttaggacaagccctgcaagactctcgaaattatggatggaaagtcgaggagacagttaagcatgattgggacagaatgatagaagc

SEQ ID NO: 93887 - DNA, 1847 bp, Artificial Sequence
  derived and/or modified sequence
actgtcagagtggtgcagtcttgcccccactgttgctggtttccaggtgttctcccttcagtccctgagccactacgtatgcccgccatgctgccaacaggtagccacagtgctgtgcttcctccttcacattgctccaccgcacccccttccacatcccaagaaccttcttcttccgctgaccccaagctctgcctttcaccccctacatctgatagtaggcaagagagaaatgtgcagtttgggctggcttatcaggagggcagacttcaaaagctactaaaaatgaacggccctgaagatcttcccaagtcctatgactatgaccttatcatcattggaggtggctcaggaggtctggcagctgctaaggaggcagcccaatatggcaagaaggtgatggtcctggactttgtcactcccacccctcttggaactagatggggtctcggaggaacatgtgtgaatgtgggttgcatacctaaaaaactgatgcatcaagcagctttgttaggacaagccctgcaagactctcgaaattatggatggaaagtcgaggagacagttaagcatgattgggacagaatgatagaagctgtacagaatcacattggctctttgaattggggctaccgagtagctctgcgggagaaaaaagtcgtctatgagaatgcttatgggcaatttattggtcctcacaggattaaggcaacaaataataaaggcaaagaaaaaatttattcagcagagagatttctcattgccactggtgaaagaccacgttacttgggcatccctggtgacaaagaatactgcatcagcagtgatgatcttttctccttgccttactgcccgggtaagaccctggttgttggagcatcctatgtcgctttggagtgcgctggatttcttgctggtattggtttagacgtcactgttatggttaggtccattcttcttagaggatttgaccaggacatggccaacaaaattggtgaacacatggaagaacatggcatcaagtttataagacagttcgtaccaattaaagttgaacaaattgaagcagggacaccaggccgactcagagtagtagctcagtccaccaatagtgaggaaatcattgaaggagaatataatacggtgatgctggcaataggaagagatgcttgcacaagaaaaattggcttagaaaccgtaggggtgaagataaatgaaaagactggaaaaatacctgtcacagatgaagaacagaccaatgtgccttacatctatgccattggcgatatattggaggataaggtggagctcaccccagttgcaatccaggcaggaagattgctggctcagaggctctatgcaggttccactgtcaagtgtgactatgaaaatgttccaaccactgtatttactcctttggaatatggtgcttgtggcctttctgaggagaaagctgtggagaagtttggggaagaaaatattgaggtttaccatagttacttttggccattggaatggacgattccgtcaagagataacaacaaatgttatgcaaaaataatctgtaatactaaagacaatgaacgtgttgtgggctttcacgtactgggtccaaatgctggagaagttacacaaggctttgcagctgcgctcaaatgtggactgaccaaaaagcagctggacagcacaattggaatccaccctgtctgtgcagaggtattcacaacattgtctgtgaccaagcgctctggggcaagcatcctccaggctggctgctgaggttaagccccagtgtggatgctgttgccaagactgcaaaccactggctcgtttccgtgcccaaatcc

SEQ ID NO: 93888 - DNA, 786 bp, Artificial Sequence
  derived and/or modified sequence
accttacacgctccgctctgcttttgtgccacacagaggacggtcgggccctggaaggaacgctctcggaattggccgcggaaaccgatctgcccgttgtgtttgtgaaacagagaaagataggcggccatggtccaaccttgaaggggtaggggacccggaaaccccagggtctggaggagagcaaccaggaagctcttggggtgacttcgttttccttcaggcttatcaggagggcagacttcaaaagctactaaaaatgaacggccctgaagatcttcccaagtcctatgactatgaccttatcatcattggaggtggctcaggaggtctggcagctgctaaggaggcagcccaatatggcaagaaggtgatggtcctggactttgtcactcccacccctcttggaactagatggggtctcggaggaacatgtgtgaatgtgggttgcatacctaaaaaactgatgcatcaagcagctttgttaggacaagccctgcaagactctcgaaattatggatggaaagtcgaggagacagttaagcatgattgggacagaatgatagaagctgtacagaatcacattggctctttgaattggggctaccgagtagctctgcgggagaaaaaagtcgtctatgagaatgcttatgggcaatttattggtcctcacaggattaaggcaacaaataataaaggcaaagaaaaaatttattcagcagagagatttctcattgccactggtgaaagaccacgttacttgggcatccctggtgacaaagaata

SEQ ID NO: 93889 - DNA, 607 bp, Artificial Sequence
  derived and/or modified sequence
acacaaagcttcagcatgtcatgtggtaggtgaggccggcgcctgtaggctggcggtttccttcctcttggtctttgtagagacagtttgcagaacagcggagaaaatggaggacggtcgggccctggaaggaacgctctcggaattggccgcggaaaccgatctgcccgttgtgtttgtgaaacagagaaagataggcggccatggtccaaccttgaagtgctttgtattgaaggaggaaccttggccataatgccagttgatgactactggctgtgtttaccagcctcttgtgctagaccttttgtgcagactgtcagagtggtgcagtcttgcccccactgttgctggtttccaggtgttctcccttcagtccctgagccactacgtatgcccgccatgctgccaacaggcttatcaggagggcagacttcaaaagctactaaaaatgaacggccctgaagatcttcccaagtcctatgactatgaccttatcatcattggaggtggctcaggaggtctggcagctgctaaggaggcagcccaatatggcaagaaggtgatggtcctggactttgtcactcccacccctcttggaactagatgg

SEQ ID NO: 93890 - DNA, 554 bp, Artificial Sequence
  derived and/or modified sequence
attaggaaacagcaaccctttcacctcagttttcttcactccggcatttgcagcagagcgaaaggtggtcgagtcctgaaggagggcctgatgtcttcatcattctcaaattcttaggacggtcgggccctggaaggaacgctctcggaattggccgcggaaaccgatctgcccgttgtgtttgtgaaacagagaaagataggcggccatggtccaaccttgaaggggtaggggacccggaaaccccagggtctggaggagagcaaccaggaagctcttggggtgacttcgttttccttcaggcttatcaggagggcagacttcaaaagctactaaaaatgaacggccctgaagatcttcccaagtcctatgactatgaccttatcatcattggaggtggctcaggaggtctggcagctgctaaggaggcagcccaatatggcaagaaggtgatggtcctggactttgtcactcccacccctcttggaactagatggggtctcggaggaacatgtgtgaatgtgggttgcatacctaaaaaactgatgcatcaa

SEQ ID NO: 93891 - DNA, 728 bp, Artificial Sequence
  derived and/or modified sequence
tttctgctttgtcattctgactctggcagttagcccgcccgctcggcgcagggcgtggcttctcgtagccattaggaaacagcaaccctttcacctcagttttcttcactccggcatttgcagcagagcgaaaggtggtcgagtcctgaaggagggcctgatgtcttcatcattctcaaattcttaggacggtcgggccctggaaggaacgctctcggaattggccgcggaaaccgatctgcccgttgtgtttgtgaaacagagaaagataggcggccatggtccaaccttgaagagatggaggtctcattatgttgtccaggctggtcttgaactcctgggctcaagcgatcatccggcctcggcctcctaaagtgctgggactgcaggtcacgacatttagtgaggcttatcaggagggcagacttcaaaagctactaaaaatgaacggccctgaagatcttcccaagtcctatgactatgaccttatcatcattggaggtggctcaggaggtctggcagctgctaaggaggcagcccaatatggcaagaaggtgatggtcctggactttgtcactcccacccctcttggaactagatggggtctcggaggaacatgtgtgaatgtgggttgcatacctaaaaaactgatgcatcaagcagctttgttaggacaagccctgcaagactctcgaaattatggatggaaagtcgaggagacaggtatg

SEQ ID NO: 93892 - DNA, 2048 bp, Artificial Sequence
  derived and/or modified sequence
actccggcatttgcagcagagcgaaaggtggtcgagtcctgaaggagggcctgatgtcttcatcattctcaaattcttaggacggtcgggccctggaaggaacgctctcggaattggccgcggaaaccgatctgcccgttgtgtttgtgaaacagagaaagataggcggccatggtccaaccttgaaggaggcagcccaatatggcaagaaggtgatggtcctggactttgtcactcccacccctcttggaactagatggggtctcggaggaacatgtgtgaatgtgggttgcatacctaaaaaactgatgcatcaagcagctttgttaggacaagccctgcaagactctcgaaattatggatggaaagtcgaggagacagttaagcatgattgggacagaatgatagaagctgtacagaatcacattggctctttgaattggggctaccgagtagctctgcgggagaaaaaagtcgtctatgagaatgcttatgggcaatttattggtcctcacaggattaaggcaacaaataataaaggcaaagaaaaaatttattcagcagagagatttctcattgccactggtgaaagaccacgttacttgggcatccctggtgacaaagaatactgcatcagcagtgatgatcttttctccttgccttactgcccgggtaagaccctggttgttggagcatcctatgtcgctttggagtgcgctggatttcttgctggtattggtttagacgtcactgttatggttaggtccattcttcttagaggatttgaccaggacatggccaacaaaattggtgaacacatggaagaacatggcatcaagtttataagacagttcgtaccaattaaagttgaacaaattgaagcagggacaccaggccgactcagagtagtagctcagtccaccaatagtgaggaaatcattgaaggagaatataatacggtgatgctggcaataggaagagatgcttgcacaagaaaaattggcttagaaaccgtaggggtgaagataaatgaaaagactggaaaaatacctgtcacagatgaagaacagaccaatgtgccttacatctatgccattggcgatatattggaggataaggtggagctcaccccagttgcaatccaggcaggaagattgctggctcagaggctctatgcaggttccactgtcaagtgtgactatgaaaatgttccaaccactgtatttactcctttggaatatggtgcttgtggcctttctgaggagaaagctgtggagaagtttggggaagaaaatattgaggtttaccatagttacttttggccattggaatggacgattccgtcaagagataacaacaaatgttatgcaaaaataatctgtaatactaaagacaatgaacgtgttgtgggctttcacgtactgggtccaaatgctggagaagttacacaaggctttgcagctgcgctcaaatgtggactgaccaaaaagcagctggacagcacaattggaatccaccctgtctgtgcagaggtattcacaacattgtctgtgaccaagcgctctggggcaagcatcctccaggctggctgctgaggttaagccccagtgtggatgctgttgccaagactgcaaaccactggctcgtttccgtgcccaaatccaaggcgaagttttctagagggttcttgggctcttggcacctgcgtgtcctgtgcttaccaccgcccaaggcccccttggatctcttggataggagttggtgaatagaaggcaggcagcatcacactggggtcactgacagacttgaagctgacatttggcagggcatcgaagggatgcatccatgaagtcaccagtctcaagcccatgtggtaggcggtgatggaacaactgtcaaatcagttttagcatgacctttccttgtggattttcttattctcgttgtcaagttttctagggttgaatttttttcttttttctccatggtgttaatgatattagagatgaaaaacgttagcagttgatttttgtccaaaagcaagtcat

SEQ ID NO: 93893 - DNA, 1380 bp, Artificial Sequence
  derived and/or modified sequence
atggtgctggacttcgtgacccccacccccctgggcaccagatggggcctgggcggcacctgcgtgaacgtgggctgcatccccaagaagctgatgcaccaggccgccctgctgggccaggccctgcaggacagcagaaactacggctggaaggtggaggagaccgtgaagcacgactgggacagaatgatcgaggccgtgcagaaccacatcggcagcctgaactggggctacagagtggccctgagagagaagaaggtggtgtacgagaacgcctacggccagttcatcggcccccacagaatcaaggccaccaacaacaagggcaaggagaagatctacagcgccgagagattcctgatcgccaccggcgagagacccagatacctgggcatccccggcgacaaggagtactgcatcagcagcgacgacctgttcagcctgccctactgccccggcaagaccctggtggtgggcgccagctacgtggccctggagtgcgccggcttcctggccggcatcggcctggacgtgaccgtgatggtgagaagcatcctgctgagaggcttcgaccaggacatggccaacaagatcggcgagcacatggaggagcacggcatcaagttcatcagacagttcgtgcccatcaaggtggagcagatcgaggccggcacccccggcagactgagagtggtggcccagagcaccaacagcgaggagatcatcgagggcgagtacaacaccgtgatgctggccatcggcagagacgcctgcaccagaaagatcggcctggagaccgtgggcgtgaagatcaacgagaagaccggcaagatccccgtgaccgacgaggagcagaccaacgtgccctacatctacgccatcggcgacatcctggaggacaaggtggagctgacccccgtggccatccaggccggcagactgctggcccagagactgtacgccggcagcaccgtgaagtgcgactacgagaacgtgcccaccaccgtgttcacccccctggagtacggcgcctgcggcctgagcgaggagaaggccgtggagaagttcggcgaggagaacatcgaggtgtaccacagctacttctggcccctggagtggaccatccccagcagagacaacaacaagtgctacgccaagatcatctgcaacaccaaggacaacgagagagtggtgggcttccacgtgctgggccccaacgccggcgaggtgacccagggcttcgccgccgccctgaagtgcggcctgaccaagaagcagctggacagcaccatcggcatccaccccgtgtgcgccgaggtgttcaccaccctgagcgtgaccaagagaagcggcgccagcatcctgcaggccggctgctag

SEQ ID NO: 93894 - DNA, 1380 bp, Artificial Sequence
  derived and/or modified sequence
atggtgctggatttcgtaacccccacccctctaggcactcgttgggggttgggaggaacgtgcgtgaacgtgggctgtattcccaagaagcttatgcaccaggctgctctgctaggacaggcactgcaggacagccggaactacggctggaaggtagaagagactgtgaaacacgactgggaccgtatgatcgaggctgtccagaatcacatcggcagtctgaactggggataccgcgtggctttgcgtgagaagaaggtggtgtatgagaatgcttacggccagtttataggccctcacagaatcaaagccacaaataacaagggcaaagaaaagatctactctgcagagcgtttcttaattgctactggggagcgaccgaggtatctcggtatcccaggcgacaaggagtattgcatctcctctgacgatcttttctctctgccttactgtccaggaaagaccctggtggtgggcgcatcctacgtggcccttgagtgcgcagggtttctcgccggtatcgggcttgacgtcactgtgatggtgagatccattctcctccggggcttcgaccaggatatggccaacaagataggcgaacatatggaggagcacggaattaaattcatccggcagtttgtgccgatcaaggttgagcagatcgaagctgggacgcccggacgtttaagggtggtcgcccaatccacgaactccgaggaaataatcgaaggcgaatataacactgttatgctggcgatcggcagagacgcttgcaccaggaagataggattggaaactgtaggcgttaaaataaatgagaagacagggaaaatacctgtgacagacgaggaacagacaaatgtcccttatatatacgcgatcggagacatccttgaggacaaggttgaattaaccccggttgctattcaggccggtaggctattggcccagcgcctttacgcaggctctaccgtaaaatgtgactatgaaaatgtgcctaccactgtgtttacacccctggagtatggcgcctgcggcttgagtgaagaaaaggcggtggaaaaatttggtgaggagaacattgaggtataccacagttacttttggcctctcgaatggaccatcccaagcagggacaacaacaagtgttatgccaagatcatctgcaatactaaagataacgagagagtagttggcttccacgtgctggggcccaacgcaggggaggtgacacagggtttcgccgctgcccttaagtgtggattgactaagaaacaactggactccacaataggaattcaccctgtgtgcgcagaagttttcacgaccttgtccgtgactaagcgatccggcgcgagcattctgcaagctgggtgttag

SEQ ID NO: 93895 - DNA, 1380 bp, Artificial Sequence
  derived and/or modified sequence
atggtgctggactttgtgacccccacccccctgggcacccgctggggcctgggcggcacctgtgtgaatgtgggctgcatccccaagaagctgatgcaccaggccgccctgctgggccaggccctgcaggacagcaggaactacggctggaaggtggaggagaccgtgaagcatgactgggacaggatgattgaggccgtgcagaaccacatcggcagcctgaactggggctacagagtggccctgcgggagaagaaggtggtgtatgaaaatgcctacggccagttcatcggcccccaccgcatcaaggccaccaacaacaagggcaaggagaagatctacagcgctgagcgcttcctgattgccactggagagcggccccgctacctgggcatccctggggacaaggagtactgcatcagcagtgatgacctcttcagcctgccctactgccctgggaagaccctggtggtgggcgccagctatgtggccctggagtgtgccggcttcctggccggcatcggcctggatgtgacagtgatggtgcgcagcatcctgctgcggggctttgaccaggacatggccaacaagatcggggagcacatggaggagcacggcatcaagttcatccggcagtttgtgcccatcaaggtggagcagattgaagctggcaccccaggccgcctgcgggtggtggcccagagcaccaacagcgaggagatcatcgagggggagtacaacacagtgatgctggccatcggcagagatgcctgcaccaggaagattggcctggagaccgtgggcgtgaagatcaatgagaagacaggcaagatccctgtgacagatgaggagcagaccaacgtgccctacatctatgccatcggggacatcctggaggacaaggtggagctgacccctgtggccatccaggccggccgcctgctggcccagaggctgtatgccggcagcacagtgaagtgtgactatgaaaatgtgcccaccaccgtcttcacccccctggagtatggagcctgtggcctgtctgaggagaaggctgtggagaagtttggagaagaaaatattgaggtgtaccacagctacttctggcccctggagtggaccatccccagccgggacaacaacaagtgctacgccaagatcatctgcaacaccaaggacaatgaaagagtggtgggcttccacgtgctgggccccaatgctggggaggtgacccagggctttgctgctgccctgaagtgtggcctgaccaagaagcagctggacagcaccatcggcatccaccctgtgtgtgccgaggtgttcaccaccctgtctgtgaccaagaggtctggggccagcatcctgcaggccggctgctag

SEQ ID NO: 93896 - DNA, 1380 bp, Artificial Sequence
  derived and/or modified sequence
atggtgctggacttcgtgacccccacccccctgggcacccggtggggactgggcgggacttgcgtcaatgtgggctgtatccctaaaaagttgatgcatcaggcggcactgctcgggcaggcattgcaggattcccggaactatggctggaaggtggaggaaacagtgaagcacgattgggacaggatgatcgaagccgtccaaaaccacatcggttccctgaattgggggtacagagttgctctccgcgaaaaaaaggtagtgtatgagaacgcctacggccaatttatcggtccacaccgaattaaagctaccaacaacaagggtaaggagaaaatttactcggccgagaggttcctgattgctacgggtgaaaggcctaggtacctgggtatccccggcgacaaagagtactgcataagctccgacgatcttttctccctaccgtattgtcccggcaaaacccttgttgtgggagcttcctacgtcgccctggagtgtgcgggctttttggcaggaattggcctagacgtaacagtaatggtgcgcagtatcctcctgcggggcttcgaccaggatatggccaacaagattggcgagcatatggaggagcacgggatcaagttcattcgacagttcgtgcctatcaaggtggaacagatcgaggctggcacccccggcagactgcgcgtggtggcccagtccacaaacagcgaggagatcattgaaggtgaatataatacagtcatgctggccattggcagggatgcttgcaccaggaagattggcctcgaaactgtcggggtgaagattaatgagaaaacaggcaagattcctgtgactgatgaagaacagaccaatgtgccttacatctatgccatcggagatatcctggaggacaaggtggaacttacacctgtcgctattcaggctggccggttattagctcagcggctgtatgcagggtcaactgtgaaatgcgattatgagaacgtgccgacaacggtgtttactcctctcgagtatggagcctgtggcctctccgaagagaaggcagtggaaaagtttggggaagagaatattgaggtatatcacagttacttttggccgctcgagtggacaattccttctagggataacaacaagtgctacgccaagattatctgcaatactaaggacaatgagcgagtcgtgggctttcatgtcttaggacctaacgcgggggaggtgacacagggctttgctgcagccttaaaatgtggacttacaaaaaaacagctcgacagtaccatcggcattcacccagtttgtgccgaggtctttactactctctcggtgaccaaacgcagtggcgcctcgatactgcaagctggatgctag

SEQ ID NO: 93897 - DNA, 1380 bp, Artificial Sequence
  derived and/or modified sequence
atggtcctagatttcgtgaccccaaccccgctggggacccggtggggcctgggtgggacttgcgtgaatgtaggttgtatacctaagaaactcatgcaccaggctgcattgctgggccaggcactacaggactctagaaattatggctggaaggtggaggagaccgtgaaacatgattgggaccggatgatcgaggcagtgcaaaaccatatcgggtctctgaactggggttatcgggtggcgctgcgggagaaaaaagtcgtatacgagaacgcctatgggcagttcattgggcctcacaggatcaaggccacgaataacaaaggaaaggagaagatatatagcgctgaacgctttctaatcgcaacaggcgaacggcctcggtacctgggcattcctggcgacaaggaatactgtatatcctctgacgacctcttctctctgccgtactgtccgggaaaaaccttggtggttggagcttcctatgtcgcactcgaatgtgccggattccttgcagggatagggctcgacgtcacagtgatggttagatcgatcctcctgcgaggatttgaccaggatatggcgaacaaaattggagagcacatggaggagcacgggatcaaatttatacgccagttcgtccccattaaagttgagcagatcgaagcgggtactcctggtagactgcgagttgtggctcagtctacgaacagcgaagaaattatcgaaggcgagtacaacacagtcatgctggctatcggcagggatgcatgtacacggaaaatcgggttggagaccgtcggcgtgaaaattaacgagaagaccgggaagattcccgtgacagacgaggaacagaccaacgttccctacatttatgcgatcggtgacattcttgaagataaagtcgagctcacgcccgtcgcgattcaggcgggtcgcctgctagctcagcggctctacgcgggaagcactgttaagtgtgattacgagaacgtgcctacaactgttttcaccccacttgagtacggcgcttgtgggcttagcgaggaaaaggccgtggagaaattcggggaagaaaacattgaggtgtaccattcctatttttggcccctcgaatggacaatcccctcgagggataacaacaagtgctacgccaaaatcatctgtaacactaaagacaacgagagagtagttggctttcacgtgttgggaccgaatgcgggtgaggtgacacaaggattcgctgccgcactgaaatgcgggcttacgaagaaacagcttgatagtaccattgggattcatccagtgtgcgcagaagtgttcacgactttgtcagtgaccaaacgatccggcgcatctattctgcaggccggatgttag

SEQ ID NO: 93898 - protein, 271 aa, Artificial Sequence
  derived and/or modified sequence
MTDLEGCFECCIKCLGGIPYASLIATILLYAGVALFCGCGHEALSGTVNILQTYFEMARTAGDTLDVFTMIDIFKYVIYGIAAAFFVYGILLMVEGFFTTGAIKDLYGDFKITTCGRCVSAWFIMLTYLFMLAWLGVTAFTSLPVYMYFNLWTICRNTTLVEGANLCLDLRQFGIVTIGEEKKICTVSENFLRMCESTELNMTFHLFIVALAGAGAAVIAMVHYLMVLSANWAYVKDACRMQKYEDIKSKEEQELHDIHSTRSKERLNAYT

SEQ ID NO: 93899 - DNA, 816 bp, Artificial Sequence
  derived and/or modified sequence
atgaccgacctggagggctgcttcgagtgctgcatcaagtgcctgggcggcatcccctacgccagcctgatcgccaccatcctgctgtacgccggcgtggccctgttctgcggctgcggccacgaggccctgagcggcaccgtgaacatcctgcagacctacttcgagatggccagaaccgccggcgacaccctggacgtgttcaccatgatcgacatcttcaagtacgtgatctacggcatcgccgccgccttcttcgtgtacggcatcctgctgatggtggagggcttcttcaccaccggcgccatcaaggacctgtacggcgacttcaagatcaccacctgcggcagatgcgtgagcgcctggttcatcatgctgacctacctgttcatgctggcctggctgggcgtgaccgccttcaccagcctgcccgtgtacatgtacttcaacctgtggaccatctgcagaaacaccaccctggtggagggcgccaacctgtgcctggacctgagacagttcggcatcgtgaccatcggcgaggagaagaagatctgcaccgtgagcgagaacttcctgagaatgtgcgagagcaccgagctgaacatgaccttccacctgttcatcgtggccctggccggcgccggcgccgccgtgatcgccatggtgcactacctgatggtgctgagcgccaactgggcctacgtgaaggacgcctgcagaatgcagaagtacgaggacatcaagagcaaggaggagcaggagctgcacgacatccacagcaccagaagcaaggagagactgaacgcctacacctag

SEQ ID NO: 93900 - DNA, 816 bp, Artificial Sequence
  derived and/or modified sequence
atgactgatcttgagggctgctttgaatgttgtataaagtgtctcggcggcatcccttatgccagcctgatcgcaactattctgttatacgccggggtggcgttattttgcgggtgtggccatgaggccctgagcgggaccgtgaacatcctacaaacctattttgaaatggcccgtactgctggtgatactttggatgtgttcaccatgatcgatatcttcaagtatgttatctacgggatagccgcggcattttttgtctacgggattctcctcatggttgagggatttttcaccacaggggccatcaaagatctgtacggcgatttcaagattaccacatgcgggcgttgcgtgtcagcctggtttatcatgctgacatacctgttcatgctggcctggcttggcgtgaccgcatttacctccctgccagtgtacatgtactttaacctttggacaatctgtcggaatacaacactggtcgagggcgccaacctctgcctggacctcaggcagttcgggattgtgaccatcggagaagaaaagaagatctgcaccgtcagcgagaactttctgcgcatgtgcgaaagcacggaactgaatatgacctttcacctgtttattgtggccttggcaggcgctggggctgccgtgatcgcgatggtccattacctaatggtgttgtccgcgaattgggcctacgtgaaagacgcgtgtcgtatgcagaagtacgaggacatcaaatcaaaagaagaacaggagctccatgacattcactcaacgagaagtaaagaaaggctgaacgcttacacctag

SEQ ID NO: 93901 - DNA, 1500 bp, Artificial Sequence
  derived and/or modified sequence
gcatatattaaatttgtctgactaggaagagttatgtcagtaaagcaattagatacatgggttgtgatttggggaaaaaagctgaattagaaatctgtacttgtaaatcatcaacaagtatgtaatcattggtgatgttgatactgatgaaatcaacctaaaggtggaacaaaaaggaccaaaaatagtgacttaaaaaaacaatttagaaaaaatctcagaacacgaaacagaatgttaaattgtcacaggagagagcttatgcccttgaatcaagggaaaatagagttcacaaggagccagcggccggcagcatcacacttttatgacagacctggaagggtgttttgaatgctgtatcaaatgcctggggggcattccctatgcctctctgattgccaccatcctgctctatgcgggtgttgccctgttctgtggctgcggtcatgaagcgctttctggaactgtcaacattctgcaaacctactttgagatggcaagaactgctggagacacactggatgtttttaccatgattgacatctttaagtatgtgatctacggcatcgcagctgcgttctttgtgtatggcattttgctgatggtggaaggtttcttcacaactggggccatcaaagatctctatggggatttcaaaatcaccacttgtggcagatgtgtgagcgcttggttcattatgctgacatatcttttcatgttggcctggctgggagtcacggctttcacctcactgccagtttacatgtacttcaatctgtggaccatctgccggaacaccacattagtggagggagcaaatctctgcttggaccttcgtcagtttggaattgtgacaattggagaggaaaagaaaatttgtactgtctctgagaatttcttgaggatgtgcgaatctactgagctgaacatgaccttccacttgtttattgtggcacttgctggagctggggcagcagtcattgctatggttcactaccttatggttctgtctgccaactgggcctatgtgaaagacgcctgccggatgcagaagtatgaagacatcaagtcgaaggaagagcaagagcttcatgacatccactctactcgctccaaagagcggctcaatgcatacacataaatgcatcttcctgttctttctaccatttgaatgcattggtgtttaactaagggccatccaaccatccaacctttaaaaaacaaaacgaaagtgcttctcatcaatgatatgtaaggtgacttatgaatcacctgagtacaattctttgttgtttagcacttaaatttcccaatttattaaattgatgtaaatcagatcttttctacaagctcctatccagccttttttttgaaatttctcaaactcatttactagttctgtaaaatcaaagatactaacattgtcaaatgcaaagatttgtttgatttttaaccacttcccatgtgttatacataacaccttttgcattatttcttatg

SEQ ID NO: 93902 - DNA, 816 bp, Artificial Sequence
  derived and/or modified sequence
atgacagacctggagggctgctttgagtgctgcatcaagtgcctgggcggcatcccctatgccagcctcatcgccaccatcctgctgtatgccggcgtggccctcttctgtggctgcggccacgaggccctgtctggaacagtgaacatcctgcagacctactttgagatggccaggacagctggggacaccctggatgtgttcaccatgattgacatcttcaagtatgtgatctatggaattgctgctgccttctttgtgtatggcatcctgctgatggtggagggcttcttcaccaccggggccatcaaggacctgtatggagacttcaagatcaccacctgtggccgctgtgtgtctgcctggttcatcatgctgacctacctgttcatgctggcctggctgggcgtgacagccttcaccagcctgcctgtgtacatgtacttcaacctgtggaccatctgcaggaacaccaccctggtggagggcgccaacctgtgcctggacctgcggcagtttggaattgtgaccatcggggaggagaagaagatctgcaccgtgtctgagaacttcctgaggatgtgtgagagcacagagctgaacatgaccttccacctgttcatcgtggccctggccggggccggggctgctgtgattgccatggtgcactacctgatggtgctgagcgccaactgggcctacgtgaaggatgcctgcaggatgcagaagtatgaggacatcaagagcaaggaggagcaggagctgcatgacatccacagcaccaggagcaaggagcggctgaatgcctacacctag

SEQ ID NO: 93903 - DNA, 816 bp, Artificial Sequence
  derived and/or modified sequence
atgaccgacctggagggctgcttcgagtgctgcatcaagtgcctgggggggatcccctacgcctctctgattgccaccatccttctatatgcaggagtagcacttttttgcggctgtggacacgaagccctaagtggtaccgtgaacattctgcaaacctacttcgagatggcgcgaactgctggagataccttggacgtgttcactatgatagatattttcaagtatgtcatctatgggatcgctgccgcttttttcgtgtacggaatcctcttaatggttgaaggattttttaccacaggtgcaataaaggacttatatggagatttcaagatcaccacgtgcggcaggtgcgttagtgcctggttcatcatgctaacatatctgttcatgttggcctggctgggggttacggcatttaccagccttccggtgtacatgtatttcaatctgtggactatctgtaggaataccacactggtggaaggtgctaacctctgcttagatctgaggcagtttggaattgtcacaattggggaggaaaagaaaatttgcaccgtgagcgagaattttctgaggatgtgtgagtccactgaactcaacatgacatttcacctctttattgtggcgctggccggcgcaggggctgccgtgatcgccatggtacactatcttatggtgttgagtgctaattgggcctacgtcaaggatgcctgcagaatgcaaaaatatgaagacataaagtcaaaggaagagcaggagctccatgacatccactccacacgatctaaggagagactgaatgcttacacctag

SEQ ID NO: 93904 - DNA, 816 bp, Artificial Sequence
  derived and/or modified sequence
atgacagacttagaggggtgtttcgagtgttgtatcaagtgcttaggaggaattccatatgccagcctgatcgccactatactactgtatgcaggtgtggctcttttctgcggatgtggccacgaggccttatctgggacagtgaacattttgcagacatattttgaaatggcaagaacggccggagacacactggatgttttcaccatgattgacatcttcaaatacgttatttacgggatagcagcggctttctttgtgtacggcatcctcctgatggtggaaggtttttttaccaccggagcaatcaaggatttatacggggacttcaaaattacgacctgtggtcggtgcgtgagcgcctggttcatcatgctgacctatctttttatgttggcatggctgggtgtgacagccttcacatcactgcccgtgtatatgtacttcaatctctggacaatctgtaggaatactaccctagtggaaggagcaaacctttgcctggacttaaggcagtttgggatcgtgaccattggagaagagaagaagatatgcactgtgtccgagaattttttgcgcatgtgcgagagcaccgagttgaatatgaccttccacttgtttatcgttgctctggcgggagccggagcggctgtcatcgccatggtgcattatctgatggtgctctcggccaactgggcctacgttaaggatgcatgtcggatgcaaaaatacgaagacataaaatctaaggaggaacaggagctgcacgacatccattccactcgcagtaaggaaaggttgaacgcctacacctag

SEQ ID NO: 93905 - protein, 268 aa, Artificial Sequence
  derived and/or modified sequence
MASAGGEDCESPAPEADRPHQRPFLIGSTVCEKIMELLGQNEVEQRQRKVVILSQDRFYKVLTAEQKAKALKGQYNFDHPDAFDNDLMHRTLKNIVEGKTVEVPTYDFVTHSRLPETTVVYPADVVLFEGILVFYSQEIRDMFHLRLFVDTDSDVRLSRRVLRDVRRGRDLEQILTQYTTFVKPAFEEFCLPTKKYADVIIPRGVDNMVAINLIVQHIQDILNGDICKWHRGGSNGRSYKRTFSEPGDHPGMLTSGKRSHLESSSRPH

SEQ ID NO: 93906 - DNA, 807 bp, Artificial Sequence
  derived and/or modified sequence
atggccagcgccggcggcgaggactgcgagagccccgcccccgaggccgacagaccccaccagagacccttcctgatcggcagcaccgtgtgcgagaagatcatggagctgctgggccagaacgaggtggagcagagacagagaaaggtggtgatcctgagccaggacagattctacaaggtgctgaccgccgagcagaaggccaaggccctgaagggccagtacaacttcgaccaccccgacgccttcgacaacgacctgatgcacagaaccctgaagaacatcgtggagggcaagaccgtggaggtgcccacctacgacttcgtgacccacagcagactgcccgagaccaccgtggtgtaccccgccgacgtggtgctgttcgagggcatcctggtgttctacagccaggagatcagagacatgttccacctgagactgttcgtggacaccgacagcgacgtgagactgagcagaagagtgctgagagacgtgagaagaggcagagacctggagcagatcctgacccagtacaccaccttcgtgaagcccgccttcgaggagttctgcctgcccaccaagaagtacgccgacgtgatcatccccagaggcgtggacaacatggtggccatcaacctgatcgtgcagcacatccaggacatcctgaacggcgacatctgcaagtggcacagaggcggcagcaacggcagaagctacaagagaaccttcagcgagcccggcgaccaccccggcatgctgaccagcggcaagagaagccacctggagagcagcagcagaccccactag

SEQ ID NO: 93907 - DNA, 807 bp, Artificial Sequence
  derived and/or modified sequence
atggcaagcgccgggggcgaggactgtgaaagccctgctccagaggcggacaggccacatcagcgtccatttctgataggcagcaccgtgtgtgagaaaatcatggagttgcttgggcaaaatgaggtggagcagcggcagcgcaaggtcgtcattttgagccaagatagattctataaagtgcttacagcggaacagaaggctaaagccctcaagggccagtataactttgatcatcctgatgccttcgataacgacctgatgcacaggaccctgaaaaacattgttgaaggcaagacagttgaagtccccacatatgacttcgtgactcattcgcgcttacccgaaaccaccgtggtttatccagccgatgtagtactgttcgaggggattctcgtattctattctcaggaaataagagacatgtttcaccttagactgttcgtggacactgatagtgacgtgcggctgtcaaggagggtacttcgggatgtgagacgcgggagagatttggagcagatactgactcagtacacaacctttgtcaaaccggccttcgaggaattttgtctgccaaccaaaaaatatgctgacgtaatcatccctcgaggggttgataatatggtggccatcaacctgattgtccagcatattcaagatatactgaatggagatatatgtaagtggcacagggggggaagcaacggacggagctataagagaacatttagcgaacctggcgatcatcccggaatgctgacatcaggcaaaaggagccatctggaatccagcagcagaccccactag

SEQ ID NO: 93908 - DNA, 807 bp, Artificial Sequence
  derived and/or modified sequence
atggccagcgctggaggagaggactgtgagagccctgcccctgaggccgaccggccccaccagaggcccttcctgattggcagcacagtgtgtgagaagatcatggagctgctgggccagaatgaggtggagcagaggcagaggaaggtggtgatcctgagccaggaccgcttctacaaggtgctgacagctgagcagaaggccaaggccctgaagggccagtacaactttgaccacccagatgcctttgacaatgacctgatgcacaggaccctgaagaacatcgtggagggcaagacagtggaggtgcccacctatgactttgtgacccacagccggctgcctgagaccaccgtggtgtacccagcagatgtggtgctgtttgagggcatcctggtgttctacagccaggagatccgggacatgttccacctgcggctgtttgtggacacagacagtgatgtgcggctgagcagaagagtgctgagagatgtgcggcggggccgggacctggagcagatcctgacccagtacaccacctttgtgaagccagcctttgaggagttctgcctgcccaccaagaagtatgcagatgtgatcatcccccggggcgtggacaacatggtggccatcaacctgattgtgcagcacatccaggacatcctgaatggagacatctgcaagtggcaccggggcggcagcaatggccgcagctacaagaggaccttcagcgagcccggggaccaccctggcatgctgaccagcggcaagaggagccacctggagagcagcagccggccccactag

SEQ ID NO: 93909 - DNA, 807 bp, Artificial Sequence
  derived and/or modified sequence
atggccagcgccggcggcgaggactgcgagagccccgcccccgaggcagaccgcccccaccaaaggcccttcctgattgggtcaacagtgtgcgagaagattatggagctgttgggccagaacgaggtggagcagcggcagcgtaaggttgtgattctgagccaggaccggttttataaagtgttgaccgccgagcagaaggcaaaggctctgaagggtcagtacaactttgatcacccagatgcgttcgataacgatttgatgcatagaacactcaagaatattgtggagggcaagactgttgaagtcccaacttacgacttcgtgacccacagccgtcttcctgagactacagtcgtctatcctgccgatgtcgtgctgttcgagggcatactggtgttttactctcaagaaatcagagatatgtttcatcttagactgtttgtggatacagattcagatgtgcgcttatcaaggcgggtcttacgagacgtgaggcggggaagagacctggaacagatcctaacgcagtacaccacttttgtaaagcctgcctttgaggaattctgtcttcctactaagaagtatgcagacgtgattattccccgaggcgtagacaacatggtggcaattaatctaatagtccaacacattcaagacattttaaacggggacatttgtaagtggcacaggggaggaagcaacgggagatcatacaaacggacattctcagagccgggggaccaccctggcatgctgacctctggtaaaaggtcccatctggaatcatcttcacgaccacactag

SEQ ID NO: 93910 - DNA, 807 bp, Artificial Sequence
  derived and/or modified sequence
atggcatccgcgggaggggaggactgcgagagccccgctccagaagcagaccggccacaccagcggccatttctcattggctccaccgtctgtgagaagatcatggagttgctgggtcagaatgaagtcgaacaacggcagaggaaggtggtcattctgtcgcaggatcgcttctataaagtcctaaccgcggagcagaaagctaaggccctgaagggacagtacaattttgaccacccagacgcatttgataatgatcttatgcacaggacactcaaaaatattgttgaaggtaagaccgtggaggtgcctacatacgactttgtgacccactctagactgcctgagacaacggtggtctaccccgcagacgtagtgctctttgaaggtatcctggtgttctactctcaggagattcgggatatgtttcatctgagactgttcgtggacacagattcagatgttcgcttaagcaggcgtgtgcttcgggacgtcaggcggggtagagacctcgaacagattcttactcagtacacaacatttgtgaagcccgcttttgaagaattctgtctcccgacaaagaagtacgcagacgtaattattccaaggggcgttgacaatatggtggccattaaccttattgttcagcacattcaggacatcctgaatggtgacatttgcaagtggcatagaggtggaagcaacggcagatcctacaaaaggacctttagcgagcctggcgatcatcccggaatgctcaccagtggaaagaggagtcacttggagtccagcagtcggcctcactag

SEQ ID NO: 93911 - DNA, 2051 bp, Artificial Sequence
  derived and/or modified sequence
ccgagatggcttcggcgggaggcgaagactgcgagagccccgcgccggaggccgaccgtccgcaccagcggcccttcctgatagggtcgaccgtgtgtgagaagatcatggagttgctgggacagaacgaggtggaacagcggcagcggaaggtggtcatcctgagccaggacaggttctacaaggtcctgacggcagagcagaaggccaaggccttgaaaggacagtacaattttgaccatccagatgcctttgataatgatttgatgcacaggactctgaagaacatcgtggagggcaaaacggtggaggtgccgacctatgattttgtgacacactcaaggttaccagagaccacggtggtctaccctgcggacgtggttctgtttgagggcatcttggtgttctacagccaggagatccgggacatgttccacctgcgcctcttcgtggacaccgactccgacgtcaggctgtctcgaagagttctccgggacgtgcgccgagggagggacctggagcagattctgacgcagtacaccaccttcgtgaagccggccttcgaggagttctgcctgccgacaaagaagtatgccgatgtgatcatcccgcgaggagtggacaatatggttgccatcaacctgatcgtgcagcacatccaggacattctgaatggtgacatctgcaaatggcaccgaggagggtccaatgggcggagctacaagcggaccttttctgagccaggggaccaccctgggatgctgacctctggcaaacggtcacatttggagtccagcagcagaccccactgaggggctgccgagcctcagggcaggtctcccgcccggcatgtgtgttcagggactgagcctggggacgcccacccacacccactgcttcctctcggcgcaccccaggggagtgttagcagcgaggccttcctcactcaggagtggaaactcagatgtgtcactcagactcaacttgctgggacactgacaggcgttcctgaggttttcagccacttaggctcgttgcggtttaaagatccctctaggtcactgagaaatgccacagaatgtgcaggaagcctgggaggcttctgtgaggaatgtgaggcacattattggggaaattgaggagacagcctagacactggctggcctgatgttttgttgacagtgaacccacagtgggagagagttttttccagtctgatctggttcttacacactcacacacataactcaaaagttttgtgaacaagtactttccttttttacatgttacatgtcctcatgttttctgttttctgtttcataacacaaggctggttgtggcctacaaacctaatttcatgacccagtggtttgcagtccagcgtggcctacacggatatggggagccactgagggatgttttccccccttgcttgtgccttaaaggcagagaagcgaggcggatgccctggaagcacccagcatcacacccaggcttgtgcggggccaggctgggagcccatgcagtagggcagaaggcagcggaggccaggtctgtcccggctggagaacagcgtccacgcagtcctgcctggggtcaggccctcactgaccctcaggggagcccccaaggtgctgtctgtctagacaggctgtcccaccccagggtggctagtggccatatgcagggaatggtgcttctggctgtggcacgcactggatcacccaggtcccagcagacatggccgcccaaagtcagcaagcctcctttgtgctatgtggagctcacagcctcacatgtgaacacccgtgtctgggttgcctggggtgatcctccctcctgcgtggtggctgtctctggaaagcatcccttgccgctgccatgggcagccccagcccccgtccgtccaggctcacccacagtagtgatgcagacgtgacgtgggggaagggggctgagccctgtggctgggttctgacaactgtaacggttttgtcgagcttaggcccctttggagggagaatcaataaataacaaacaccaactacaaa

SEQ ID NO: 93912 - protein, 282 aa, Artificial Sequence
  derived and/or modified sequence
MASAGGEDCESPAPEADRPHQRPFLIGDERFQAGIPLLCLQSTVCEKIMELLGQNEVEQRQRKVVILSQDRFYKVLTAEQKAKALKGQYNFDHPDAFDNDLMHRTLKNIVEGKTVEVPTYDFVTHSRLPETTVVYPADVVLFEGILVFYSQEIRDMFHLRLFVDTDSDVRLSRRVLRDVRRGRDLEQILTQYTTFVKPAFEEFCLPTKKYADVIIPRGVDNMVAINLIVQHIQDILNGDICKWHRGGSNGRSYKRTFSEPGDHPGMLTSGKRSHLESSSRPH

SEQ ID NO: 93913 - DNA, 849 bp, Artificial Sequence
  derived and/or modified sequence
atggccagcgccggcggcgaggactgcgagagccccgcccccgaggccgacagaccccaccagagacccttcctgatcggcgacgagagattccaggccggcatccccctgctgtgcctgcagagcaccgtgtgcgagaagatcatggagctgctgggccagaacgaggtggagcagagacagagaaaggtggtgatcctgagccaggacagattctacaaggtgctgaccgccgagcagaaggccaaggccctgaagggccagtacaacttcgaccaccccgacgccttcgacaacgacctgatgcacagaaccctgaagaacatcgtggagggcaagaccgtggaggtgcccacctacgacttcgtgacccacagcagactgcccgagaccaccgtggtgtaccccgccgacgtggtgctgttcgagggcatcctggtgttctacagccaggagatcagagacatgttccacctgagactgttcgtggacaccgacagcgacgtgagactgagcagaagagtgctgagagacgtgagaagaggcagagacctggagcagatcctgacccagtacaccaccttcgtgaagcccgccttcgaggagttctgcctgcccaccaagaagtacgccgacgtgatcatccccagaggcgtggacaacatggtggccatcaacctgatcgtgcagcacatccaggacatcctgaacggcgacatctgcaagtggcacagaggcggcagcaacggcagaagctacaagagaaccttcagcgagcccggcgaccaccccggcatgctgaccagcggcaagagaagccacctggagagcagcagcagaccccactag

SEQ ID NO: 93914 - DNA, 849 bp, Artificial Sequence
  derived and/or modified sequence
atggcaagcgccggtggcgaagactgcgaaagccccgcgccggaggccgatcgcccacaccagagaccatttctgatcggggatgagaggttccaggctgggattcctctgttgtgtctccagtccaccgtgtgcgagaagatcatggaactgcttggacagaatgaggtggagcagaggcagagaaaagtagtgatcctgagccaagaccggttttacaaggtgttgacagccgaacagaaggccaaagcgctcaaaggacaatacaacttcgatcaccccgacgcattcgacaatgacttaatgcatcggactctgaagaatatcgtggagggcaagacagtcgaggtccccacttacgactttgtaacacacagccgactgcctgaaaccaccgttgtgtatccagctgacgtggtgttgttcgagggcatcctggtgttctacagtcaggaaattcgcgacatgtttcacctgcgcctgtttgtcgacaccgactctgatgtacgcctgagtcgtcgagttcttcgggacgtacgacgcggccgcgatctagaacaaattctcactcagtacacaacattcgtaaagcccgccttcgaagagttctgtttacctactaagaaatacgcagacgtcatcatccctagaggcgtggataatatggtagccattaacctgattgtgcagcacatacaggacattctgaacggcgacatctgcaagtggcacagaggtggatctaacgggcgttcttataaacgtacattctccgaaccgggagaccaccctggaatgctgacatcaggcaagcgatctcatttagagagctccagccggccccactag

SEQ ID NO: 93915 - DNA, 849 bp, Artificial Sequence
  derived and/or modified sequence
atggccagcgctggaggagaggactgtgagagccctgcccctgaggccgaccggccccaccagaggcccttcctgattggagatgagcgcttccaggccggcatccccctgctgtgcctgcagagcacagtgtgtgagaagatcatggagctgctgggccagaatgaggtggagcagaggcagaggaaggtggtgatcctgagccaggaccgcttctacaaggtgctgacagctgagcagaaggccaaggccctgaagggccagtacaactttgaccacccagatgcctttgacaatgacctgatgcacaggaccctgaagaacatcgtggagggcaagacagtggaggtgcccacctatgactttgtgacccacagccggctgcctgagaccaccgtggtgtacccagcagatgtggtgctgtttgagggcatcctggtgttctacagccaggagatccgggacatgttccacctgcggctgtttgtggacacagacagtgatgtgcggctgagcagaagagtgctgagagatgtgcggcggggccgggacctggagcagatcctgacccagtacaccacctttgtgaagccagcctttgaggagttctgcctgcccaccaagaagtatgcagatgtgatcatcccccggggcgtggacaacatggtggccatcaacctgattgtgcagcacatccaggacatcctgaatggagacatctgcaagtggcaccggggcggcagcaatggccgcagctacaagaggaccttcagcgagcccggggaccaccctggcatgctgaccagcggcaagaggagccacctggagagcagcagccggccccactag

SEQ ID NO: 93916 - DNA, 849 bp, Artificial Sequence
  derived and/or modified sequence
atggccagcgccggcggcgaggactgcgagagccccgcccccgaggctgaccggccacaccaacggcctttcttgatcggcgacgagaggttccaggccggtatccccctcctatgtctgcagtcgacggtatgtgaaaaaatcatggaacttttaggtcagaatgaggtggagcagcgccaacgcaaggtggtaattctatctcaggacagattttataaagtgctaacggctgagcaaaaggccaaggcccttaaggggcagtacaacttcgatcatccagatgccttcgacaatgatctgatgcaccggactctaaagaacatcgtggaaggcaagaccgtggaagtgcctacctacgactttgtgacacatagcaggctaccagagaccacagtggtgtaccccgccgatgttgtgctgtttgaaggaatcctggtgttttattctcaggagatcagggacatgtttcatctgcggctatttgttgacactgattcagacgtgcggctcagtcgtcgggtgcttcgcgacgtgaggaggggcagggacctcgagcagattcttacgcagtacacaacatttgtcaaacccgcgtttgaagagttttgcctgccgaccaagaagtacgctgatgtgattattcctaggggggtcgataacatggttgcgattaatcttattgttcaacatattcaagatatattaaacggtgacatatgtaagtggcatcggggcggcagcaacggaaggagctataagcgcactttctctgagcccggggatcaccccgggatgctcacatctggaaaaagatcccacctggagtccagcagtcgtccgcattag

SEQ ID NO: 93917 - DNA, 849 bp, Artificial Sequence
  derived and/or modified sequence
atggctagcgcgggtggtgaagattgcgagagccccgcacccgaggccgatcgcccacaccagcgcccatttctgatcggtgacgagcggttccaagccggtatacctctgttgtgccttcagtcgactgtatgtgagaaaattatggaattgcttggccagaacgaggtggaacagcgccagcgcaaggttgtcatactgagtcaggacaggttctacaaggtgctcacggccgaacagaaggctaaagctctcaaaggccaatataacttcgatcatcccgatgcatttgataatgatctgatgcacaggacactcaagaacatcgtcgaaggcaagacggtggaggttcctacatacgattttgtcacccactctaggctgcccgaaaccacagtggtgtacccagcggatgttgtgctgttcgaaggaattctggttttctatagtcaggagatcagagacatgttccatctcagactgttcgtggacactgatagcgatgttcggctgagcaggcgcgtgctccgggacgtgcggaggggaagagacctggaacaaattctgactcaatataccacattcgttaaacctgcgtttgaggagttttgcttgcccacaaaaaagtacgctgacgtgatcattccacgtggcgttgataatatggtcgcgattaacctgatcgttcagcatattcaggacatccttaatggagacatctgtaagtggcacagggggggtagcaatggccgttcttacaaacgcaccttcagcgagcccggtgaccatccgggtatgcttaccagcgggaagaggtcacacctggaatcatctagtcgaccacactag

SEQ ID NO: 93918 - DNA, 2114 bp, Artificial Sequence
  derived and/or modified sequence
cccgatgcgcgggagcggaggccgagatggcttcggcgggaggcgaagactgcgagagccccgcgccggaggccgaccgtccgcaccagcggcccttcctgataggggacgagcggttccaggcgggaatcccgcttctgtgtctccagtcgaccgtgtgtgagaagatcatggagttgctgggacagaacgaggtggaacagcggcagcggaaggtggtcatcctgagccaggacaggttctacaaggtcctgacggcagagcagaaggccaaggccttgaaaggacagtacaattttgaccatccagatgcctttgataatgatttgatgcacaggactctgaagaacatcgtggagggcaaaacggtggaggtgccgacctatgattttgtgacacactcaaggttaccagagaccacggtggtctaccctgcggacgtggttctgtttgagggcatcttggtgttctacagccaggagatccgggacatgttccacctgcgcctcttcgtggacaccgactccgacgtcaggctgtctcgaagagttctccgggacgtgcgccgagggagggacctggagcagattctgacgcagtacaccaccttcgtgaagccggccttcgaggagttctgcctgccgacaaagaagtatgccgatgtgatcatcccgcgaggagtggacaatatggttgccatcaacctgatcgtgcagcacatccaggacattctgaatggtgacatctgcaaatggcaccgaggagggtccaatgggcggagctacaagcggaccttttctgagccaggggaccaccctgggatgctgacctctggcaaacggtcacatttggagtccagcagcagaccccactgaggggctgccgagcctcagggcaggtctcccgcccggcatgtgtgttcagggactgagcctggggacgcccacccacacccactgcttcctctcggcgcaccccaggggagtgttagcagcgaggccttcctcactcaggagtggaaactcagatgtgtcactcagactcaacttgctgggacactgacaggcgttcctgaggttttcagccacttaggctcgttgcggtttaaagatccctctaggtcactgagaaatgccacagaatgtgcaggaagcctgggaggcttctgtgaggaatgtgaggcacattattggggaaattgaggagacagcctagacactggctggcctgatgttttgttgacagtgaacccacagtgggagagagttttttccagtctgatctggttcttacacactcacacacataactcaaaagttttgtgaacaagtactttccttttttacatgttacatgtcctcatgttttctgttttctgtttcataacacaaggctggttgtggcctacaaacctaatttcatgacccagtggtttgcagtccagcgtggcctacacggatatggggagccactgagggatgttttccccccttgcttgtgccttaaaggcagagaagcgaggcggatgccctggaagcacccagcatcacacccaggcttgtgcggggccaggctgggagcccatgcagtagggcagaaggcagcggaggccaggtctgtcccggctggagaacagcgtccacgcagtcctgcctggggtcaggccctcactgaccctcaggggagcccccaaggtgctgtctgtctagacaggctgtcccaccccagggtggctagtggccatatgcagggaatggtgcttctggctgtggcacgcactggatcacccaggtcccagcagacatggccgcccaaagtcagcaagcctcctttgtgctatgtggagctcacagcctcacatgtgaacacccgtgtctgggttgcctggggtgatcctccctcctgcgtggtggctgtctctggaaagcatcccttgccgctgccatgggcagccccagcccccgtccgtccaggctcacccacagtagtgatgcagacgtgacgtgggggaagggggctgagccctgtggctgggttctgacaactgtaacggttttgtcgagcttaggcccctttggagggagaatcaataaataacaaacaccaactacaaa

SEQ ID NO: 93919 - DNA, 2340 bp, Artificial Sequence
  derived and/or modified sequence
gctgtggtaagtgcatcctccttcagtctcagttctgaaaatagatcatcatggtggcaccaaagagtcacacagatgactgggctcctgggcctttctccagtaagccacagaggagtcagctgcaaatattctcttctgttctacagacctctctcctcttcctgctcatgggactaagagcctctggaaaggactcagccccaacagtggtgtcagggatcctagggggttccgtgactctccccctaaacatctcagtagacacagagattgagaacgtcatctggattggtcccaaaaatgctcttgctttcgcacgtcccaaagaaaatgtaaccattatggtcaaaagctacctgggccgactagacatcaccaagtggagttactccctgtgcatcagcaatctgactctgaatgatgcaggatcctacaaagcccagataaaccaaaggaattttgaagtcaccactgaggaggaattcaccctgttcgtctatgagcagctgcaggagccccaagtcaccatgaagtctgtgaaggtgtctgagaacttctcctgtaacatcactctaatgtgctccgtgaagggggcagagaaaagtgttctgtacagctggaccccaagggaaccccatgcttctgagtccaatggaggctccattcttaccgtctcccgaacaccatgtgacccagacctgccatacatctgcacagcccagaaccccgtcagccagagaagctccctccctgtccatgttgggcagttctgtacagatccaggagcctccagaggaggaacaacgggggagactgtggtaggggtcctgggagagccagtcaccctgccacttgcactcccagcctgccgggacacagagaaggttgtctggttgtttaacacatccatcattagcaaagagagggaagaagcagcaacggcagatccactcattaaatccagggatccttacaagaacagggtgtgggtctccagccaggactgctccctgaagatcagccagctgaagatagaggacgccggcccctaccatgcctacgtgtgctcagaggcctccagcgtcaccagcatgacacatgtcaccctgctcatctaccgcaggctgaggaagcccaaaatcacgtggagcctcaggcacagtgaggatggcatctgcaggatcagcctgacctgctccgtggaggacgggggaaacactgtcatgtacacatggaccccgctgcagaaggaagctgttgtgtcccaaggggaatcacacctcaatgtctcatggagaagcagtgaaaatcaccccaacctcacatgcacagccagcaaccctgtcagcaggagttcccaccagtttctttctgagaacatctgttcaggacctgagagaaacacaaagctttggattgggttgttcctgatggtttgccttctgtgcgttgggatcttcagctggtgcatttggaagcgaaaaggacggtgttcagtcccagccttctgttccagccaagctgaggccccagcggatacaccaggatatgagaagctggacactcccctcaggcctgccaggcaacagcctacacccacctcagacagcagctctgacagcaacctcacaactgaggaggatgaggacaggcctgaggtgcacaagcccatcagtggaagatatgaggtatttgaccaggtcactcaggagggcgctggacatgacccagcccctgagggccaagcagactatgatcccgtcactccatatgtcacggaagttgagtctgtggttggagagaacaccatgtatgcacaagtgttcaacttacaggtggtgccaccaccacaacagaatgatcttgagattcctgaaagtcctacctatgaaaatttcacctgaaaggaaaagcagctgctgcctctctcctgggaccgtggggttggaaagtcagctggacctcatggggcctggggctcacagacagaagcacctcagaatttccttcagtgcctcagagatgcctggatgtggcccctccccctccttctcacccttaaggactcccaaacccattaatagttcagacacaggctccttcttggagcctatgggcttcagatgtctttgccccatttgtcacctcgcacacttatagcgtttcctcctcgaaattctaccaagactggtcaaatgttgctgaggggcctggaccagctgtcctttacaccaccttctcaacactgctgaaaagaacccaagagaattgtcacacatgacacaagatgtacataatatcatgctcactgcagtgttatttaaaataaaaggcagg

SEQ ID NO: 93920 - DNA, 2275 bp, Artificial Sequence
  derived and/or modified sequence
ctacagacctctctcctcttcctgctcatgggactaagagcctctggaaaggactcagccccaacagtggtgtcagggatcctagggggttccgtgactctccccctaaacatctcagtagacacagagattgagaacgtcatctggattggtcccaaaaatgctcttgctttcgcacgtcccaaagaaaatgtaaccattatggtcaaaagctacctgggccgactagacatcaccaagtggagttactccctgtgcatcagcaatctgactctgaatgatgcaggatcctacaaagcccagataaaccaaaggaattttgaagtcaccactgaggaggaattcaccctgttcgtctatgagcagctgcaggagccccaagtcaccatgaagtctgtgaaggtgtctgagaacttctcctgtaacatcactctaatgtgctccgtgaagggggcagagaaaagtgttctgtacagctggaccccaagggaaccccatgcttctgagtccaatggaggctccattcttaccgtctcccgaacaccatgtgacccagacctgccatacatctgcacagcccagaaccccgtcagccagagaagctccctccctgtccatgttgggcagttctgtacagatccaggagcctccagaggaggaacaacgggggagactgtggtaggggtcctgggagagccagtcaccctgccacttgcactcccagcctgccgggacacagagaaggttgtctggttgtttaacacatccatcattagcaaagagagggaagaagcagcaacggcagatccactcattaaatccagggatccttacaagaacagggtgtgggtctccagccaggactgctccctgaagatcagccagctgaagatagaggacgccggcccctaccatgcctacgtgtgctcagaggcctccagcgtcaccagcatgacacatgtcaccctgctcatctaccgcaggctgaggaagcccaaaatcacgtggagcctcaggcacagtgaggatggcatctgcaggatcagcctgacctgctccgtggaggacgggggaaacactgtcatgtacacatggaccccgctgcagaaggaagctgttgtgtcccaaggggaatcacacctcaatgtctcatggagaagcagtgaaaatcaccccaacctcacatgcacagccagcaaccctgtcagcaggagttcccaccagtttctttctgagaacatctgttcaggacctgagagaaacacaaagctttggattgggttgttcctgatggtttgccttctgtgcgttgggatcttcagctggtgcatttggaagcgaaaaggacggtgttcagtcccagccttctgttccagccaagctgaggccccagcggatacaccaggatatgagaagctggacactcccctcaggcctgccaggcaacagcctacacccacctcagacagcagctctgacagcaacctcacaactgaggaggatgaggacaggcctgaggtgcacaagcccatcagtggaagatatgaggtatttgaccaggtcactcaggagggcgctggacatgacccagcccctgagggccaagcagactatgatcccgtcactccatatgtcacggaagttgagtctgtggttggagagaacaccatgtatgcacaagtgttcaacttacagggaaagaccccagtttctcagaaggaagagagctcagccacaatctactgctccatacggaaacctcaggtggtggtgccaccaccacaacagaatgatcttgagattcctgaaagtcctacctatgaaaatttcacctgaaaggaaaagcagctgctgcctctctcctgggaccgtggggttggaaagtcagctggacctcatggggcctggggctcacagacagaagcacctcagaatttccttcagtgcctcagagatgcctggatgtggcccctccccctccttctcacccttaaggactcccaaacccattaatagttcagacacaggctccttcttggagcctatgggcttcagatgtctttgccccatttgtcacctcgcacacttatagcgtttcctcctcgaaattctaccaagactggtcaaatgttgctgaggggcctggaccagctgtcctttacaccaccttctcaacactgctgaaaagaacccaagagaattgtcacacatgacacaagatgtacataatatcatgctcactgcagtgttatttaaaataaaaggcaggaaataa

SEQ ID NO: 93921 - protein, 521 aa, Artificial Sequence
  derived and/or modified sequence
MVAPKSHTDDWAPGPFSSKPQRSQLQIFSSVLQTSLLFLLMGLRASGKDSAPTVVSGILGGSVTLPLNISVDTEIENVIWIGPKNALAFARPKENVTIMVKSYLGRLDITKWSYSLCISNLTLNDAGSYKAQINQRNFEVTTEEEFTLFVYEQLQEPQVTMKSVKVSENFSCNITLMCSVKGAEKSVLYSWTPREPHASESNGGSILTVSRTPCDPDLPYICTAQNPVSQRSSLPVHVGQFCTDPGASRGGTTGETVVGVLGEPVTLPLALPACRDTEKVVWLFNTSIISKEREEAATADPLIKSRDPYKNRVWVSSQDCSLKISQLKIEDAGPYHAYVCSEASSVTSMTHVTLLIYRPERNTKLWIGLFLMVCLLCVGIFSWCIWKRKGRCSVPAFCSSQAEAPADTPGYEKLDTPLRKPISGRYEVFDQVTQEGAGHDPAPEGQADYDPVTPYVTEVESVVGENTMYAQVFNLQGKTPVSQKEESSATIYCSIRKPQVVPPPQQNDLEIPESPTYENFT

SEQ ID NO: 93922 - protein, 371 aa, Artificial Sequence
  derived and/or modified sequence
MVAPKSHTDDWAPGPFSSKPQRSQLQIFSSVLQTSLLFLLMGLRASGKDSAPTVVSGILGGSVTLPLNISVDTEIENVIWIGPKNALAFARPKENVTIMVKSYLGRLDITKWSYSLCISNLTLNDAGSYKAQINQRNFEVTTEEEFTLFVYEQLQEPQVTMKSVKVSENFSCNITLMCSVKGAEKSVLYSWTPREPHASESNGGSILTVSRTPCDPDLPYICTAQNPVSQRSSLPVHVGQFCTDPGASRGGTTGETVVGVLGEPVTLPLALPACRDTEKVVWLFNTSIISKEREEAATADPLIKSRDPYKNRVWVSSQDCSLKISQLKIEDAGPYHAYVCSEASSVTSMTHVTLLIYRESLGRAPITRFLL

SEQ ID NO: 93923 - DNA, 1566 bp, Artificial Sequence
  derived and/or modified sequence
atggtcgcccccaaaagtcacaccgacgattgggcacccggtcctttcagttcaaaaccccagaggagccaactccagatcttcagttcagtcctccagacaagtctactgtttctgttgatgggtttacgagcatcaggaaaggacagtgcacctaccgtcgttagtgggattttaggcgggtctgtaacattacctctgaacatctccgtggacacggaaatcgagaacgtgatctggatcgggccaaagaacgctctggcctttgctcggcctaaggaaaacgtgaccattatggttaagtcttacttaggccgactggacatcacaaagtggtcctacagcttgtgcatctccaacttgacactgaatgatgctgggtcgtataaagcccagatcaatcagcgaaacttcgaggtgacgacggaggaggagtttaccctgttcgtctatgaacagctgcaggagcctcaggtgaccatgaaaagtgtgaaggtgagcgaaaacttcagctgtaacatcacactgatgtgttcggttaaaggtgctgaaaagagcgtcctctattcctggacgcctagggagccacacgcgtccgaatcaaacggcggatcaatcctgactgtgtcccggaccccctgtgatccggacctcccctacatctgcactgcacaaaaccccgtctcccagcgctcgtcccttccagtgcacgtgggccaattctgcaccgaccccggcgcatctcgtggagggactactggggagaccgtagttggtgtcttgggggaacccgttactctcccactggccttgccggcctgtcgagataccgaaaaggtggtttggttatttaacacatcgattatatccaaggagcgtgaggaggcggctaccgccgatccgctgatcaaatctcgcgacccctacaagaaccgggtgtgggtcagctcccaggactgctccctgaagatttcccagctgaaaatcgaagatgcggggccttatcatgcctacgtttgctccgaggcttcaagcgtgacaagcatgacacatgtcacgctattgatatacaggcctgagcgaaacaccaagctttggattgggctttttttgatggtctgccttctgtgtgtgggaattttttcatggtgcatatggaagagaaaagggcgctgtagcgttccagctttttgctctagtcaagcagaagctcccgcagatacacccggctatgaaaaactagacacacctctgaggaaacctattagtgggcgctatgaagtcttcgatcaagtgacgcaggaaggcgccggacatgatccggctccggagggccaggctgattatgatcccgtcactccatacgtgactgaggtagaatctgtcgtaggcgagaataccatgtacgcgcaggtcttcaatctgcaggggaagactcctgtaagtcagaaggaagagtcatccgcaacaatttactgtagcatcagaaaacctcaggtggttccccccccccagcaaaatgacctggaaatacccgagagtcctacatacgaaaacttcacatag

SEQ ID NO: 93924 - DNA, 1116 bp, Artificial Sequence
  derived and/or modified sequence
atggtcgcaccaaagtctcacactgacgactgggcaccaggcccatttagctctaaaccacaacgcagtcagttgcaaatcttttcctccgttcttcagaccagtttactgtttctcctaatgggacttcgggcaagcggcaaagattccgcacccacagttgttagtgggattcttggcggctcagtgaccctgcccctgaacatctcagtcgatacggaaatcgaaaatgtcatttggattgggcctaaaaatgccttagccttcgccagaccaaaggaaaacgtcacaatcatggtgaagagctacctcggtaggctggatataacaaagtggtcttactccctttgcatctctaacctgacactgaatgatgcaggctcgtacaaagctcagattaaccagcggaatttcgaggtgacaacagaagaagagttcacactgtttgtgtacgaacagctccaagagccacaagtgaccatgaagtctgtgaaggtgagtgaaaatttctcttgtaacataacgctcatgtgcagcgtcaagggggccgagaagtcagtgctgtatagttggaccccacgagaaccacatgcgtctgaatcgaatggtggcagtatactgacggtgagccggacaccttgtgaccccgacctcccctatatatgtacagctcaaaaccccgttagtcagcgaagcagtcttcctgtccacgtcggacagttttgcacagaccctggtgcctcacggggcggcactactggtgagaccgtggtgggcgtgctcggggagcctgtgacgctgcccctggccctccctgcatgtagggatactgagaaggttgtgtggctgtttaacacttctatcatcagtaaggaacgagaggaggccgctactgcagaccctcttataaaaagtagagacccgtataagaatcgggtatgggtttccagccaggactgctccctgaaaatctcccagctgaaaatagaggatgctggcccatatcatgcctatgtctgctcagaggccagtagtgtcaccagtatgacacacgttactctcttaatatacagagagtctttggggagagcccccataacaagatttctgctttag

SEQ ID NO: 93925 - DNA, 1566 bp, Artificial Sequence
  derived and/or modified sequence
atggtggcccccaagagccacacagatgactgggcccctggccccttcagcagcaagccccagaggagccagctgcagatcttcagctctgtgctgcagaccagcctgctcttcctgctgatgggcctgcgggccagcggcaaggacagcgcccccaccgtggtgtctggcatcctgggcggctctgtgaccctgcccctgaacatctctgtggacacagaaattgaaaatgtcatctggattggccccaagaatgccctggcctttgcccggcccaaggaaaatgtgaccatcatggtgaagagctacctgggccgcctggacatcaccaagtggagctacagcctgtgcatcagcaacctgaccctgaatgatgctggcagctacaaggcccagatcaaccagaggaactttgaggtgaccacagaggaggagttcaccctgtttgtgtatgagcagctgcaggagccccaggtgaccatgaagtctgtgaaggtgtctgagaacttcagctgcaacatcaccctgatgtgcagcgtgaagggagctgagaagtctgtgctgtacagctggaccccccgggagccccacgccagcgagagcaatggaggcagcatcctgactgtgtccaggaccccctgtgaccctgacctgccctacatctgcacagcccagaaccctgtgtcccagaggagcagcctgcctgtgcacgtgggccagttctgcacagatcctggggccagccggggcggcaccactggagagaccgtggtgggcgtgctgggggagcctgtgaccctgcccctggccctgcctgcctgccgggacacagagaaggtggtgtggctgttcaacaccagcatcatcagcaaggagcgggaggaggccgccacagctgaccccctcatcaagagccgggacccctacaagaacagagtgtgggtgagcagccaggactgcagcctgaagatcagccagctgaagattgaagatgctggcccctaccacgcctacgtgtgcagcgaggccagctctgtgacctccatgacccacgtgaccctgctgatctacagacctgagaggaacaccaagctgtggattggcctcttcctgatggtgtgcctgctgtgtgtgggcatcttctcctggtgcatctggaagaggaagggccgctgcagcgtgcctgccttctgcagcagccaggccgaggccccagctgacaccccaggctatgagaagctggacacccccctgaggaagcccatcagcggccgctatgaggtgtttgaccaggtgacccaggagggcgccggccatgaccctgcccctgagggccaggccgactatgaccctgtgaccccctacgtgacagaggtggagagcgtggtgggggagaacaccatgtatgcccaggtgttcaacctgcagggcaagacccctgtgtcccagaaggaggagagcagcgccaccatctactgcagcatcaggaagccccaggtggtgcccccaccccagcagaatgacctggagatccctgagagccccacctatgagaacttcacctag

SEQ ID NO: 93926 - DNA, 1116 bp, Artificial Sequence
  derived and/or modified sequence
atggtggcccccaagagccacacagatgactgggcccctggccccttcagcagcaagccccagaggagccagctgcagatcttcagctctgtgctgcagaccagcctgctcttcctgctgatgggcctgcgggccagcggcaaggacagcgcccccaccgtggtgtctggcatcctgggcggctctgtgaccctgcccctgaacatctctgtggacacagaaattgaaaatgtcatctggattggccccaagaatgccctggcctttgcccggcccaaggaaaatgtgaccatcatggtgaagagctacctgggccgcctggacatcaccaagtggagctacagcctgtgcatcagcaacctgaccctgaatgatgctggcagctacaaggcccagatcaaccagaggaactttgaggtgaccacagaggaggagttcaccctgtttgtgtatgagcagctgcaggagccccaggtgaccatgaagtctgtgaaggtgtctgagaacttcagctgcaacatcaccctgatgtgcagcgtgaagggagctgagaagtctgtgctgtacagctggaccccccgggagccccacgccagcgagagcaatggaggcagcatcctgactgtgtccaggaccccctgtgaccctgacctgccctacatctgcacagcccagaaccctgtgtcccagaggagcagcctgcctgtgcacgtgggccagttctgcacagatcctggggccagccggggcggcaccactggagagaccgtggtgggcgtgctgggggagcctgtgaccctgcccctggccctgcctgcctgccgggacacagagaaggtggtgtggctgttcaacaccagcatcatcagcaaggagcgggaggaggccgccacagctgaccccctcatcaagagccgggacccctacaagaacagagtgtgggtgagcagccaggactgcagcctgaagatcagccagctgaagattgaagatgctggcccctaccacgcctacgtgtgcagcgaggccagctctgtgacctccatgacccacgtgaccctgctgatctaccgggagagcctgggccgggcccccatcacccgcttcctgctgtag

SEQ ID NO: 93927 - DNA, 2049 bp, Artificial Sequence
  derived and/or modified sequence
gctgtggtaagtgcatcctccttcagtctcagttctgaaaatagatcatcatggtggcaccaaagagtcacacagatgactgggctcctgggcctttctccagtaagccacagaggagtcagctgcaaatattctcttctgttctacagacctctctcctcttcctgctcatgggactaagagcctctggaaaggactcagccccaacagtggtgtcagggatcctagggggttccgtgactctccccctaaacatctcagtagacacagagattgagaacgtcatctggattggtcccaaaaatgctcttgctttcgcacgtcccaaagaaaatgtaaccattatggtcaaaagctacctgggccgactagacatcaccaagtggagttactccctgtgcatcagcaatctgactctgaatgatgcaggatcctacaaagcccagataaaccaaaggaattttgaagtcaccactgaggaggaattcaccctgttcgtctatgagcagctgcaggagccccaagtcaccatgaagtctgtgaaggtgtctgagaacttctcctgtaacatcactctaatgtgctccgtgaagggggcagagaaaagtgttctgtacagctggaccccaagggaaccccatgcttctgagtccaatggaggctccattcttaccgtctcccgaacaccatgtgacccagacctgccatacatctgcacagcccagaaccccgtcagccagagaagctccctccctgtccatgttgggcagttctgtacagatccaggagcctccagaggaggaacaacgggggagactgtggtaggggtcctgggagagccagtcaccctgccacttgcactcccagcctgccgggacacagagaaggttgtctggttgtttaacacatccatcattagcaaagagagggaagaagcagcaacggcagatccactcattaaatccagggatccttacaagaacagggtgtgggtctccagccaggactgctccctgaagatcagccagctgaagatagaggacgccggcccctaccatgcctacgtgtgctcagaggcctccagcgtcaccagcatgacacatgtcaccctgctcatctaccgacctgagagaaacacaaagctttggattgggttgttcctgatggtttgccttctgtgcgttgggatcttcagctggtgcatttggaagcgaaaaggacggtgttcagtcccagccttctgttccagccaagctgaggccccagcggatacaccaggatatgagaagctggacactcccctcaggaagcccatcagtggaagatatgaggtatttgaccaggtcactcaggagggcgctggacatgacccagcccctgagggccaagcagactatgatcccgtcactccatatgtcacggaagttgagtctgtggttggagagaacaccatgtatgcacaagtgttcaacttacagggaaagaccccagtttctcagaaggaagagagctcagccacaatctactgctccatacggaaacctcaggtggtgccaccaccacaacagaatgatcttgagattcctgaaagtcctacctatgaaaatttcacctgaaaggaaaagcagctgctgcctctctcctgggaccgtggggttggaaagtcagctggacctcatggggcctggggctcacagacagaagcacctcagaatttccttcagtgcctcagagatgcctggatgtggcccctccccctccttctcacccttaaggactcccaaacccattaatagttcagacacaggctccttcttggagcctatgggcttcagatgtctttgccccatttgtcacctcgcacacttatagcgtttcctcctcgaaattctaccaagactggtcaaatgttgctgaggggcctggaccagctgtcctttacaccaccttctcaacactgctgaaaagaacccaagagaattgtcacacatgacacaagatgtacataatatcatgctcactgcagtgttatttaaaataaaaggcagg

SEQ ID NO: 93928 - DNA, 1522 bp, Artificial Sequence
  derived and/or modified sequence
gaaaatagatcatcatggtggcaccaaagagtcacacagatgactgggctcctgggcctttctccagtaagccacagaggagtcagctgcaaatattctcttctgttctacagacctctctcctcttcctgctcatgggactaagagcctctggaaaggactcagccccaacagtggtgtcagggatcctagggggttccgtgactctccccctaaacatctcagtagacacagagattgagaacgtcatctggattggtcccaaaaatgctcttgctttcgcacgtcccaaagaaaatgtaaccattatggtcaaaagctacctgggccgactagacatcaccaagtggagttactccctgtgcatcagcaatctgactctgaatgatgcaggatcctacaaagcccagataaaccaaaggaattttgaagtcaccactgaggaggaattcaccctgttcgtctatgagcagctgcaggagccccaagtcaccatgaagtctgtgaaggtgtctgagaacttctcctgtaacatcactctaatgtgctccgtgaagggggcagagaaaagtgttctgtacagctggaccccaagggaaccccatgcttctgagtccaatggaggctccattcttaccgtctcccgaacaccatgtgacccagacctgccatacatctgcacagcccagaaccccgtcagccagagaagctccctccctgtccatgttgggcagttctgtacagatccaggagcctccagaggaggaacaacgggggagactgtggtaggggtcctgggagagccagtcaccctgccacttgcactcccagcctgccgggacacagagaaggttgtctggttgtttaacacatccatcattagcaaagagagggaagaagcagcaacggcagatccactcattaaatccagggatccttacaagaacagggtgtgggtctccagccaggactgctccctgaagatcagccagctgaagatagaggacgccggcccctaccatgcctacgtgtgctcagaggcctccagcgtcaccagcatgacacatgtcaccctgctcatctaccgtgagtctctgggcagggcacccatcaccagattccttctctgaaagctttctcctctgctgccttctccaccttccgcttctccaagggtcttccctcatactgaaatgcctcagaccactaggacagctgttcagttcacaccagttgattcataggaggcaaactcatgactagctgctggacaagtctacccgccaaagtgctgggattacaggcatgagccatggcacctggccccaacctgcatttttataaactattatcattttgaataaggccaaagttggctggggtgaaatcagagaagactgaggagaagcccttggtgtccaaagacactgtggcctccaagaaggtgggccactcagttcccctgggggtgaggaacagaatttgcattctacctcctcagccctgggcctcacaggagctt

SEQ ID NO: 93929 - DNA, 2090 bp, Artificial Sequence
  derived and/or modified sequence
cagtaagccacagaggagtcagctgcaaatattctcttctgttctacagacctctctcctcttcctgctcatgggactaagagcctctggaaaggactcagccccaacagtggtgtcagggatcctagggggttccgtgactctccccctaaacatctcagtagacacagagattgagaacgtcatctggattggtcccaaaaatgctcttgctttcgcacgtcccaaagaaaatgtaaccattatggtcaaaagctacctgggccgactagacatcaccaagtggagttactccctgtgcatcagcaatctgactctgaatgatgcaggatcctacaaagcccagataaaccaaaggaattttgaagtcaccactgaggaggaattcaccctgttcgtctatgagcagctgcaggagccccaagtcaccatgaagtctgtgaaggtgtctgagaacttctcctgtaacatcactctaatgtgctccgtgaagggggcagagaaaagtgttctgtacagctggaccccaagggaaccccatgcttctgagtccaatggaggctccattcttaccgtctcccgaacaccatgtgacccagacctgccatacatctgcacagcccagaaccccgtcagccagagaagctccctccctgtccatgttgggcagttctgtacagatccaggagcctccagaggaggaacaacgggggagactgtggtaggggtcctgggagagccagtcaccctgccacttgcactcccagcctgccgggacacagagaaggttgtctggttgtttaacacatccatcattagcaaagagagggaagaagcagcaacggcagatccactcattaaatccagggatccttacaagaacagggtgtgggtctccagccaggactgctccctgaagatcagccagctgaagatagaggacgccggcccctaccatgcctacgtgtgctcagaggcctccagcgtcaccagcatgacacatgtcaccctgctcatctaccgacctgagagaaacacaaagctttggattgggttgttcctgatggtttgccttctgtgcgttgggatcttcagctggtgcatttggaagcgaaaaggacggtgttcagtcccagccttctgttccagccaagctgaggccccagcggatacaccagaacccacagctggccacacgctatactctgtgctctcccaaggatatgagaagctggacactcccctcaggcctgccaggcaacagcctacacccacctcagacagcagctctgacagcaacctcacaactgaggaggatgaggacaggcctgaggtgcacaagcccatcagtggaagatatgaggtatttgaccaggtcactcaggagggcgctggacatgacccagcccctgagggccaagcagactatgatcccgtcactccatatgtcacggaagttgagtctgtggttggagagaacaccatgtatgcacaagtgttcaacttacagggaaagaccccagtttctcagaaggaagagagctcagccacaatctactgctccatacggaaacctcaggtggtggtgccaccaccacaacagaatgatcttgagattcctgaaagtcctacctatgaaaatttcacctgaaaggaaaagcagctgctgcctctctcctgggaccgtggggttggaaagtcagctggacctcatggggcctggggctcacagacagaagcacctcagaatttccttcagtgcctcagagatgcctggatgtggcccctccccctccttctcacccttaaggactcccaaacccattaatagttcagacacaggctccttcttggagcctatgggcttcagatgtctttgccccatttgtcacctcgcacacttatagcgtttcctcctcgaaattctaccaagactggtcaaatgttgctgaggggcctggaccagctgtcctttacaccaccttctcaacactgctgaaaagaacccaagagaattgtcacacatgacacaagatgtacataatatcatgctcactgcagtgttatttaaaataaaaggcaggaaataa

SEQ ID NO: 93930 - DNA, 1566 bp, Artificial Sequence
  derived and/or modified sequence
atggtggcccccaagagccacaccgacgactgggcccccggccccttttcaagcaaaccgcagcgctctcagctgcagatattctcatcggtactccagacttccctacttttcctccttatgggattacgcgccagtggaaaagatagcgcacccacggtggtcagcgggatcctgggaggatcagtgaccctgccactgaatattagtgtggacactgagatcgaaaatgtgatctggatcggcccaaagaacgctctcgcttttgcacggcccaaagagaatgtgaccatcatggttaagagttatttaggccgtctcgacatcaccaagtggtcatatagtctctgcatctccaatctgactctgaacgatgcaggctcatataaggcacaaataaaccagagaaattttgaggttaccacagaggaggaattcactttgtttgtatatgagcaactccaggagccacaggtaaccatgaagtcggtcaaggttagtgagaacttctcatgtaacattactctgatgtgctctgttaagggggccgagaagtccgtgctttactcctggacacctcgagagccacatgcctccgaaagcaacggcggatcgatactaaccgtgtcaagaaccccatgcgatcccgaccttccatacatctgcactgctcagaatccagtgtctcagcggtcctccctacccgtgcatgttggacagttttgcaccgaccccggcgccagtagaggaggcacaaccggggagaccgtcgtgggagtactgggggagcccgttacactccctttagctttgccggcctgccgggacaccgaaaaggtggtgtggctctttaacacgtcaatcatttccaaagagcgggaagaggccgccacggccgacccgctgatcaaatctagggatccctataaaaaccgggtgtgggtgtctagccaggactgttcgctaaaaatctctcaattaaagatcgaggacgccggcccctatcacgcctacgtgtgcagcgaagccagctctgtaaccagcatgacccatgtgacactgctaatctaccgtccagaaagaaacaccaagctttggataggcctgtttctcatggtctgtctgctgtgcgtggggatcttctcatggtgtatctggaagcggaaggggagatgcagcgtgcccgctttctgcagctctcaggcagaggctcctgctgatacccctgggtatgaaaaacttgacacgcccttgcggaaaccaatatctgggcgatatgaagtattcgatcaggtgactcaggaaggagccggccatgacccagcccccgagggccaggcagattatgaccccgtcaccccctacgtgaccgaagtcgaaagcgttgtcggagagaataccatgtatgctcaggtctttaaccttcagggaaaaacgccagtgagccagaaagaggagtccagcgctaccatctactgttccatacgcaagcctcaggtagtcccaccccctcagcagaatgacctcgaaatccctgagtcccctacgtacgagaactttacctag

SEQ ID NO: 93931 - DNA, 1116 bp, Artificial Sequence
  derived and/or modified sequence
atggtggcccccaagagccacaccgacgactgggcccccggccccttctctagcaaaccacagaggtcccagctgcaaattttcagcagcgtattgcagacgtccctgctattcttgcttatgggactccgagcgagcggcaaggattcagctcccacagtcgtgtcaggcattctgggtggttctgtgacccttccgctgaatatttctgtggacaccgagattgagaacgtcatttggataggaccaaagaacgcactggcttttgcacgacctaaggagaacgtcactatcatggtaaaaagttacctgggacgtctagatattactaagtggtcctactctctgtgtatttccaatttgactctgaatgatgcaggtagttataaggcgcagatcaatcaacgcaactttgaggtcactaccgaggaagaattcacactgttcgtctatgaacaactacaggaacctcaggttactatgaagagtgtcaaggtgtcagagaactttagttgtaatatcacattgatgtgctctgttaagggggcagagaaaagtgtgctgtactcgtggacacctcgcgagcctcacgccagcgaatctaatggaggatccatcctgactgtcagtcgaaccccctgtgaccctgatttgccgtatatctgtactgcccaaaaccctgtttcccagagatcttccttgccagttcacgttggccagttctgcactgatccaggcgcttcccgagggggcaccacgggagaaacggtcgtcggggtgctgggtgaaccagtaactctgcctctggcccttcccgcatgccgcgataccgaaaaagtggtgtggctattcaacacgagcatcattagtaaagagcgtgaggaggccgcgaccgcagatccactgatcaaatcaagggatccttataagaaccgggtgtgggttagcagccaagactgctcactgaagattagccagctaaaaatcgaggacgctggaccgtatcatgcgtacgtgtgtagtgaggcctcctcggtaacatcaatgactcacgtgacactgcttatttatagagaaagtctgggccgcgcaccgataacacgcttcctgctgtag

SEQ ID NO: 93932 - DNA, 1566 bp, Artificial Sequence
  derived and/or modified sequence
atggtggccccaaaatcccacactgacgactgggcgccaggccctttttcctctaaaccacaaaggagtcaactgcagatcttctcgagcgtcctacagacaagcctcctgtttttgctcatggggcttcgagctagcggaaaggactccgccccaacagtggtgtctgggatcctgggcggttcagtcaccctacctctgaacattagcgtggatacagagatcgagaacgtgatttggattggcccaaagaacgctttggcctttgcacgaccgaaggagaacgttacgatcatggtcaaaagttacttagggaggctagacatcactaaatggtcatactcactgtgtatctccaatctcactctgaacgatgccggttcttataaggctcaaattaaccagcgtaattttgaagtcacgactgaggaggagtttacactatttgtgtacgaacagcttcaggaaccgcaggtgaccatgaagtccgtgaaggtgagtgaaaatttcagctgtaatatcacactgatgtgttctgttaagggagcagagaagtctgttttgtattcctggacaccgagagaacctcacgcctcggagtctaatggcggaagcattctcacagtctctcggactccatgtgaccccgacctaccttatatctgtaccgctcagaatcctgtttctcagaggtcatccctcccggttcacgtgggccaattctgtaccgaccctggcgcatccagaggcggtaccacaggcgagacagtcgtcggtgtgctaggggagccggtgacactcccattggccctgcccgcatgcagagatactgagaaagtggtttggctgtttaatactagcatcatctctaaggaaagggaagaagccgcaacggcggaccccttaataaaatcaagggacccctataaaaatcgcgtgtgggtctcctcccaagactgcagcctcaagatctcgcaactcaaaattgaggatgcgggaccttaccacgcctatgtttgttctgaagcctctagtgtcacctcgatgacccacgtgacacttttgatttaccgtcctgagcgcaacacgaaactctggatcggtctcttcctcatggtatgcctcctgtgtgtgggcatcttctcatggtgcatttggaaacggaagggaagatgcagtgtgcccgcattttgctcgagccaggctgaggctcccgctgacactcccggttatgagaaactggataccccactgaggaagcctatcagcggaaggtatgaggtctttgatcaggttacgcaggaaggcgctggtcacgaccctgcacctgagggtcaggccgactatgacccagttaccccgtacgtcacggaagtagaatcggtggttggggaaaacaccatgtacgcccaagtgttcaacctacagggtaaaactcctgtgagccaaaaagaggagagctcagcgaccatctactgcagcatccgaaaaccacaggtggtccccccaccacaacaaaatgatctggaaatacccgaatcccctacgtacgaaaatttcacttag

SEQ ID NO: 93933 - DNA, 1116 bp, Artificial Sequence
  derived and/or modified sequence
atggtcgccccaaaatcccacacagacgactgggcgccagggccattctccagcaagccacaaagatctcaattgcagatcttctcaagcgttttgcagacttccctactgtttctgctgatgggcttgagggcttcggggaaggattccgcacctactgttgtgtcaggcatactcggagggtccgttacactgcctctgaacatcagcgtggacactgaaatcgagaatgtgatctggattggacctaagaatgcactggccttcgccaggcctaaggagaatgtgacaatcatggtgaagtcgtatctcggtcgattggatattaccaaatggagctactcattatgtattagtaacctgactctgaacgatgctgggtcttacaaagcccagatcaaccagcgaaactttgaggtcactactgaggaagagtttacacttttcgtatatgaacagctccaagagcctcaggtgactatgaaatctgttaaagtttccgagaacttcagctgtaatatcaccctgatgtgcagcgtcaagggggcagagaaaagcgtcctttatagttggaccccaagagaaccacacgcatctgagagtaacggcggatctatcttgactgtttcaaggacaccctgcgatcccgatctgccctatatctgtaccgctcagaatcccgtgtcccagcggtcatctttgcctgtgcacgttggccaattttgtacagatccaggggcatcaaggggcggaacaaccggcgaaacggtggtcggcgttttgggggagcctgttactctacctcttgcccttccagcatgccgggatactgagaaagtggtctggctgttcaacactagcatcatctctaaagagcgggaggaggctgccacagcggaccctctgatcaagtctagggacccatataaaaaccgggtgtgggtcagcagccaggattgtagtctcaagatcagtcaactgaagatcgaggatgctggaccctaccacgcctacgtgtgctctgaggcttcctccgtgacctcgatgacccatgtcacgctcctgatctatcgggagagtcttggaagggccccaattactcggttcctgctctag

SEQ ID NO: 93934 - DNA, 1566 bp, Artificial Sequence
  derived and/or modified sequence
atggtggcccccaagagccacaccgacgactgggcccccggccccttcagcagcaagccccagagaagccagctgcagatcttcagcagcgtgctgcagaccagcctgctgttcctgctgatgggcctgagagccagcggcaaggacagcgcccccaccgtggtgagcggcatcctgggcggcagcgtgaccctgcccctgaacatcagcgtggacaccgagatcgagaacgtgatctggatcggccccaagaacgccctggccttcgccagacccaaggagaacgtgaccatcatggtgaagagctacctgggcagactggacatcaccaagtggagctacagcctgtgcatcagcaacctgaccctgaacgacgccggcagctacaaggcccagatcaaccagagaaacttcgaggtgaccaccgaggaggagttcaccctgttcgtgtacgagcagctgcaggagccccaggtgaccatgaagagcgtgaaggtgagcgagaacttcagctgcaacatcaccctgatgtgcagcgtgaagggcgccgagaagagcgtgctgtacagctggacccccagagagccccacgccagcgagagcaacggcggcagcatcctgaccgtgagcagaaccccctgcgaccccgacctgccctacatctgcaccgcccagaaccccgtgagccagagaagcagcctgcccgtgcacgtgggccagttctgcaccgaccccggcgccagcagaggcggcaccaccggcgagaccgtggtgggcgtgctgggcgagcccgtgaccctgcccctggccctgcccgcctgcagagacaccgagaaggtggtgtggctgttcaacaccagcatcatcagcaaggagagagaggaggccgccaccgccgaccccctgatcaagagcagagacccctacaagaacagagtgtgggtgagcagccaggactgcagcctgaagatcagccagctgaagatcgaggacgccggcccctaccacgcctacgtgtgcagcgaggccagcagcgtgaccagcatgacccacgtgaccctgctgatctacagacccgagagaaacaccaagctgtggatcggcctgttcctgatggtgtgcctgctgtgcgtgggcatcttcagctggtgcatctggaagagaaagggcagatgcagcgtgcccgccttctgcagcagccaggccgaggcccccgccgacacccccggctacgagaagctggacacccccctgagaaagcccatcagcggcagatacgaggtgttcgaccaggtgacccaggagggcgccggccacgaccccgcccccgagggccaggccgactacgaccccgtgaccccctacgtgaccgaggtggagagcgtggtgggcgagaacaccatgtacgcccaggtgttcaacctgcagggcaagacccccgtgagccagaaggaggagagcagcgccaccatctactgcagcatcagaaagccccaggtggtgccccccccccagcagaacgacctggagatccccgagagccccacctacgagaacttcacctag

SEQ ID NO: 93935 - DNA, 1116 bp, Artificial Sequence
  derived and/or modified sequence
atggtggcccccaagagccacaccgacgactgggcccccggccccttcagcagcaagccccagagaagccagctgcagatcttcagcagcgtgctgcagaccagcctgctgttcctgctgatgggcctgagagccagcggcaaggacagcgcccccaccgtggtgagcggcatcctgggcggcagcgtgaccctgcccctgaacatcagcgtggacaccgagatcgagaacgtgatctggatcggccccaagaacgccctggccttcgccagacccaaggagaacgtgaccatcatggtgaagagctacctgggcagactggacatcaccaagtggagctacagcctgtgcatcagcaacctgaccctgaacgacgccggcagctacaaggcccagatcaaccagagaaacttcgaggtgaccaccgaggaggagttcaccctgttcgtgtacgagcagctgcaggagccccaggtgaccatgaagagcgtgaaggtgagcgagaacttcagctgcaacatcaccctgatgtgcagcgtgaagggcgccgagaagagcgtgctgtacagctggacccccagagagccccacgccagcgagagcaacggcggcagcatcctgaccgtgagcagaaccccctgcgaccccgacctgccctacatctgcaccgcccagaaccccgtgagccagagaagcagcctgcccgtgcacgtgggccagttctgcaccgaccccggcgccagcagaggcggcaccaccggcgagaccgtggtgggcgtgctgggcgagcccgtgaccctgcccctggccctgcccgcctgcagagacaccgagaaggtggtgtggctgttcaacaccagcatcatcagcaaggagagagaggaggccgccaccgccgaccccctgatcaagagcagagacccctacaagaacagagtgtgggtgagcagccaggactgcagcctgaagatcagccagctgaagatcgaggacgccggcccctaccacgcctacgtgtgcagcgaggccagcagcgtgaccagcatgacccacgtgaccctgctgatctacagagagagcctgggcagagcccccatcaccagattcctgctgtag

SEQ ID NO: 93936 - protein, 207 aa, Artificial Sequence
  derived and/or modified sequence
MDDDLMLALRLQEEWNLQEAERDHAQESLSLVDASWELVDPTPDLQALFVQFNDQFFWGQLEAVEVKWSVRMTLCAGICSYEGKGGMCSIRLSEPLLKLRPRKDLVEVYHTFHDEVDEYRRHWWRCNGPCQHRPPYYGYVKRATNREPSAHDYWWAEHQKTCGGTYIKIKEPENYSKKGKGKAKLGKEPVLAAENKGTFVYILLIFM

SEQ ID NO: 93937 - DNA, 624 bp, Artificial Sequence
  derived and/or modified sequence
atggacgacgacctgatgctggccctgagactgcaggaggagtggaacctgcaggaggccgagagagaccacgcccaggagagcctgagcctggtggacgccagctgggagctggtggaccccacccccgacctgcaggccctgttcgtgcagttcaacgaccagttcttctggggccagctggaggccgtggaggtgaagtggagcgtgagaatgaccctgtgcgccggcatctgcagctacgagggcaagggcggcatgtgcagcatcagactgagcgagcccctgctgaagctgagacccagaaaggacctggtggaggtgtaccacaccttccacgacgaggtggacgagtacagaagacactggtggagatgcaacggcccctgccagcacagacccccctactacggctacgtgaagagagccaccaacagagagcccagcgcccacgactactggtgggccgagcaccagaagacctgcggcggcacctacatcaagatcaaggagcccgagaactacagcaagaagggcaagggcaaggccaagctgggcaaggagcccgtgctggccgccgagaacaagggcaccttcgtgtacatcctgctgatcttcatgtag

SEQ ID NO: 93938 - DNA, 585 bp, Artificial Sequence
  derived and/or modified sequence
atggacgacgacctgatgctggccctgagactgcaggaggagtggaacctgcaggaggccgagagagaccacgcccaggagagcctgagcctggtggacgccagctgggagctggtggaccccacccccgacctgcaggccctgttcgtgcagttcaacgaccagttcttctggggccagctggaggccgtggaggtgaagtggagcgtgagaatgaccctgtgcgccggcatctgcagctacgagggcaagggcggcatgtgcagcatcagactgagcgagcccctgctgaagctgagacccagaaaggacctggtggaggtgtaccacaccttccacgacgaggtggacgagtacagaagacactggtggagatgcaacggcccctgccagcacagacccccctactacggctacgtgaagagagccaccaacagagagcccagcgcccacgactactggtgggccgagcaccagaagacctgcggcggcacctacatcaagatcaaggagcccgagaactacaagaagagacagagaaagggcaagaccagaaagggcaccagcatcggcagaagagagtag

SEQ ID NO: 93939 - DNA, 624 bp, Artificial Sequence
  derived and/or modified sequence
atggatgatgacttaatgctcgcactccggttgcaggaggagtggaatctgcaggaggctgagcgcgatcacgcccaagaaagcctgtctctcgtcgatgctagctgggaactggtggacccaactccagacttacaggcacttttcgtgcagtttaatgatcagttcttttggggtcaactcgaagcagtggaagtgaagtggagcgtcagaatgaccctgtgtgcaggcatttgttcatatgagggtaagggagggatgtgttccattcgtctctcggaacccctgctgaaactgagaccacggaaggacctggtcgaggtataccacacttttcacgatgaggtggacgaatatcggcggcattggtggcgttgcaacgggccatgtcagcaccggcccccatactacgggtacgtaaagcgggccactaatcgcgagcccagtgcccacgactattggtgggccgaacaccagaaaacctgtggaggcacatatatcaagatcaaggaacccgagaactactccaaaaagggcaaaggaaaagctaagctgggcaaagaaccggttctcgccgccgagaacaagggaactttcgtgtatatcctgctgatctttatgtag

SEQ ID NO: 93940 - DNA, 585 bp, Artificial Sequence
  derived and/or modified sequence
atggacgacgaccttatgctggctcttagactgcaggaagagtggaacctgcaagaggctgagcgggatcatgcacaggagtccctgtctctggtagacgctagctgggagctggtggaccctaccccagatctgcaagccctgttcgtgcagtttaacgatcagttcttctggggtcagcttgaagcagtggaagtgaagtggtcagttcgtatgaccctctgcgccggaatctgttcttacgaaggaaaggggggtatgtgttctatccggctgtccgagcccctactgaaactgaggccccgcaaggacttggtggaagtctatcacaccttccatgacgaagtggatgaatacaggagacattggtggcggtgcaatgggccttgtcagcaccgccccccctactatgggtatgtgaagagggcaacaaatcgtgagccaagtgcacatgattactggtgggctgagcatcaaaagacctgcgggggcacatacatcaaaataaaagaacccgagaattacaaaaaacggcagagaaaaggcaagacccggaagggaacctcaataggaaggcgagaatag

SEQ ID NO: 93941 - DNA, 624 bp, Artificial Sequence
  derived and/or modified sequence
atggatgatgacctgatgctggccctgcggctgcaggaggagtggaacctgcaggaggccgagcgggaccacgcccaggagagcctgagcctggtggatgcctcctgggagctggtggaccccaccccagacctgcaggccctgtttgtgcagttcaatgaccagttcttctggggccagctggaggccgtggaggtgaagtggagcgtgaggatgaccctgtgtgccggcatctgcagctatgagggcaagggcggcatgtgcagcatccggctgtctgagcccctgctgaagctgcggcccaggaaggacctggtggaggtgtaccacaccttccatgatgaggtggatgagtaccgccgccactggtggcgctgcaatggcccctgccagcaccggcccccctactacggctacgtgaagagggccaccaaccgggagcccagcgcccatgactactggtgggccgagcaccagaagacctgtggcggcacctacatcaagatcaaggagcctgagaactacagcaagaagggcaagggcaaggccaagctgggcaaggagcctgtgctggccgctgagaacaagggcacctttgtgtacatcctgctgatcttcatgtag

SEQ ID NO: 93942 - DNA, 585 bp, Artificial Sequence
  derived and/or modified sequence
atggatgatgacctgatgctggccctgcggctgcaggaggagtggaacctgcaggaggccgagcgggaccacgcccaggagagcctgagcctggtggatgcctcctgggagctggtggaccccaccccagacctgcaggccctgtttgtgcagttcaatgaccagttcttctggggccagctggaggccgtggaggtgaagtggagcgtgaggatgaccctgtgtgccggcatctgcagctatgagggcaagggcggcatgtgcagcatccggctgtctgagcccctgctgaagctgcggcccaggaaggacctggtggaggtgtaccacaccttccatgatgaggtggatgagtaccgccgccactggtggcgctgcaatggcccctgccagcaccggcccccctactacggctacgtgaagagggccaccaaccgggagcccagcgcccatgactactggtgggccgagcaccagaagacctgtggcggcacctacatcaagatcaaggagcctgagaactacaagaagaggcagaggaagggcaagaccaggaagggcaccagcatcggccggcgggagtag

SEQ ID NO: 93943 - DNA, 624 bp, Artificial Sequence
  derived and/or modified sequence
atggacgacgacctgatgctggccctgcggctgcaggaggagtggaatctccaagaggccgaacgggatcacgctcaggagtcactctcactcgtggacgcatcctgggaattagtcgacccaacacctgatttgcaggcactgtttgtgcagtttaatgaccagtttttttggggacagctagaagcagtagaggtcaaatggagcgtgcgcatgacactgtgcgccggaatctgttcttatgaggggaagggtgggatgtgcagcatcagactgagcgagccccttctgaagttgagacctcggaaggacctcgtggaggtgtaccataccttccacgacgaagtggatgagtataggcgccactggtggagatgcaatggcccctgtcagcacagacccccatactacggatacgtgaaacgtgctaccaatagagaaccgagcgcccatgactattggtgggccgagcaccagaagacttgtggagggacttacataaagatcaaagagccggaaaactactctaaaaagggtaaggggaaggcgaaactaggcaaagaaccagtcttagccgcagagaataaaggcacttttgtgtacatcctgctgattttcatgtag

SEQ ID NO: 93944 - DNA, 585 bp, Artificial Sequence
  derived and/or modified sequence
atggacgacgacctgatgctggccctgcggctgcaggaggagtggaatctgcaggaggctgagcgagatcatgcccaggagtctctgtcgctagtggatgcgagttgggagctagtagaccctacaccggatctgcaggctctttttgtccagttcaatgaccagttcttttggggacaattagaggccgttgaggtcaagtggtccgtgagaatgaccctatgcgcagggatctgtagttatgaaggtaagggtgggatgtgctccatacgtttatccgagccccttctcaaattgcgccctcgaaaggacttggttgaggtctaccacacatttcatgatgaagtggatgaatataggcggcactggtggcggtgcaacggaccttgtcagcatagaccaccttactatggatatgtcaaacgagccaccaaccgcgagccaagtgcccacgactactggtgggcagaacatcagaaaacttgcggtggaacctacataaaaatcaaagagccagaaaattacaaaaagagacaaagaaaaggaaagacgcgcaaaggtacatctatcggcagacgggaatag

SEQ ID NO: 93945 - DNA, 624 bp, Artificial Sequence
  derived and/or modified sequence
atggatgatgacttaatgttagcccttaggctccaggaggaatggaacctgcaagaagccgagagggaccacgcgcaggaaagcctctccttagtcgacgcaagctgggaactcgtggatcctactccagatctgcaggcattattcgtgcaattcaatgatcagtttttctgggggcaactcgaagcagtggaggttaagtggtccgtccggatgaccctgtgcgcaggcatctgcagctacgaagggaaggggggtatgtgttcaatcagattgtctgaaccactgctgaagctgaggccacggaaggacctggtcgaggtttaccacacatttcacgatgaggtggacgaatatcgcagacactggtggcgatgtaatggaccatgccaacaccgcccaccctactacgggtacgttaaacgggctactaaccgggagccatccgcccacgactattggtgggccgagcaccagaaaacttgcgggggtacctacattaagatcaaggaacccgagaattactctaagaagggcaagggcaaggcgaagctgggaaaggaacctgtcctggcagctgaaaacaagggaactttcgtttacattctgttgatttttatgtag

SEQ ID NO: 93946 - DNA, 585 bp, Artificial Sequence
  derived and/or modified sequence
atggatgacgacttgatgcttgcgctcaggctccaagaagagtggaatctgcaagaggccgagcgagatcacgcacaggagtctctcagtctcgtggacgcatcttgggaactagtagacccgacgccggacctacaagccctgtttgtccagttcaatgaccagtttttctggggtcaactcgaggccgtagaggtgaagtggagcgtgaggatgaccctatgtgctggcatctgctcatatgagggaaaagggggaatgtgctccatccggctgtctgaacctttactcaagttgcgtccccgtaaggatctcgtagaagtctaccatactttccacgatgaagtggacgagtatagaaggcactggtggagatgcaacggcccatgccagcaccggccaccctattatggttacgtgaaacgggcaacgaaccgggaaccttctgcccatgactactggtgggctgagcatcagaagacctgcggagggacatatattaagatcaaagagccagaaaactataagaagaggcaacgaaagggcaagaccagaaaagggacttccatcggcagacgggagtag

SEQ ID NO: 93947 - DNA, 624 bp, Artificial Sequence
  derived and/or modified sequence
atggatgacgatctgatgttggctctgcggctgcaggaagagtggaacttacaggaagcagagcgagatcatgcgcaggagtctctgtctttggttgacgcttcctgggaactagtggatcctacaccagatctccaagctctctttgttcagttcaacgatcaattcttttggggccagctggaagcagtggaggtcaaatggtcagttagaatgactctgtgtgccggaatttgctcttacgaaggtaaggggggtatgtgctcaataaggctgagcgaacccctactgaagctgcggcctcggaaggacctcgtagaggtttaccatacatttcacgatgaggtagacgaatacagaagacactggtggcgctgcaatggcccttgtcagcacagaccaccttattatggctacgttaagagagctacaaatcgcgaacctagtgctcacgattattggtgggccgagcatcaaaagacatgtggtggcacgtatataaaaattaaagaacctgaaaactattcaaaaaaaggcaagggcaaagcaaagttagggaaggaacctgtattggcggccgaaaataagggcactttcgtctacatcttgcttatttttatgtag

SEQ ID NO: 93948 - DNA, 624 bp, Artificial Sequence
  derived and/or modified sequence
atggacgatgacttaatgctcgctctgcggttgcaagaggagtggaacctacaagaggcagaacgggatcatgctcaagaaagtctgagcctagtggacgcttcgtgggaactcgtggacccgacaccagatctacaggctctatttgtgcagttcaacgatcagttcttttgggggcagttggaagcagtggaggtgaagtggagtgtgcgcatgacattatgcgccggaatctgttcttatgaggggaaaggcggtatgtgctcaattagattgtcagagccgcttcttaagctaagacctcggaaggacctcgtagaggtttaccatacatttcacgatgaggtagacgaatacagaagacactggtggcgctgcaatggcccttgtcagcacagaccaccttattatggctacgttaagagagctacaaatcgcgaacctagtgctcacgattattggtgggccgagcatcaaaagacatgtggtggcacgtatataaaaattaaagaacctgaaaactattcaaaaaaaggcaagggcaaagcaaagttagggaaggaacctgtattggcggccgaaaataagggcactttcgtctatatccttctgatctttatgtag

SEQ ID NO: 93949 - DNA, 1667 bp, Artificial Sequence
  derived and/or modified sequence
gacgggccgtctcgagagccggcatctcctaggagctagtcctggtcctcggctaggcggcttggggtcgcggcgtaactggggagccagcctgacgccggcggaccccgcctgtgatcctggcaacgatggatgatgacttgatgttggcactgcggcttcaggaggagtggaacttgcaggaggcggagcgcgatcatgcccaggagtccctgtcgctagtggacgcgtcgtgggagttggtggaccccacaccggacttgcaggcactgtttgttcagtttaacgaccaattcttctggggccagctggaggccgtcgaggtgaagtggagcgtgcgaatgaccctgtgtgctgggatatgcagctatgaagggaagggtggaatgtgttccatccgtctcagcgaaccccttttgaagttgaggccaagaaaggatcttgtagaggtataccatacttttcacgatgaggtggatgagtatcggcgacactggtggcgctgcaatgggccgtgccagcacaggccaccgtattacggctatgtcaaacgagctactaacagggaaccctctgctcatgactattggtgggctgagcaccagaaaacctgtggaggcacttacataaaaatcaaggaaccagagaattactcaaaaaaaggcaaaggaaaggcaaaactaggaaaggaaccagtattggccgcagagaataaaggtaccttcgtgtatattcttctgatttttatgtgaccatagctatgatgtaaagacaatactgtccttcagagaactggtattaagataaacttaaggatcgtttctggtgtagaagtcttcaagtgtagacttaaggaaaaaatcccactgtccatgaaatgatggtaggaaaacagactttgctctgtacagaagtaagtaaaagtaggaatagtttccatggatatttttatttttattaacttttttcagtttctttttattcaaagaaacaaaattcaatctctgataatatttgaggtaaagttcctttccctatcttgactcactgagttattaggaaacagaaggcaaaaagattgtcaaaataaaaacaataattcaagtaacaatgcccggaatatacgtcctaactacaccccttcctatcagctggattctatccaagtgactctattgatgtatgtatgttcattcaaagaatgggaaaaggatatgacatatatttgccagtacttcatcttcaagatttacccttttcctgtgaagttcagagttactgaagatgcttcttcccttgggaagttgttgacccaagaacataggttatatttcccaaatctttaattattgagtgaaagagctatagatgaattgatatggaaagaccgtatcttcattttcgtgagtagaaggaaagataagaatgaggcagcagattttccctcctggaattacacataaaggacactaagcaattttcaaggtaaatgttgccttgttgttggtctttggcatgataagattctttatttaaatatgagagaatttttttttatcctttatattctctcaatatcagaactcctgaattctgaagattgccctcctcccattaataggattgtatggatgtaagatggaataaaatactagttcttcattttg

SEQ ID NO: 93950 - protein, 824 aa, Artificial Sequence
  derived and/or modified sequence
MRLALLWALGLLGAGSPLPSWPLPNIVLSWGVLGPAGGTEEQQAESEKAPREPLEPQVLQDDLPISLKKVLQTSLPEPLRIKLELDGDSHILELLQNRELVPGRPTLVWYQPDGTRVVSEGHTLENCCYQGRVRGYAGSWVSICTCSGLRGLVVLTPERSYTLEQGPGDLQGPPIISRIQDLHLPGHTCALSWRESVHTQKPPEHPLGQRHIRRRRDVVTETKTVELVIVADHSEAQKYRDFQHLLNRTLEVALLLDTFFRPLNVRVALVGLEAWTQRDLVEISPNPAVTLENFLHWRRAHLLPRLPHDSAQLVTGTSFSGPTVGMAIQNSICSPDFSGGVNMDHSTSILGVASSIAHELGHSLGLDHDLPGNSCPCPGPAPAKTCIMEASTDFLPGLNFSNCSRRALEKALLDGMGSCLFERLPSLPPMAAFCGNMFVEPGEQCDCGFLDDCVDPCCDSLTCQLRPGAQCASDGPCCQNCQLRPSGWQCRPTRGDCDLPEFCPGDSSQCPPDVSLGDGEPCAGGQAVCMHGRCASYAQQCQSLWGPGAQPAAPLCLQTANTRGNAFGSCGRNPSGSYVSCTPRDAICGQLQCQTGRTQPLLGSIRDLLWETIDVNGTELNCSWVHLDLGSDVAQPLLTLPGTACGPGLVCIDHRCQRVDLLGAQECRSKCHGHGVCDSNRHCYCEEGWAPPDCTTQLKATSSLTTGLLLSLLVLLVLVMLGASYWYRARLHQRLCQLKGPTCQYRAAQSGPSERPGPPQRALLARGTKSQGPAKPPPPRKPLPADPQGRCPSGDLPGPGAGIPPLVVPSRPAPPPPTVSSLYL

SEQ ID NO: 93951 - DNA, 2475 bp, Artificial Sequence
  derived and/or modified sequence
atgcggcttgctttactctgggccctgggactcctgggggctggctccccactgccgtcttggcccctacccaatattgtcctctcctggggtgttctaggaccagccgggggcacagaggagcagcaggctgaatccgaaaaagcacctcgagagcctcttgagccacaagtcctccaggacgacctgccaattagtctgaagaaggttcttcagaccagcctgcccgaaccgttacgcattaaattagagcttgacggcgactctcacatacttgagctattgcagaatagagaattggtgcctggccgcccaacgctggtgtggtaccagcccgacggtaccagagtggtgtccgaaggccatacacttgagaactgttgttatcaaggtagggtacgcggatacgcaggctcatgggtgtccatttgcacctgtagcgggctgagagggctggtagttttgactcccgaacgcagctacaccttggagcaagggccgggggatctccaggggccccccattatttccaggatccaggaccttcaccttcccggacatacatgcgccctctcatggagagagtcggtgcacacacagaagcctcctgaacatcctctgggtcaacgccatattcgccgtcgacgcgacgtggtcacagaaacgaagaccgtcgaactagtgatagttgcagatcacagcgaggcccagaaatacagggacttccagcatcttttgaacagaacccttgaggtggcacttcttctcgatactttcttccgccccctgaatgtgagggtggctttagtaggccttgaagcctggactcaacgggatctcgtcgaaataagcccaaaccccgcagttacacttgaaaactttttacattggcgccgagcccatctcctgcctcgcttacctcatgattccgctcagctcgtaacaggcaccagtttctcaggtccgacagtgggaatggcaatccagaatagtatctgttctccagatttttccggcggcgtgaacatggaccacagcacctccattctgggggtggcctcatccattgctcacgagctgggacactccctcggcttggaccatgacctgcctggcaatagttgcccttgtcctggacccgcccctgcaaagacatgcataatggaagcctcgacagacttcttacccggactgaacttcagcaactgcagtcgacgtgcgcttgagaaagccctcctcgatgggatgggttcctgtctttttgagcggctgccctccctgccacctatggcggccttctgcggtaatatgtttgtggagccgggcgagcagtgtgattgcggatttctggacgattgcgtagacccgtgttgtgactccttgacttgtcaactccgcccaggtgctcaatgtgcctccgatgggccatgctgccagaactgccagctgcgtccaagcggctggcagtgcagaccaacccggggagactgcgatctccctgaattttgtcccggtgattcttcacagtgtccacccgacgtgtccctgggggacggcgagccctgtgcaggaggacaggctgtgtgtatgcatgggcgctgcgcatcctacgcgcaacaatgccagtctctgtggggccccggtgcgcagcctgccgccccactctgcctgcagacagctaacactagggggaacgcattcggatcatgcggccgaaacccttcaggttcctatgtaagctgcacgcccagagacgctatctgcggccagttgcagtgccagactggccgaacacagcccctgctcggctctatccgggacttattgtgggagaccatagacgtaaacggtaccgaactcaattgttcatgggtgcatttggacctgggatcagatgtggctcaaccccttctaacccttccaggaacagcttgcgggccaggattggtgtgcattgaccatcgctgtcaaagggtggatctcttgggcgcccaggagtgccgttccaagtgtcatggccacggggtgtgcgacagcaaccggcactgttattgcgaggaaggctgggctccgccagactgtacaacgcagctcaaagcaacctcgagcttgaccacgggcctcttgctgtccctgcttgtgctgctggtactggtaatgctaggggcgagctactggtatcgcgcccgcttacaccagcggctttgccagctgaaaggccccacatgccagtacagggctgctcaatccggacccagtgaacgccccggccctccccagagagcactgctcgcgagaggcacaaaatctcaggggccggccaagcctccacctccgcgaaagcctctgccagctgatccgcagggccgttgtccatccggcgacttaccggggcccggtgcaggtattccccctctggtagtgccctctcgcccggcaccaccccctcctacagtgtcaagcctgtatctgtag

SEQ ID NO: 93952 - DNA, 2475 bp, Artificial Sequence
  derived and/or modified sequence
atgaggctggccctgctgtgggccctgggcctgctgggcgccggcagccccctgcccagctggcccctgcccaacatcgtgctgtcctggggcgtgctgggccctgctgggggcacagaggagcagcaggccgagagcgagaaggccccccgggagcccctggagccccaggtgctgcaggatgacctgcccatcagcctgaagaaggtgctgcagaccagcctgcctgagcccctgcgcatcaagctggagctggatggagacagccacatcctggagctgctgcagaaccgggagctggtgcccggccggcccaccctggtgtggtaccagccagatggcaccagggtggtgtctgagggccacaccctggagaactgctgctaccagggccgggtgcggggctacgccggctcctgggtgtccatctgcacctgcagcggcctgcggggcctggtggtgctgaccccagagaggagctacaccctggagcagggccctggggacctgcagggcccccccatcatcagccgcatccaggacctgcacctgcccggccacacctgtgccctgtcctggagggagagcgtgcacacccagaagcccccagagcaccccctgggccagaggcacatcagaagaagaagagatgtggtgacagagaccaagacagtggagctggtgattgtggccgaccacagcgaggcccagaagtacagagacttccagcacctgctgaacagaaccctggaggtggccctgctgctggacaccttcttccggcccctgaatgtgcgggtggccctggtgggcctggaggcctggacccagagggacctggtggagatcagccccaacccagctgtgaccctggagaacttcctgcactggaggcgggcccacctgctgccccggctgccccatgacagcgcccagctggtgacaggcaccagcttcagcggccccaccgtgggcatggccatccagaacagcatctgcagcccagacttcagcggcggcgtgaacatggaccacagcaccagcatcctgggcgtggccagcagcatcgcccacgagctgggccacagcctgggcctggaccatgacctgcccggcaacagctgcccctgccccggccctgccccagccaagacctgcatcatggaggccagcacagacttcctgcccggcctgaacttcagcaactgcagcagaagagccctggagaaggccctgctggatggcatgggcagctgcctgtttgagcggctgcccagcctgccccccatggccgccttctgtggcaacatgtttgtggagcctggagagcagtgtgactgtggcttcctggatgactgtgtggacccctgctgtgacagcctgacctgccagctgcggcctggggcccagtgtgccagtgatggcccctgctgccagaactgccagctgcggcccagcggctggcagtgccggcccaccaggggggactgtgacctgcctgagttctgccctggggacagcagccagtgccccccagatgtgtccctgggagatggagagccctgtgccggcggccaggccgtgtgcatgcacggccgctgtgccagctatgcccagcagtgccagagcctgtggggccctggggcccagcctgctgcccccctgtgcctgcagacagccaacaccagaggaaatgccttcggcagctgtggcaggaaccccagcggcagctatgtgtcctgcaccccaagagatgccatctgtggccagctgcagtgccagacaggccgcacccagcccctgctgggcagcatccgggacctgctgtgggagaccattgatgtgaatggaacagagctgaactgctcctgggtgcacctggacctgggcagtgatgtggcccagcccctgctgaccctgcctggaacagcctgtggccctggcctggtgtgcatcgaccaccgctgccagagggtggacctgctgggcgcccaggagtgccgcagcaagtgccacggccacggcgtgtgtgacagcaacagacactgctactgtgaggagggctgggcccccccagactgcaccacccagctgaaggccaccagcagcctgaccaccggcctgctgctgagcctgctggtgctgctggtgctggtgatgctgggcgccagctactggtaccgggcccggctgcaccagaggctgtgccagctgaagggccccacctgccagtacagagctgcccagagcggccccagcgagcggcccggccccccccagagggccctgctggcccggggcaccaagagccagggccctgccaagcccccaccacccaggaagcccctgcctgctgacccccagggccgctgccccagcggggacctgcccggccctggagctggcatcccccccctggtggtgcccagcaggcctgcccctcctccacccaccgtgagcagcctgtacctgtag

SEQ ID NO: 93953 - DNA, 2475 bp, Artificial Sequence
  derived and/or modified sequence
atgcggctggccctgctgtgggccctgggcctgctgggcgccggctcccctcttccttcctggccactgccaaatatcgtcctctcctggggggtgctcggacctgctggcgggactgaggaacagcaggcggaaagcgaaaaagccccgcgggagcctctcgagccccaggtgctgcaggacgacctgccaatctcactcaagaaggtgctgcaaaccagcctgccagagccccttagaataaaattagaattagacggtgatagtcatatcctggagttgctccagaaccgtgagcttgttccagggagaccaaccctcgtgtggtaccagccggacgggacgcgcgtcgtgtctgaaggtcacactcttgaaaactgctgctaccaggggagggttcgcggatacgcgggaagctgggtgtcgatctgcacttgtagtgggctgcgggggttagtggtcctgacaccagaacgttcctatacgctcgaacagggaccaggtgatttgcaaggaccaccaattatctctcgaattcaagatttgcacttaccgggccacacctgcgcattgagctggcgtgagtccgtgcacacgcaaaaacctcctgagcaccctctgggccagcgtcacattcgccgtcgaagggatgtcgttactgagactaaaactgtggaactggtgattgtcgccgaccactccgaggcacagaaatatcgggacttccaacatctgctgaatagaacccttgaagtggctctgctcctggacaccttttttcggcctctcaacgtgcgtgtcgcgcttgtcggccttgaagcatggacacaacgagacctggtggagatctcacctaaccctgccgttaccttagaaaactttctccattggcgcagagcccacctcctgccccggttgcctcacgatagcgcccagctggtgactggaacttcattttccggccctacagtcggaatggctatccaaaacagtatttgcagtcccgatttttcaggcggggtgaatatggaccattccaccagcatcctgggagtcgcctcaagcatcgcccatgaactagggcacagcctgggcttggaccatgacttgcctgggaacagctgtccatgtcctgggccagcgcccgctaaaacttgcatcatggaggccagcactgatttcctgcccgggttgaactttagcaactgttcaagaagggccttagagaaagccctgctcgacggtatgggctcttgtctgtttgagcgcctgcccagtcttccacctatggccgccttttgcggcaacatgttcgtggaacctggggaacaatgcgattgcggattccttgacgactgcgtggatccatgttgcgattcccttacgtgtcagctccggcccggcgcacagtgtgccagcgacgggccatgctgtcagaattgtcagctccgcccttctggctggcagtgtcgacctacgaggggggactgcgatcttcctgaattctgccccggcgactcctctcaatgccctcccgacgtgagcctgggcgacggagagccttgtgccggtggccaggctgtgtgcatgcatgggcgatgtgcctcttatgcccagcaatgccagtctttgtggggccccggggcccagcctgccgcccccctgtgccttcagacagcgaacaccagaggcaatgccttcgggtcttgtggaagaaaccctagtggttcatacgtcagctgcacgcctcgcgatgctatctgcgggcagttacaatgccagacggggcgaacccagccattgttaggctccatcagggacttactgtgggaaactatcgacgtgaacgggaccgagctgaactgttcctgggtgcatctggatttagggtccgacgttgcccagcctctcctcaccctgccaggcaccgcttgtggccccggtctggtctgcatcgatcatcgttgccaaagggtggacttactaggagctcaagagtgccggtccaagtgccatggtcacggggtttgtgatagcaatcgtcattgttattgtgaggaaggctgggctcctcctgactgtacaactcagctcaaggccacctcctctcttaccacaggtcttctactctctctgctggtactactggttctggtgatgttgggggcctcttactggtatcgtgccagactacaccaacggctttgccagctgaaaggcccaacgtgccaatatagggcagcccagtcaggacctagcgaaagacccggaccgccccagagggctctgctagctcggggcaccaagtcccaggggcctgcaaaacccccccccccacgcaaacccttgcccgccgatccccagggaaggtgtccatctggtgacttacccgggcccggagcggggatcccaccactggtcgtcccaagccggcccgcacccccccctccaacagttagtagtctttacttatag

SEQ ID NO: 93954 - DNA, 2475 bp, Artificial Sequence
  derived and/or modified sequence
atgagacttgccctcctgtgggcgctagggctcctgggcgctggtagcccacttccttcctggcctctccctaatatcgtcttgagctggggcgtcctgggacctgctgggggtacagaggagcagcaggccgaatcagaaaaggcacctcgggagccactggaacctcaagtcttgcaggacgatttgccaatcagcctgaaaaaagtgctccagacctctctgcctgagcctctccggatcaagctggaactggatggagatagccatatcctcgaactgctacagaatcgcgagctggttcctggcaggcctactctggtgtggtatcagccggacgggaccagagtagtttcagaggggcacaccttagaaaactgctgctatcaaggccgtgtgaggggatatgctggcagttgggtgtcgatctgtacttgcagcggcttacgtggccttgtggtgctgacgccggagaggagctacaccctcgagcagggtccaggggacttgcagggaccaccaatcatatccaggatacaggacctccacctgccaggacatacctgtgctctttcctggagagaaagtgtccatacccagaaaccacccgagcatccgctggggcagaggcacattagacgcagacgcgatgtggtgacagagacgaaaacagtggagctggtgatcgtagctgaccatagcgaggcccagaaatatagagactttcagcacctgctgaaccgcactctcgaggtcgcattacttctcgatacattttttcgtccattgaatgtgcgggtggcactcgtcggtctggaagcctggacacagagggacctggtggagatctctcccaatccggcagtgactctggagaactttctgcactggcggagagcacacctgctgcccaggttgcctcatgattctgcgcagttggtaaccggaacctctttctctggacctactgtcggtatggcaatccagaatagcatctgctccccagacttctcagggggtgtgaatatggaccactcgacatccatactcggcgtggccagcagtatcgcccacgagttgggacattccctcggcctagaccacgatttaccaggcaactcatgtccctgtccgggaccagctcctgcaaaaacctgcattatggaagcctcaacagattttctccctggcttaaatttcagtaactgctctcggagggccctggagaaagccctgctagatggcatggggagctgtctcttcgagcggctccctagcctcccgcctatggctgctttttgcggcaacatgttcgtcgaaccaggcgagcagtgcgactgcggcttcctggatgactgcgtggatccttgctgcgacagcctaacctgccagttgcgacccggagctcagtgcgcaagcgatggcccatgctgtcaaaactgtcagttgcggccatctggctggcaatgtcggcctactcgaggggactgcgatctgcctgagttttgccccggagactcatcccaatgccctccagacgtgagtctgggcgatggcgagccgtgcgctggaggacaagccgtatgtatgcacggacgttgcgcctcatacgcccaacagtgtcagagcctttggggtcctggcgctcagcctgccgcaccactgtgcctgcagacggctaacaccaggggcaacgcgtttggaagttgtgggagaaacccctcaggctcttacgtctcctgcaccccccgagacgccatctgcggacagctacagtgccagaccggccgaacacagcccctcttggggtcaatacgggacctgctctgggaaacaatcgatgtcaatgggaccgaacttaattgtagttgggtgcatctggatcttggttctgatgtggctcaacctctgctgaccctccctggaaccgcctgcgggcctggcctcgtttgtatcgatcacagatgtcagcgcgtggacctcctgggggcacaggaatgccgctccaaatgccacggccatggcgtgtgtgacagtaacagacattgctattgcgaagaggggtgggctcctcccgattgtactacacaactcaaagctacaagctcactgaccacgggattgcttctgagtctgctcgtgttactggtcctggtgatgctgggcgcttcttattggtaccgggctcggctgcatcagcggttgtgtcagctgaaaggccctacatgtcaatatagagccgcacaatccggcccttcagagagacccggaccccctcagcgagcgcttctggctaggggcaccaagagtcaggggcctgctaaaccaccacctccgagaaagcccctccctgcagacccgcagggcagatgcccaagcggagatcttccaggccctggggctggcatcccaccactcgtggttccaagtcggccagcaccaccgccaccaaccgtgtcatctctttatttatag

SEQ ID NO: 93955 - DNA, 2475 bp, Artificial Sequence
  derived and/or modified sequence
atgagactggccctgctgtgggccctgggcctgctgggcgccggcagccccctgcccagctggcccctgcccaacatcgtgctgagctggggcgtgctgggccccgccggcggcaccgaggagcagcaggccgagagcgagaaggcccccagagagcccctggagccccaggtgctgcaggacgacctgcccatcagcctgaagaaggtgctgcagaccagcctgcccgagcccctgagaatcaagctggagctggacggcgacagccacatcctggagctgctgcagaacagagagctggtgcccggcagacccaccctggtgtggtaccagcccgacggcaccagagtggtgagcgagggccacaccctggagaactgctgctaccagggcagagtgagaggctacgccggcagctgggtgagcatctgcacctgcagcggcctgagaggcctggtggtgctgacccccgagagaagctacaccctggagcagggccccggcgacctgcagggcccccccatcatcagcagaatccaggacctgcacctgcccggccacacctgcgccctgagctggagagagagcgtgcacacccagaagccccccgagcaccccctgggccagagacacatcagaagaagaagagacgtggtgaccgagaccaagaccgtggagctggtgatcgtggccgaccacagcgaggcccagaagtacagagacttccagcacctgctgaacagaaccctggaggtggccctgctgctggacaccttcttcagacccctgaacgtgagagtggccctggtgggcctggaggcctggacccagagagacctggtggagatcagccccaaccccgccgtgaccctggagaacttcctgcactggagaagagcccacctgctgcccagactgccccacgacagcgcccagctggtgaccggcaccagcttcagcggccccaccgtgggcatggccatccagaacagcatctgcagccccgacttcagcggcggcgtgaacatggaccacagcaccagcatcctgggcgtggccagcagcatcgcccacgagctgggccacagcctgggcctggaccacgacctgcccggcaacagctgcccctgccccggccccgcccccgccaagacctgcatcatggaggccagcaccgacttcctgcccggcctgaacttcagcaactgcagcagaagagccctggagaaggccctgctggacggcatgggcagctgcctgttcgagagactgcccagcctgccccccatggccgccttctgcggcaacatgttcgtggagcccggcgagcagtgcgactgcggcttcctggacgactgcgtggacccctgctgcgacagcctgacctgccagctgagacccggcgcccagtgcgccagcgacggcccctgctgccagaactgccagctgagacccagcggctggcagtgcagacccaccagaggcgactgcgacctgcccgagttctgccccggcgacagcagccagtgcccccccgacgtgagcctgggcgacggcgagccctgcgccggcggccaggccgtgtgcatgcacggcagatgcgccagctacgcccagcagtgccagagcctgtggggccccggcgcccagcccgccgcccccctgtgcctgcagaccgccaacaccagaggcaacgccttcggcagctgcggcagaaaccccagcggcagctacgtgagctgcacccccagagacgccatctgcggccagctgcagtgccagaccggcagaacccagcccctgctgggcagcatcagagacctgctgtgggagaccatcgacgtgaacggcaccgagctgaactgcagctgggtgcacctggacctgggcagcgacgtggcccagcccctgctgaccctgcccggcaccgcctgcggccccggcctggtgtgcatcgaccacagatgccagagagtggacctgctgggcgcccaggagtgcagaagcaagtgccacggccacggcgtgtgcgacagcaacagacactgctactgcgaggagggctgggccccccccgactgcaccacccagctgaaggccaccagcagcctgaccaccggcctgctgctgagcctgctggtgctgctggtgctggtgatgctgggcgccagctactggtacagagccagactgcaccagagactgtgccagctgaagggccccacctgccagtacagagccgcccagagcggccccagcgagagacccggccccccccagagagccctgctggccagaggcaccaagagccagggccccgccaagccccccccccccagaaagcccctgcccgccgacccccagggcagatgccccagcggcgacctgcccggccccggcgccggcatcccccccctggtggtgcccagcagacccgccccccccccccccaccgtgagcagcctgtacctgtag

SEQ ID NO: 93956 - DNA, 2678 bp, Artificial Sequence
  derived and/or modified sequence
acttgctgccctcgcccggcccggagcgccgctgccatgcggctggcgctgctctgggccctggggctcctgggcgcgggcagccctctgccttcctggccgctcccaaatatagtactgtcttggggtgtcctgggacctgcaggtggcactgaggagcagcaggcagagtcagagaaggccccgagggagcccttggagccccaggtccttcaggacgatctcccaattagcctcaaaaaggtgcttcagaccagtctgcctgagcccctgaggatcaagttggagctggacggtgacagtcatatcctggagctgctacagaatagggagttggtcccaggccgcccaaccctggtgtggtaccagcccgatggcactcgggtggtcagtgagggacacactttggagaactgctgctaccagggaagagtgcggggatatgcaggctcctgggtgtccatctgcacctgctctgggctcagaggcttggtggtcctgaccccagagagaagctataccctggagcaggggcctggggaccttcagggtcctcccattatttcgcgaatccaagatctccacctgccaggccacacctgtgccctgagctggcgggaatctgtacacactcagaagccaccagagcaccccctgggacagcgccacattcgccggaggcgggatgtggtaacagagaccaagactgtggagttggtgattgtggctgatcactcggaggcccagaaataccgggacttccagcacctgctaaaccgcacactggaagtggccctcttgctggacacattcttccggcccctgaatgtacgagtggcactagtgggcctggaggcctggacccagcgtgacctggtggagatcagcccaaacccagctgtcaccctcgaaaacttcctccactggcgcagggcacatttgctgcctcgattgccccatgacagtgcccagctggtgactggtacttcattctctgggcctacggtgggcatggccattcagaactccatctgttctcctgacttctcaggaggtgtgaacatggaccactccaccagcatcctgggagtcgcctcctccatagcccatgagttgggccacagcctgggcctggaccatgatttgcctgggaatagctgcccctgtccaggtccagccccagccaagacctgcatcatggaggcctccacagacttcctaccaggcctgaacttcagcaactgcagccgacgggccctggagaaagccctcctggatggaatgggcagctgcctcttcgaacggctgcctagcctaccccctatggctgctttctgcggaaatatgtttgtggagccgggcgagcagtgtgactgtggcttcctggatgactgcgtcgatccctgctgtgattctttgacctgccagctgaggccaggtgcacagtgtgcatctgacggaccctgttgtcaaaattgccagctgcgcccgtctggctggcagtgtcgtcctaccagaggggattgtgacttgcctgaattctgcccaggagacagctcccagtgtccccctgatgtcagcctaggggatggcgagccctgcgctggcgggcaagctgtgtgcatgcacgggcgttgtgcctcctatgcccagcagtgccagtcactttggggacctggagcccagcccgctgcgccactttgcctccagacagctaatactcggggaaatgcttttgggagctgtgggcgcaaccccagtggcagttatgtgtcctgcacccctagagatgccatttgtgggcagctccagtgccagacaggtaggacccagcctctgctgggctccatccgggatctactctgggagacaatagatgtgaatgggactgagctgaactgcagctgggtgcacctggacctgggcagtgatgtggcccagcccctcctgactctgcctggcacagcctgtggccctggcctggtgtgtatagaccatcgatgccagcgtgtggatctcctgggggcacaggaatgtcgaagcaaatgccatggacatggggtctgtgacagcaacaggcactgctactgtgaggagggctgggcaccccctgactgcaccactcagctcaaagcaaccagctccctgaccacagggctgctcctcagcctcctggtcttattggtcctggtgatgcttggtgccagctactggtaccgtgcccgcctgcaccagcgactctgccagctcaagggacccacctgccagtacagggcagcccaatctggtccctctgaacggccaggacctccgcagagggccctgctggcacgaggcactaagtctcaggggccagccaagcccccacccccaaggaagccactgcctgccgacccccagggccggtgcccatcgggtgacctgcccggcccaggggctggaatcccgcccctagtggtaccctccagaccagcgccaccgcctccgacagtgtcctcgctctacctctgacctctccggaggttccgctgcctccaagccggacttagggcttcaagaggcgggcgtgccctctggagtcccctaccatgactgaaggcgccagagactggcggtgtcttaagactccgggcaccgccacgcgctgtcaagcaacactctgcggacctgccggcgta

SEQ ID NO: 93957 - protein, 796 aa, Artificial Sequence
  derived and/or modified sequence
MRLALLWALGLLGAGSPLPSWPLPNIGGTEEQQAESEKAPREPLEPQVLQDDLPISLKKVLQTSLPEPLRIKLELDGDSHILELLQNRELVPGRPTLVWYQPDGTRVVSEGHTLENCCYQGRVRGYAGSWVSICTCSGLRGLVVLTPERSYTLEQGPGDLQGPPIISRIQDLHLPGHTCALSWRESVHTQKPPEHPLGQRHIRRRRDVVTETKTVELVIVADHSEAQKYRDFQHLLNRTLEVALLLDTFFRPLNVRVALVGLEAWTQRDLVEISPNPAVTLENFLHWRRAHLLPRLPHDSAQLVTGTSFSGPTVGMAIQNSICSPDFSGGVNMDHSTSILGVASSIAHELGHSLGLDHDLPGNSCPCPGPAPAKTCIMEASTDFLPGLNFSNCSRRALEKALLDGMGSCLFERLPSLPPMAAFCGNMFVEPGEQCDCGFLDDCVDPCCDSLTCQLRPGAQCASDGPCCQNCQLRPSGWQCRPTRGDCDLPEFCPGDSSQCPPDVSLGDGEPCAGGQAVCMHGRCASYAQQCQSLWGPGAQPAAPLCLQTANTRGNAFGSCGRNPSGSYVSCTPRDAICGQLQCQTGRTQPLLGSIRDLLWETIDVNGTELNCSWVHLDLGSDVAQPLLTLPGTACGPGLVCIDHRCQRVDLLGAQECRSKCHGHGVCDSNRHCYCEEGWAPPDCTTQLKATSSLTTGLLLSLLVLLVLVMLGASYWYRARLHQRLCQLKGPTCQYRLVLSASRPPLPGRCRLTLCPRDSSLRGQPSPHPQGSHCLPTPRAGAHRVTCPAQGLESRP

SEQ ID NO: 93958 - DNA, 2391 bp, Artificial Sequence
  derived and/or modified sequence
atgagacttgccttactctgggctcttgggttactaggggctggatcaccattgcccagttggccccttcccaacataggcggaacggaggaacagcaggccgaatctgaaaaggctcccagagagcctcttgagccacaggttctgcaagatgacctgccaatcagcctgaaaaaggtcctccagactagccttcccgagccattgagaatcaagcttgaactggacggcgactcccacatccttgagttactccagaatagagaactcgtcccagggcgcccaaccttggtgtggtatcaacctgacggaacacgagttgtgtccgaggggcacacgctggaaaattgctgctatcagggtagggtgcgcgggtacgcagggtcttgggtgagcatctgcacttgttcagggctgcgcggattagttgtcctcacacccgagagatcttataccttggagcaagggccgggcgacctccaaggacccccaattatttccaggattcaagacctgcaccttccaggtcacacttgtgcgctgagctggcgcgaatcagtccacacacagaaaccccccgaacaccccctggggcagaggcacatcaggcgcaggagggatgtcgtgacagaaacaaaaaccgttgagctagtgattgtcgccgatcactctgaggcccagaaataccgggattttcagcacctgctgaatcgcaccctggaagtggcattgcttctcgataccttcttccggccgctgaatgtccgcgttgcactcgtcgggctggaggcgtggactcaaagggatctcgtcgagatctcgccaaatccagctgttactctcgagaactttctgcactggcggagggcacatcttctccccaggctgccccatgatagtgctcagcttgtgactggaacgagctttagtggtcctactgttggaatggccatccagaactccatctgtagccccgatttctccggcggggtcaacatggatcattcgaccagcatcctaggggtcgctagttctattgcacacgaacttggacactctctgggcctagaccacgatctcccaggcaatagttgcccttgccccggtccagcccctgcaaaaacctgcattatggaagcgagcacagacttcctccctggactgaatttttcaaattgcagtcgacgagcactggagaaagccctgctggatggcatgggttcctgcctgttcgaacggcttccctcattgccccccatggctgccttttgcggcaacatgtttgttgaaccaggggaacaatgtgattgtggatttctggatgattgcgtggacccatgctgcgattctcttacctgtcagctccgtccaggcgcacagtgcgcaagcgatggaccctgttgccaaaattgtcagctgcgaccttctggctggcagtgccgacccacgcgaggagactgtgatctccctgaattctgtcctggggattccagccagtgccctccagacgtgagcctcggcgatggcgagccctgcgctggagggcaggctgtgtgtatgcatggaagatgcgccagctacgcacaacaatgccagagtctctggggtcctggcgcacagccagccgcaccactgtgtttacaaaccgcaaacacacgtggtaacgcattcggctcttgcggtagaaatccaagcgggtcatatgtatcttgtacaccacgcgatgctatctgtggccaactgcagtgtcagactggtagaactcaaccactactgggcagcatccgagatcttctgtgggaaaccattgatgtgaatggcaccgaattaaactgcagctgggtgcacctcgaccttggtagtgatgtagcccagccgctcctcacactgccggggaccgcctgtggcccgggtctagtctgtatagatcatcggtgtcaacgggtcgatcttttgggtgcacaggagtgcaggtccaagtgtcatgggcacggagtgtgtgattccaatagacactgctattgcgaggagggctgggcccccccggactgcaccactcagcttaaagccacatcatctttgacgactggcctgctgttatcactgctggtcctgctggttcttgtaatgctcggggctagctactggtaccgcgccaggctacatcagcgactgtgtcaacttaaaggaccaacctgccagtacaggctggtcctaagtgctagcaggcctccactgcctggcaggtgtagactcacactgtgccccagagactcctccctgcgcggtcagccttcacctcacccccagggatcacactgcctgccaacaccgcgggccggagctcatagggtcacgtgccctgcacagggcctggagtcacgtccctag

SEQ ID NO: 93959 - DNA, 2391 bp, Artificial Sequence
  derived and/or modified sequence
atgaggctggccctgctgtgggccctgggcctgctgggcgccggcagccccctgcccagctggcccctgcccaacatcggcggcacagaggagcagcaggccgagagcgagaaggccccccgggagcccctggagccccaggtgctgcaggatgacctgcccatcagcctgaagaaggtgctgcagaccagcctgcctgagcccctgcgcatcaagctggagctggatggagacagccacatcctggagctgctgcagaaccgggagctggtgcccggccggcccaccctggtgtggtaccagccagatggcaccagggtggtgtctgagggccacaccctggagaactgctgctaccagggccgggtgcggggctacgccggctcctgggtgtccatctgcacctgcagcggcctgcggggcctggtggtgctgaccccagagaggagctacaccctggagcagggccctggggacctgcagggcccccccatcatcagccgcatccaggacctgcacctgcccggccacacctgtgccctgtcctggagggagagcgtgcacacccagaagcccccagagcaccccctgggccagaggcacatcagaagaagaagagatgtggtgacagagaccaagacagtggagctggtgattgtggccgaccacagcgaggcccagaagtacagagacttccagcacctgctgaacagaaccctggaggtggccctgctgctggacaccttcttccggcccctgaatgtgcgggtggccctggtgggcctggaggcctggacccagagggacctggtggagatcagccccaacccagctgtgaccctggagaacttcctgcactggaggcgggcccacctgctgccccggctgccccatgacagcgcccagctggtgacaggcaccagcttcagcggccccaccgtgggcatggccatccagaacagcatctgcagcccagacttcagcggcggcgtgaacatggaccacagcaccagcatcctgggcgtggccagcagcatcgcccacgagctgggccacagcctgggcctggaccatgacctgcccggcaacagctgcccctgccccggccctgccccagccaagacctgcatcatggaggccagcacagacttcctgcccggcctgaacttcagcaactgcagcagaagagccctggagaaggccctgctggatggcatgggcagctgcctgtttgagcggctgcccagcctgccccccatggccgccttctgtggcaacatgtttgtggagcctggagagcagtgtgactgtggcttcctggatgactgtgtggacccctgctgtgacagcctgacctgccagctgcggcctggggcccagtgtgccagtgatggcccctgctgccagaactgccagctgcggcccagcggctggcagtgccggcccaccaggggggactgtgacctgcctgagttctgccctggggacagcagccagtgccccccagatgtgtccctgggagatggagagccctgtgccggcggccaggccgtgtgcatgcacggccgctgtgccagctatgcccagcagtgccagagcctgtggggccctggggcccagcctgctgcccccctgtgcctgcagacagccaacaccagaggaaatgccttcggcagctgtggcaggaaccccagcggcagctatgtgtcctgcaccccaagagatgccatctgtggccagctgcagtgccagacaggccgcacccagcccctgctgggcagcatccgggacctgctgtgggagaccattgatgtgaatggaacagagctgaactgctcctgggtgcacctggacctgggcagtgatgtggcccagcccctgctgaccctgcctggaacagcctgtggccctggcctggtgtgcatcgaccaccgctgccagagggtggacctgctgggcgcccaggagtgccgcagcaagtgccacggccacggcgtgtgtgacagcaacagacactgctactgtgaggagggctgggcccccccagactgcaccacccagctgaaggccaccagcagcctgaccaccggcctgctgctgagcctgctggtgctgctggtgctggtgatgctgggcgccagctactggtaccgggcccggctgcaccagaggctgtgccagctgaagggccccacctgccagtaccgcctggtgctgagcgccagccggccccccctgcccggccgctgccgcctgaccctgtgcccccgggacagcagcctgcggggccagcccagcccccacccccagggcagccactgcctgcccaccccccgggccggggcccaccgggtgacctgcccagcccagggcctggagagccggccctag

SEQ ID NO: 93960 - DNA, 2391 bp, Artificial Sequence
  derived and/or modified sequence
atgcggctggccctgctgtgggccctgggcctgctgggcgccggcagcccattgccttcatggccactgcccaatatcggcggcactgaagagcagcaggctgaaagtgagaaagctcctcgggaacctctggagccccaggttctgcaagatgacctgcctatctctctgaaaaaggtcctgcagacctctctcccagaacctcttagaattaaattggagctcgatggggactcccatatcttggaacttcttcagaatagagaactggtgcccggtaggcccaccctggtgtggtaccaacctgacggcacccgggttgtcagtgaaggacatacactggaaaactgctgctatcagggcagagtgagaggttacgctggctcctgggtgagcatttgcacatgttccggcctgcgggggctggtagttttgacccccgagcgtagctatacactggagcagggccctggcgatctgcagggaccccccatcatctcaaggatccaagacctgcacctgcctggacatacttgcgcactgtcatggagggagtcagtgcatactcagaagcctcccgaacaccccttgggacagcgtcacattaggcgcagaagggacgtagtcacagagacaaaaacggtagagttggttattgttgctgatcatagcgaggcacagaaatatcgggactttcaacatctgctgaatagaactctagaagttgctttgcttttggacacattctttcgccccctcaacgttcgggttgccctcgttggcttagaagcatggacgcaacgagatctcgttgagattagcccaaatcctgccgtcacgcttgaaaacttccttcactggaggcgggcccacctcttgccacgattgcctcacgacagcgcgcagctcgtcaccggaacttccttcagcgggccaactgttggcatggcaatccagaattccatctgcagtcccgatttcagtggaggggtcaatatggaccatagcacaagtattctgggcgtagccagcagcattgcgcatgagctgggacactccctcgggctcgatcatgatctgccagggaactcctgcccctgccctggcccagcacctgccaagacttgtatcatggaagcttctactgatttccttccagggctgaacttcagtaactgcagcagaagggcactcgaaaaagccttgctggacgggatgggctcatgcttatttgagcgtctgcccagtcttcctcctatggctgcgttctgtgggaacatgttcgtggagcccggggaacagtgtgactgcggttttctagatgactgcgtggacccttgttgcgattctctgacttgtcaactgagaccaggagcccagtgtgccagcgacggaccttgctgccaaaactgccagctgagaccaagtggctggcagtgtaggccaacacgaggggattgcgacctgcccgagttctgtcctggcgactccagtcagtgtccacctgacgttagcttgggagatggcgagccttgtgcagggggacaggctgtttgcatgcatggacgctgtgcatcctatgcgcaacagtgtcagagcttgtgggggcccggagcgcagcctgcagcacccttgtgcctgcaaaccgctaacactcgaggaaatgcatttggctcatgtggccggaacccaagcggatcctatgtcagttgtacgccgagagacgcaatctgtggtcagctgcagtgccagacgggaagaacgcagcccctgctgggatctatccgcgatctgctttgggagacaatcgatgtcaatggaacagagctgaactgtagctgggtccatctcgatctgggcagcgatgtggcgcagcccctgttgacattgcccggcacggcctgtggacccggcttggtgtgcattgaccaccgctgtcagagggttgacctgctcggagctcaggagtgtcggagcaagtgccacggccacggcgtgtgcgattccaaccggcactgctactgtgaagaagggtgggcccctccggactgtacaacccaactgaaagctaccagctcgctcaccaccggccttctcctgagtttactggttctgctggttttagtgatgttgggggcgtcatactggtatagagctcggttacatcagagactgtgtcagcttaagggacctacttgccagtacaggctggtgctgtctgcctcacggccccccctgcctggccgatgcaggttaacactgtgtccaagggattcctccctccgaggtcagcctagtccccacccgcagggatcccattgcttgccaacacctagagccggggcccatagggtaacttgtcctgcccaaggcctggaatcccggccctag

SEQ ID NO: 93961 - DNA, 2391 bp, Artificial Sequence
  derived and/or modified sequence
atgcggctggctctcttgtgggcactgggattgctgggcgcaggctccccccttccatcctggcccctaccaaatatcggcggaaccgaagagcaacaggccgagagcgagaaggcaccgagagaacctctggagccgcaggtgcttcaagatgacctgcctatctccttaaagaaggtactccagacatcccttcccgaaccccttaggattaagctcgaactggacggcgactcccatattctagaactgctgcagaatagagagctcgtgccaggacgacccaccctggtgtggtaccaacccgatggtactcgtgtggtgagcgaaggccataccctcgagaactgctgttaccaggggagagtgagaggctatgccggttcctgggtctctatttgcacttgcagcggtttgcgaggactcgtggtccttacccccgagcgaagttacaccctcgagcaagggccaggagacctgcagggtccccctatcatcagccggatccaggatctgcacttacctgggcacacctgcgcgctttcgtggagggagtccgtgcacacccaaaagcctcccgaacaccctctggggcagcgacatatcagacggcgacgagacgtagttaccgagacaaagacggtcgagctggtcatcgttgctgaccatagtgaggcccaaaagtatcgcgatttccagcacctgctgaatcgaacactagaggttgcacttctgttagatactttcttccgccctctgaatgtccgagtggccctggtcggcctggaggcatggacgcaaagggatttagttgaaatctctcctaatcccgcagtgacactggagaacttcctccactggcgaagagcccacctgttgccaaggcttccccacgacagcgcacagcttgtcacaggaaccagtttctctggaccaaccgtcggcatggctatccagaattctatctgttcgcccgacttttctggcggtgtcaatatggaccattcaacaagcattttgggagtcgctagcagcattgctcacgaacttggccactctctaggccttgatcacgatctgcctggcaatagctgcccttgtcccggtcctgcccctgctaaaacatgcatcatggaggcatccaccgacttcctccctggtctgaacttctccaactgtagccggagagctttagaaaaggccttactggacggcatgggtagttgtctgtttgagcgccttccgagtctaccacctatggctgcattttgtggaaatatgtttgtggaacctggcgagcaatgtgattgcgggtttctggacgattgcgtagacccttgttgcgatagtctgacctgccagctgcgtcccggtgcacagtgtgcatctgacggcccttgctgtcagaactgccagctgcgaccaagcggctggcagtgccggcctacccgcggagattgcgacctgccagagttttgtccaggtgatagctctcagtgcccccctgacgttagccttggggacggcgaaccatgcgctggagggcaagccgtctgcatgcatggcaggtgtgcatcttacgcccagcagtgtcagtcactgtgggggcctggcgcacagcctgcagcccctctatgtctgcagacagccaacacacgaggcaatgcgttcggatcctgtggacggaaccctagtggctcctatgtgagctgtaccccccgtgacgccatttgtgggcaacttcagtgtcagacaggaaggacgcagcctctgctggggtcgatccgggatctgttatgggagactatagatgtgaatggaaccgagctcaattgctcttgggtccacttggatctcgggtcagacgttgcccagcctttactgaccttgcccggtaccgcctgtgggcctggactggtctgtattgatcatcggtgtcagagagtggacctgctgggggctcaagagtgcaggagcaagtgccatggccacggagtgtgcgatagtaatcggcactgctactgtgaggaagggtgggctccccctgactgcactactcaactaaaagctactagctcccttacaacgggactgcttctgagcctgctggttctgctggtgcttgtgatgttgggcgcaagctactggtacagagctaggcttcatcagaggctgtgccagctaaaggggccaacgtgccaatataggctggtcttgagtgcaagcaggcccccactgcccggaagatgccggctgaccttatgccccagagattccagccttcgagggcagccttccccccacccccaaggcagccactgccttccaacaccccgagctggagcccatagagtgacttgccccgcacaaggtttggaatcccggccatag

SEQ ID NO: 93962 - DNA, 2391 bp, Artificial Sequence
  derived and/or modified sequence
atgagactggccctgctgtgggccctgggcctgctgggcgccggcagccccctgcccagctggcccctgcccaacatcggcggcaccgaggagcagcaggccgagagcgagaaggcccccagagagcccctggagccccaggtgctgcaggacgacctgcccatcagcctgaagaaggtgctgcagaccagcctgcccgagcccctgagaatcaagctggagctggacggcgacagccacatcctggagctgctgcagaacagagagctggtgcccggcagacccaccctggtgtggtaccagcccgacggcaccagagtggtgagcgagggccacaccctggagaactgctgctaccagggcagagtgagaggctacgccggcagctgggtgagcatctgcacctgcagcggcctgagaggcctggtggtgctgacccccgagagaagctacaccctggagcagggccccggcgacctgcagggcccccccatcatcagcagaatccaggacctgcacctgcccggccacacctgcgccctgagctggagagagagcgtgcacacccagaagccccccgagcaccccctgggccagagacacatcagaagaagaagagacgtggtgaccgagaccaagaccgtggagctggtgatcgtggccgaccacagcgaggcccagaagtacagagacttccagcacctgctgaacagaaccctggaggtggccctgctgctggacaccttcttcagacccctgaacgtgagagtggccctggtgggcctggaggcctggacccagagagacctggtggagatcagccccaaccccgccgtgaccctggagaacttcctgcactggagaagagcccacctgctgcccagactgccccacgacagcgcccagctggtgaccggcaccagcttcagcggccccaccgtgggcatggccatccagaacagcatctgcagccccgacttcagcggcggcgtgaacatggaccacagcaccagcatcctgggcgtggccagcagcatcgcccacgagctgggccacagcctgggcctggaccacgacctgcccggcaacagctgcccctgccccggccccgcccccgccaagacctgcatcatggaggccagcaccgacttcctgcccggcctgaacttcagcaactgcagcagaagagccctggagaaggccctgctggacggcatgggcagctgcctgttcgagagactgcccagcctgccccccatggccgccttctgcggcaacatgttcgtggagcccggcgagcagtgcgactgcggcttcctggacgactgcgtggacccctgctgcgacagcctgacctgccagctgagacccggcgcccagtgcgccagcgacggcccctgctgccagaactgccagctgagacccagcggctggcagtgcagacccaccagaggcgactgcgacctgcccgagttctgccccggcgacagcagccagtgcccccccgacgtgagcctgggcgacggcgagccctgcgccggcggccaggccgtgtgcatgcacggcagatgcgccagctacgcccagcagtgccagagcctgtggggccccggcgcccagcccgccgcccccctgtgcctgcagaccgccaacaccagaggcaacgccttcggcagctgcggcagaaaccccagcggcagctacgtgagctgcacccccagagacgccatctgcggccagctgcagtgccagaccggcagaacccagcccctgctgggcagcatcagagacctgctgtgggagaccatcgacgtgaacggcaccgagctgaactgcagctgggtgcacctggacctgggcagcgacgtggcccagcccctgctgaccctgcccggcaccgcctgcggccccggcctggtgtgcatcgaccacagatgccagagagtggacctgctgggcgcccaggagtgcagaagcaagtgccacggccacggcgtgtgcgacagcaacagacactgctactgcgaggagggctgggccccccccgactgcaccacccagctgaaggccaccagcagcctgaccaccggcctgctgctgagcctgctggtgctgctggtgctggtgatgctgggcgccagctactggtacagagccagactgcaccagagactgtgccagctgaagggccccacctgccagtacagactggtgctgagcgccagcagaccccccctgcccggcagatgcagactgaccctgtgccccagagacagcagcctgagaggccagcccagcccccacccccagggcagccactgcctgcccacccccagagccggcgcccacagagtgacctgccccgcccagggcctggagagcagaccctag

SEQ ID NO: 93963 - DNA, 2804 bp, Artificial Sequence
  derived and/or modified sequence
gcgcggcgctgctgggttctccgaggcgacctggccgccggccgctcctccgcgcgctgttccgcacttgctgccctcgcccggcccggagcgccgctgccatgcggctggcgctgctctgggccctggggctcctgggcgcgggcagccctctgccttcctggccgctcccaaatataggtggcactgaggagcagcaggcagagtcagagaaggccccgagggagcccttggagccccaggtccttcaggacgatctcccaattagcctcaaaaaggtgcttcagaccagtctgcctgagcccctgaggatcaagttggagctggacggtgacagtcatatcctggagctgctacagaatagggagttggtcccaggccgcccaaccctggtgtggtaccagcccgatggcactcgggtggtcagtgagggacacactttggagaactgctgctaccagggaagagtgcggggatatgcaggctcctgggtgtccatctgcacctgctctgggctcagaggcttggtggtcctgaccccagagagaagctataccctggagcaggggcctggggaccttcagggtcctcccattatttcgcgaatccaagatctccacctgccaggccacacctgtgccctgagctggcgggaatctgtacacactcagaagccaccagagcaccccctgggacagcgccacattcgccggaggcgggatgtggtaacagagaccaagactgtggagttggtgattgtggctgatcactcggaggcccagaaataccgggacttccagcacctgctaaaccgcacactggaagtggccctcttgctggacacattcttccggcccctgaatgtacgagtggcactagtgggcctggaggcctggacccagcgtgacctggtggagatcagcccaaacccagctgtcaccctcgaaaacttcctccactggcgcagggcacatttgctgcctcgattgccccatgacagtgcccagctggtgactggtacttcattctctgggcctacggtgggcatggccattcagaactccatctgttctcctgacttctcaggaggtgtgaacatggaccactccaccagcatcctgggagtcgcctcctccatagcccatgagttgggccacagcctgggcctggaccatgatttgcctgggaatagctgcccctgtccaggtccagccccagccaagacctgcatcatggaggcctccacagacttcctaccaggcctgaacttcagcaactgcagccgacgggccctggagaaagccctcctggatggaatgggcagctgcctcttcgaacggctgcctagcctaccccctatggctgctttctgcggaaatatgtttgtggagccgggcgagcagtgtgactgtggcttcctggatgactgcgtcgatccctgctgtgattctttgacctgccagctgaggccaggtgcacagtgtgcatctgacggaccctgttgtcaaaattgccagctgcgcccgtctggctggcagtgtcgtcctaccagaggggattgtgacttgcctgaattctgcccaggagacagctcccagtgtccccctgatgtcagcctaggggatggcgagccctgcgctggcgggcaagctgtgtgcatgcacgggcgttgtgcctcctatgcccagcagtgccagtcactttggggacctggagcccagcccgctgcgccactttgcctccagacagctaatactcggggaaatgcttttgggagctgtgggcgcaaccccagtggcagttatgtgtcctgcacccctagagatgccatttgtgggcagctccagtgccagacaggtaggacccagcctctgctgggctccatccgggatctactctgggagacaatagatgtgaatgggactgagctgaactgcagctgggtgcacctggacctgggcagtgatgtggcccagcccctcctgactctgcctggcacagcctgtggccctggcctggtgtgtatagaccatcgatgccagcgtgtggatctcctgggggcacaggaatgtcgaagcaaatgccatggacatggggtctgtgacagcaacaggcactgctactgtgaggagggctgggcaccccctgactgcaccactcagctcaaagcaaccagctccctgaccacagggctgctcctcagcctcctggtcttattggtcctggtgatgcttggtgccagctactggtaccgtgcccgcctgcaccagcgactctgccagctcaagggacccacctgccagtacaggctagtgctctcagcttcccggcccccccttccaggccgctgccgcctgaccctgtgtccaagagactccagtctcaggggccagccaagcccccacccccaaggaagccactgcctgccgacccccagggccggtgcccatcgggtgacctgcccggcccaggggctggaatcccgcccctagtggtaccctccagaccagcgccaccgcctccgacagtgtcctcgctctacctctgacctctccggaggttccgctgcctccaagccggacttagggcttcaagaggcgggcgtgccctctggagtcccctaccatgactgaaggcgccagagactggcggtgtcttaagactccgggcaccgccacgcgctgtcaagcaacactctgcggacctgccggcgtagttgcagcgggggcttggggaggggctgggggttggacgggattgaggaaggtccgcacagcctgtctctgctcagttgcaataaacgt

SEQ ID NO: 93964 - DNA, 1062 bp, Artificial Sequence
  derived and/or modified sequence
cttaaaatgaccaagctggagatccagaaggccctggctgaggacgccacagtctatgagtacgactccatctacgatgaaatgcaaaagaaaaaagaggaaaataatccgaagctgcttctcgggaaagatcgcaagcctaaatacatccacaacctcttgaaggccgtggaaattcgaaagaaagagcaagaaaaaaggatggagaaaaaaattcaaagggagagggagatggagaaaggagagttcgatgataaagaagcctttgtcacctcagcctataagaagaagctccaagagagggccgaagaggaggaacgggaaaaaagggccgcagctcttgaagcttgcttggacgtcacgaagcaaaaggatctgagtgggttttatagacacctgctcaatcaggccgttggcgaggaagaagtgccaaaatgttcatttagggaagcccggtctggtattaaggaagaaaaatccagaggtttttccaatgaggtttcatcaaagaatcgcattccccaggaaaaatgcatcctgcagacagacgtgaaagtcgaggagaaccccgatgccgatagcgacttcgacgctaagtcatcagcggacgacgagatagaagaaacgcgagtcaactgcaggcgggagaaggtcatcgagactcctgagaacgacttcaaacatcatagatcccaaaatcactctcggagtcctagcgaagagagagggcactccacaagacaccatacaaaggggtccaggaccagcagagggcacgagaaaagagaggaccagcaccagcagaaacagtcgagggaccaggagaaccactacactgaccgagactacagaaaagaacgggatagtcaccgacacagggaagcttctcaccgcgactcacactggaaacgccatgaacaggaggataagcccagagccagagatcaacgcgagcgctcggaccgagtgtggaaacgggaaaaggatagagagaaatattctcagagagaacaggaacgtgaccgtcagcagaatgatcaaaataggcctagcgagaagtag

SEQ ID NO: 93965 - DNA, 1470 bp, Artificial Sequence
  derived and/or modified sequence
atgctgctctgtatgaacatgactgtgttcatgatgaagtgtcggaaaaaagaagaaaacaacccaaaactattactggggaaggaccgcaagcctaagtacatccataacttactgaaagcggttgagatccggaaaaaggaacaagagaagcgcatggagaagaagattcaaagggaacgagagatggaaaagggcgaatttgacgacaaggaagcattcgtgacatccgcgtacaaaaaaaagctccaggaaagagcagaggaggaggagcgtgagaaaagagctgcagcacttgaagcgtgtctggacgtgacaaaacaaaaagatctttccggtttctatagacatctgcttaatcaagcggtcggggaagaggaggtccccaagtgctccttccgggaggccaggtccggcataaaggaggaaaagtcacgcggcttctccaatgaagtttcgagtaagaatcgcattccccaagaaaaatgcattctgcagacggacgtgaaggtggaggagaacccagacgctgattccgattttgacgccaagtcaagcgcagacgatgagatcgaagaaacaagagtgaactgccggcgtgagaaggtgatcgaaacccccgagaatgatttcaagcaccacaggtctcagaatcactcacgctctccctcagaggagagggggcactctacccggcaccacactaaagggtctaggacgtccagggggcacgagaaacgagaagaccaacaccagcaaaagcagtccagggatcaggaaaatcattacacagatagagactaccgcaaggaacgcgactctcaccgtcatcgcgaggcttcacatcgggattctcactggaaaagacacgaacaggaggacaagccgcgggccagagatcagagagagcggtctgaccgcgtttggaaacgggaaaaagacagggagaaatattctcaacgggagcaagagagagacaggcagcagaacgaccagaacagaccaagcgaaaagggagagaaggaagagaaatctaaggccaaagaagaacacatgaaggtgcgaaaggagagatacgagaataacgataagtatagggacagggaaaaacgggaggtaggcgtacagtcttccgagcgaaatcaagatagaaaagagtcaagcccgaactcacgggctaaagacaaattcctcgaccaggagcgttctaacaaaatgcggaatatggctaaagataaggaacggaaccaggagaagccatctaatagtgaaagcagcttgggcgccaagcaccgtttgacggaggagggccaggagaaaggaaaagagcaggagaggccacctgaagccgtatccaagttcgcgaagcggaacaacgaggaaacagtgatgtctgctcgtgatcgctatctggcccgccaaatggccagggtaaatgctaagacgtatatcgaaaaagaggatgattag

SEQ ID NO: 93966 - DNA, 2306 bp, Artificial Sequence
  derived and/or modified sequence
ctaaaaatgaccaaactggaaatccagaaggcccttgcagaagatgctactgtgtatgaatatgacagtatttatgatgaaatgcagaaaaaaaaggaggaaaataatcccaaattgcttttggggaaagacagaaagcccaagtatattcacaacttgctaaaagcagttgagatcagaaaaaaggaacaggaaaaaagaatggaaaagaaaatacagagagaacgagaaatggaaaagggggagtttgatgataaagaagcatttgtgacatctgcatataagaaaaaactgcaagagagagctgaagaagaagaaagagaaaagagggctgctgcactggaagcatgtttggatgtaaccaagcagaaagatctcagtggattttataggcacctattaaatcaagcagttggtgaagaggaagtacctaaatgcagctttcgtgaagccagatctggtataaaggaagaaaaatcaaggggcttctccaatgaagtaagttcaaaaaacagaataccacaagagaaatgcattcttcaaactgatgtgaaagtagaggaaaacccagatgcagacagtgacttcgatgctaagagcagtgcggatgatgaaatagaagaaactagagtgaactgcagaagggaaaaggtcatagagacccctgagaatgacttcaagcaccacaggagtcaaaaccactctcggtcacctagtgaagaaagagggcacagtaccaggcaccacacgaaaggatcacgaacgtcgagaggacatgagaaaagggaagatcagcaccagcagaagcaatccagagaccaagagaaccattacactgaccgtgattaccggaaagaaagggattctcataggcacagagaggccagtcatagagattcccattggaagaggcatgaacaggaagataaaccaagggcgagggaccaaagagaaagaagtgacagagtatggaaaagggagaaagatagggagaaatattcccaaagagaacaagaaagagatagacaacaaaatgatcagaaccgacccagtgagaaaggagagaaggaagagaaaagcaaagcaaaggaagagcatatgaaagtaaggaaggaaagatatgaaaataatgataaatacagagatagagaaaaacgagaggtaggtgttcagtcttcagaaagaaatcaagacagaaaggaaagcagcccaaattctagggcaaaggataaatttcttgaccaagaaagatccaacaaaatgagaaacatggcaaaggacaaagaaagaaaccaagagaaaccctctaattctgaatcatcactgggagcaaaacacagactcacagaggaagggcaagagaagggtaaagaacaagagagaccacctgaggcagtgagcaagtttgcaaagcggaacaatgaagaaactgtaatgtcagctagagacaggtacttggccaggcagatggcgcgggttaatgcaaagacctatattgagaaagaagatgattgatggctaccccaagagaaagatttaaggaagcacagaaaactgtaattcctggaacctgctgcgtaaaaccataaaggagtgtgttaccagtagtttggagggcatttttaaatttattttcaaaattttaagttaaaagtcagtcttacagcttggatgtttggatgtggatgtttggctgaatttatatatagtgtgtactcatcaataccacattctttgttgtattcaagaaccgttaagagtgtgctaattccctgtaggtacataatgaggaaaatttgctccactacaaccattaaaaaataattttggccagatacggtagctcgtgcctgtaataccaacattttgggaggccaaggcagaaggatattgaggctaggcattcaagaccagcctaggcaggataataagaccttgtctctatttaaaaaacaaaaagcctagcatggtagtccatgcctgtagtcccagctgttcgagaggctgaggcaagaagatcacttgagcctaggaatttgatgttacagtgaggtatgatcatgccactgcactccaacctgggcaacagaatgagaccctgtctctaaaaaattttttttaaataaataatttaactcttctaataatgttttgttgcaggaaatgtatttcagataaaatatggatttgaaaaacagaaaatatactttatgttctgaaatttgtatttaagtataaaatgtgaatcatcttgtctaaatagcttacagcatagttggcttaaatgaaaataaaatgatatgctt

SEQ ID NO: 93967 - DNA, 1062 bp, Artificial Sequence
  derived and/or modified sequence
ctgaagatgaccaagctggagatccagaaggccctggccgaggatgccaccgtgtatgaatatgacagcatctatgatgagatgcagaagaagaaggaggagaacaaccccaagctgctgctgggcaaggacaggaagcccaagtacatccacaacctgctgaaggctgtggagatcaggaagaaggagcaggagaagaggatggagaagaagatccagcgggagcgggagatggagaagggggagtttgatgacaaggaggcctttgtgaccagcgcctacaagaagaagctgcaggagcgggcagaggaggaggagcgggagaagagagctgctgccctggaggcctgcctggatgtgaccaagcagaaggacctgagcggcttctaccgccacctgctgaaccaggccgtgggggaggaggaggtgcccaagtgcagcttccgggaggcccggagcggcatcaaggaggagaagagccggggcttcagcaatgaggtgagcagcaagaaccgcatcccccaggagaagtgcatcctgcagacagatgtgaaggtggaggagaacccagatgctgacagcgactttgatgccaagagcagcgcagatgatgaaattgaggagaccagggtgaactgccggcgggagaaggtgattgagaccccagaaaatgacttcaagcaccacaggagccagaaccacagccgcagccccagcgaggagcggggccacagcaccaggcaccacaccaagggcagcaggaccagccggggccacgagaagcgggaggaccagcaccagcagaagcagagccgggaccaggagaaccactacacagaccgggactacaggaaggagcgggacagccaccgccaccgggaggccagccaccgggacagccactggaagagacatgagcaggaggacaagccccgggcccgggaccagcgggagaggagtgacagagtgtggaagcgggagaaggaccgggagaagtacagccagcgggagcaggagcgggaccggcagcagaatgaccagaaccggcccagcgagaagtag

SEQ ID NO: 93968 - DNA, 1470 bp, Artificial Sequence
  derived and/or modified sequence
atgctgctgtgcatgaacatgaccgtcttcatgatgaagtgcaggaagaaggaggagaacaaccccaagctgctgctgggcaaggacaggaagcccaagtacatccacaacctgctgaaggctgtggagatcaggaagaaggagcaggagaagaggatggagaagaagatccagcgggagcgggagatggagaagggggagtttgatgacaaggaggcctttgtgaccagcgcctacaagaagaagctgcaggagagagctgaggaggaggagcgggagaagagagctgctgccctggaggcctgcctggatgtgaccaagcagaaggacctgagcggcttctaccgccacctgctgaaccaggccgtgggggaggaggaggtgcccaagtgcagcttccgggaggcccggagcggcatcaaggaggagaagagccggggcttcagcaatgaggtgagcagcaagaaccgcatcccccaggagaagtgcatcctgcagacagatgtgaaggtggaggagaacccagatgctgacagcgactttgatgccaagagcagcgcagatgatgaaattgaggagaccagggtgaactgcagaagagagaaggtgattgagaccccagaaaatgacttcaagcaccacaggagccagaaccacagccgcagccccagcgaggagcggggccacagcaccaggcaccacaccaagggcagcaggaccagccggggccacgagaagcgggaggaccagcaccagcagaagcagagccgggaccaggagaaccactacacagaccgggactacaggaaggagcgggacagccaccgccaccgggaggccagccaccgggacagccactggaagagacatgagcaggaggacaagccccgggcccgggaccagcgggagaggagtgacagagtgtggaagcgggagaaggaccgggagaagtacagccagcgggagcaggagcgggaccggcagcagaatgaccagaaccggcccagcgagaagggggagaaggaggagaagagcaaggccaaggaggagcacatgaaggtgaggaaggagagatatgagaacaatgacaagtacagagaccgggagaagcgggaggtgggcgtgcagagcagcgagaggaaccaggacaggaaggagagcagccccaacagccgggccaaggacaagttcctggaccaggagaggagcaacaagatgaggaacatggccaaggacaaggagaggaaccaggagaagcccagcaacagcgagagcagcctgggcgccaagcaccggctgacagaggagggccaggagaagggcaaggagcaggagaggcctcctgaggccgtgtccaagtttgccaagagaaataatgaggagaccgtgatgtctgcccgggaccgctacctggcccggcagatggcccgggtgaatgccaagacctacatcgagaaggaggatgactag

SEQ ID NO: 93969 - DNA, 1062 bp, Artificial Sequence
  derived and/or modified sequence
ctgaagatgaccaagctggagatccagaaggccctggccgaggacgcgacggtgtatgagtacgactccatttacgatgagatgcagaaaaaaaaggaagagaataatcccaagcttttgctgggaaaggataggaagccgaaatacatacataacctgctcaaggccgtcgagatcaggaaaaaggagcaagagaaaaggatggagaaaaaaatacagcgcgagcgggagatggaaaaaggggaatttgacgacaaagaagcttttgttacttccgcatataaaaaaaagctccaagaacgtgctgaggaggaggaaagggagaaacgcgcggccgctctggaggcatgtctcgacgtaactaagcagaaagacctgtcaggtttctatcggcacctcttgaaccaggccgtcggcgaagaagaagtaccaaagtgcagcttccgcgaggccaggtccggaatcaaagaggagaagagccgaggcttttctaacgaagtctcatccaagaaccgtatccctcaggaaaaatgtatcttgcagaccgatgtgaaggtcgaggagaatcccgatgcagactcagattttgacgcaaagtcctctgctgacgacgagattgaggaaacccgtgttaactgtaggcgtgagaaagtgattgagactcctgagaacgattttaagcaccatcggtcgcagaaccactccagaagtccatcagaagagagagggcatagcactaggcaccataccaagggatctaggacaagtcggggccacgagaagagagaggatcaacaccagcagaagcagtcaagagaccaagagaaccactacacagatcgcgactaccggaaggagcgggattcccacagacatcgggaggcttcacaccgggactcacattggaagaggcacgaacaggaggataagccgcgcgccagggatcagagagaacggtctgatcgggtttggaaaagggaaaaggatagggaaaagtattcgcagcgcgagcaagagagagaccggcagcagaacgatcagaaccgcccttcagagaaatag

SEQ ID NO: 93970 - DNA, 1470 bp, Artificial Sequence
  derived and/or modified sequence
atgctgctgtgcatgaacatgaccgtgttcatgatgaagtgccggaaaaaggaagagaacaatcctaagctgcttctcggaaaggacaggaagccaaagtatattcacaatctgctgaaagctgttgaaattcgaaagaaagaacaagaaaaacgtatggagaagaagatccagcgggaaagggagatggagaagggggagtttgatgacaaggaggccttcgtaacctcagcctacaagaaaaagctgcaggagcgcgcagaagaagaagaaagagagaaacgcgcagccgcactggaggcctgcttggacgttacaaaacagaaagacttgagcggcttttataggcacctgctcaaccaggcagtcggcgaagaagaggttcctaagtgctcttttcgggaggccaggtcggggatcaaagaggagaagagtaggggattttcgaacgaggtttcctctaaaaatcgtattcctcaggagaaatgtattcttcagacggacgttaaggtcgaggagaaccccgacgcagatagcgatttcgatgccaagtcttccgccgacgatgagattgaagaaacgagagtgaactgccggcgggaaaaggttatcgaaactcccgagaatgacttcaagcaccacagaagtcaaaatcacagtagatcaccctccgaggaacgcggacatagtacacggcatcacaccaagggaagtcgaacctctagaggtcacgagaagcgggaagatcagcaccaacaaaagcaatcacgcgaccaagagaatcactatacagatcgcgattacaggaaagagcgcgacagccacagacaccgggaggctagccaccgggactcgcattggaaacgccacgagcaggaggacaaaccacgagcccgagaccagagagagaggtcagaccgagtatggaaacgcgagaaagacagagaaaagtatagtcaacgagagcaggaaagggatcgtcagcagaacgatcagaaccgcccctccgagaaaggagagaaggaggagaagagcaaggctaaagaggaacatatgaaggtcagaaaggagagatatgagaacaatgacaagtaccgagaccgcgaaaaacgagaggtgggagtgcaatcctcagaacgcaaccaagaccgtaaggagtccagccctaactccagagccaaggacaaattcttggaccaagaacgctctaacaaaatgagaaatatggcaaaagataaagagaggaaccaggagaaaccttccaactcagagagctctctgggagccaaacaccggctcacagaggagggccaggaaaaaggaaaggaacaggagcgcccgccagaagcggtgtctaaatttgcaaagcgtaacaatgaagaaactgtcatgtcagcaagggaccgctacttagcccgccagatggctcgggtgaacgccaaaacctatatcgaaaaagaagatgactag

SEQ ID NO: 93971 - DNA, 1062 bp, Artificial Sequence
  derived and/or modified sequence
ctgaagatgacgaaactggaaattcagaaggcgctggccgaagacgccacagtgtatgagtacgattcgatttatgacgaaatgcagaaaaagaaggaggaaaacaatccaaaactgctgctgggtaaagataggaagccaaagtacatccataatctgctcaaggcagtggagatcaggaagaaagagcaggagaagaggatggaaaagaaaattcagagggaacgggagatggaaaagggagagttcgacgacaaggaggcctttgttaccagcgcctataaaaaaaaacttcaggagcgcgctgaggaagaggagagagaaaagagagccgctgccctggaggcatgcctggatgtaaccaagcagaaagatctgagtggattttaccggcacctcctgaaccaagccgtaggtgaggaagaagtgccaaagtgttcctttcgggaggctagaagtggcatcaaagaggagaagagtcgtggcttctccaacgaggtgagctctaagaaccgaattccccaggaaaagtgcatactgcagacagatgtgaaggtggaggagaatcctgacgcggactctgattttgacgcaaagtcttccgcagacgatgaaattgaggagacacgggtgaactgccggagggaaaaagttattgaaacccctgagaatgactttaaacatcatcgaagccagaaccactcccgctcgccctccgaggagcgcggacactccactaggcaccatactaaaggatcacggaccagccgtgggcacgagaaacgcgaggaccagcaccagcagaagcagtcgagagaccaggagaatcactacacagacagagattaccggaaagagcgagacagccaccgacatcgcgaggcttcacatcgggactcacactggaagcggcacgagcaagaagacaaaccaagggctcgcgaccagcgagagagatctgatagggtgtggaaacgcgaaaaagatcgcgagaaatacagtcagagggagcaggagagggacagacagcaaaatgatcagaatcgcccttcagaaaaatag

SEQ ID NO: 93972 - DNA, 1470 bp, Artificial Sequence
  derived and/or modified sequence
atgttactttgtatgaacatgaccgtattcatgatgaagtgtcgcaagaaggaagaaaataaccccaagttactactgggaaaggaccgtaagcccaagtatatccacaatttactgaaagcagttgagatccgcaagaaagagcaagagaaaagaatggagaagaagattcagcgcgaaagggaaatggagaagggcgaattcgatgacaaagaggcatttgtgacaagtgcctacaaaaaaaagcttcaggaaagagctgaggaggaggaaagggagaagagagctgccgctctggaggcctgtctggatgttactaaacagaaggatctgtctgggttttaccggcatttgttaaatcaggccgtgggcgaggaggaggtgcctaaatgctcctttcgagaggcccgttctggaattaaagaggaaaagagtcgcggattcagcaatgaggtcagcagcaaaaaccgaattcctcaggagaaatgtatcctgcagactgatgtgaaagtcgaggaaaatccagacgccgactctgacttcgatgccaaatccagtgccgacgatgagatcgaggagacacgcgttaattgtcgacgcgagaaagtcatcgagactcccgagaatgacttcaaacaccacaggagccagaaccacagtcgatctccaagtgaagaacgcggtcactcaacgcgccaccatactaagggctcacggacgtccaggggccatgaaaagcgtgaggatcagcaccaacagaagcagagcagggaccaagagaaccattacacagatcgcgattacagaaaggaacgcgacagtcacaggcatagagaggcctctcacagggactcacactggaaacggcatgaacaagaagataagccccgagccagggatcaaagagagcggtctgatcgagtctggaaacgcgagaaagacagagaaaagtattctcaacgtgagcaggaaagggatcggcagcagaacgatcaaaacagaccttctgagaaaggcgagaaggaggaaaaatcaaaggctaaagaggaacacatgaaggtgagaaaggagcgttacgagaataatgacaagtatcgtgacagagagaaacgcgaagttggagtgcagtccagcgagcggaaccaagacaggaaagagtcgagtcccaactccagggctaaggacaagttccttgaccaggagcgttcgaataagatgcggaacatggccaaagacaaagagaggaaccaggagaaaccatctaattcagaatcgtcattgggagccaagcacaggctgacggaagaaggccaggaaaagggtaaggagcaggagcggcctcctgaggctgtaagtaagttcgctaagcggaataacgaagagactgttatgagtgcccgtgaccggtacctggccagacagatggccagagtcaatgccaaaacctacatcgaaaaggaagatgattag

SEQ ID NO: 93973 - DNA, 1062 bp, Artificial Sequence
  derived and/or modified sequence
ctgaagatgaccaagctggagatccagaaggccctggccgaggacgccaccgtgtacgagtacgacagcatctacgacgagatgcagaagaagaaggaggagaacaaccccaagctgctgctgggcaaggacagaaagcccaagtacatccacaacctgctgaaggccgtggagatcagaaagaaggagcaggagaagagaatggagaagaagatccagagagagagagagatggagaagggcgagttcgacgacaaggaggccttcgtgaccagcgcctacaagaagaagctgcaggagagagccgaggaggaggagagagagaagagagccgccgccctggaggcctgcctggacgtgaccaagcagaaggacctgagcggcttctacagacacctgctgaaccaggccgtgggcgaggaggaggtgcccaagtgcagcttcagagaggccagaagcggcatcaaggaggagaagagcagaggcttcagcaacgaggtgagcagcaagaacagaatcccccaggagaagtgcatcctgcagaccgacgtgaaggtggaggagaaccccgacgccgacagcgacttcgacgccaagagcagcgccgacgacgagatcgaggagaccagagtgaactgcagaagagagaaggtgatcgagacccccgagaacgacttcaagcaccacagaagccagaaccacagcagaagccccagcgaggagagaggccacagcaccagacaccacaccaagggcagcagaaccagcagaggccacgagaagagagaggaccagcaccagcagaagcagagcagagaccaggagaaccactacaccgacagagactacagaaaggagagagacagccacagacacagagaggccagccacagagacagccactggaagagacacgagcaggaggacaagcccagagccagagaccagagagagagaagcgacagagtgtggaagagagagaaggacagagagaagtacagccagagagagcaggagagagacagacagcagaacgaccagaacagacccagcgagaagtag

SEQ ID NO: 93974 - DNA, 1470 bp, Artificial Sequence
  derived and/or modified sequence
atgctgctgtgcatgaacatgaccgtgttcatgatgaagtgcagaaagaaggaggagaacaaccccaagctgctgctgggcaaggacagaaagcccaagtacatccacaacctgctgaaggccgtggagatcagaaagaaggagcaggagaagagaatggagaagaagatccagagagagagagagatggagaagggcgagttcgacgacaaggaggccttcgtgaccagcgcctacaagaagaagctgcaggagagagccgaggaggaggagagagagaagagagccgccgccctggaggcctgcctggacgtgaccaagcagaaggacctgagcggcttctacagacacctgctgaaccaggccgtgggcgaggaggaggtgcccaagtgcagcttcagagaggccagaagcggcatcaaggaggagaagagcagaggcttcagcaacgaggtgagcagcaagaacagaatcccccaggagaagtgcatcctgcagaccgacgtgaaggtggaggagaaccccgacgccgacagcgacttcgacgccaagagcagcgccgacgacgagatcgaggagaccagagtgaactgcagaagagagaaggtgatcgagacccccgagaacgacttcaagcaccacagaagccagaaccacagcagaagccccagcgaggagagaggccacagcaccagacaccacaccaagggcagcagaaccagcagaggccacgagaagagagaggaccagcaccagcagaagcagagcagagaccaggagaaccactacaccgacagagactacagaaaggagagagacagccacagacacagagaggccagccacagagacagccactggaagagacacgagcaggaggacaagcccagagccagagaccagagagagagaagcgacagagtgtggaagagagagaaggacagagagaagtacagccagagagagcaggagagagacagacagcagaacgaccagaacagacccagcgagaagggcgagaaggaggagaagagcaaggccaaggaggagcacatgaaggtgagaaaggagagatacgagaacaacgacaagtacagagacagagagaagagagaggtgggcgtgcagagcagcgagagaaaccaggacagaaaggagagcagccccaacagcagagccaaggacaagttcctggaccaggagagaagcaacaagatgagaaacatggccaaggacaaggagagaaaccaggagaagcccagcaacagcgagagcagcctgggcgccaagcacagactgaccgaggagggccaggagaagggcaaggagcaggagagaccccccgaggccgtgagcaagttcgccaagagaaacaacgaggagaccgtgatgagcgccagagacagatacctggccagacagatggccagagtgaacgccaagacctacatcgagaaggaggacgactag

SEQ ID NO: 93975 - protein, 492 aa, Artificial Sequence
  derived and/or modified sequence
RAQDEGGHCWGSASGRRTLRRRRAAQRCGGGARADAGPMARTTSQLYDAVPIQSSVVLCSCPSPSMVRTQTESSTPPGIPGGSRQGPAMDGTAAEPRPGAGSLQHAQPPPQPRKKRPEDFKFGKILGEGSFSTVVLARELATSREYAIKILEKRHIIKENKVPYVTRERDVMSRLDHPFFVKLYFTFQDDEKLYFGLSYAKNGELLKYIRKIGSFDETCTRFYTAEIVSALEYLHGKGIIHRDLKPENILLNEDMHIQITDFGTAKVLSPESKQARANSFVGTAQYVSPELLTEKSACKSSDLWALGCIIYQLVAGLPPFRAGNEYLIFQKIIKLEYDFPEKFFPKARDLVEKLLVLDATKRLGCEEMEGYGPLKAHPFFESVTWENLHQQTPPKLTAYLPAMSEDDEDCYGNYDNLLSQFGCMQVSSSSSSHSLSASDTGLPQRSGSNIEQYIHDLDSNSFELDLQFSEDEKRLLLEKQAGGNPCLTGRII

SEQ ID NO: 93976 - protein, 415 aa, Artificial Sequence
  derived and/or modified sequence
YDAVPIQSSVVLCSCPSPSMVRTQTESSTPPGIPGGSRQGPAMDGTAAEPRPGAGSLQHAQPPPQPRKKRPEDFKFGKILGEGSFSTVVLARELATSREYAIKILEKRHIIKENKVPYVTRERDVMSRLDHPFFVKLYFTFQDDEKLYFGLSYAKNGELLKYIRKIGSFDETCTRFYTAEIVSALEYLHGKGIIHRDLKPENILLNEDMHIQITDFGTAKVLSPESKQARANSFVGTAQYVSPELLTEKSACKSSDLWALGCIIYQLVAGLPPFRAGNEYLIFQKIIKLEYDFPEKFFPKARDLVEKLLVLDATKRLGCEEMEGYGPLKAHPFFESVTWENLHQQTPPKLTAYLPAMSEDDEDCYGNVSWPGWRARQVALGPPCTGLHARAPDPRVICSRKGRVSVPLRQACWWL

SEQ ID NO: 93977 - DNA, 1479 bp, Artificial Sequence
  derived and/or modified sequence
cgtgcgcaggacgagggcggccactgctggggctccgcctccggccgacgaacactgcgcagacgtcgcgccgcacagaggtgcggtggaggggcaagggccgacgccggaccaatggcgaggaccaccagtcaactgtacgacgcggttcccatacagagtagcgtggttctgtgctcctgcccttcacctagcatggttcggacacaaacagagagctcaacgcctccagggatccccggcggtagtcgccagggaccagccatggacgggacagccgcagaaccacggcccggcgctggcagcctgcagcatgcgcagcctccccctcaacctcgcaagaaaaggccagaggacttcaagtttggcaaaatcttgggagagggctccttttctacagttgttctcgctcgggagctggccacctcaagggagtatgcgattaaaattttagaaaaacgacatattattaaggagaacaaggtgccctatgtcacaagagagcgcgatgtcatgtctcggttggaccatcctttcttcgttaaactctactttacctttcaagatgatgaaaaactgtacttcggtctgtcctatgccaagaacggtgagctcctgaaatatatacgcaagatcggaagtttcgatgagacctgtacaaggttttacactgccgagatcgtgtcagcgctggagtacttgcatggaaaggggatcattcatcgggacctgaagccagagaatatcctccttaatgaggacatgcatatacagatcacggacttcgggactgcaaaagtcctgtcgcctgaaagcaagcaggcacgcgccaatagcttcgttggtacagctcaatacgttagcccagagcttttaactgaaaaatctgcatgcaaatcgtccgacttatgggctctgggatgcattatctatcagctggtggctggattaccacctttcagagcaggcaacgagtatctcattttccagaagattataaaactggaatacgactttcccgaaaagttctttccaaaagctcgtgatcttgttgagaaattactcgtgctggacgcgaccaagagactcggttgcgaggaaatggaagggtacggccccctgaaagctcaccccttcttcgagtcggtgacctgggagaacctgcaccagcagacacctcccaagttgaccgcctatctaccagccatgtctgaggatgatgaggactgttatggtaactacgacaacctgcttagtcagttcggttgtatgcaggtgtcttcttcatcaagctcccactccctttccgcctccgacactggactcccccaaagatcgggaagcaacattgaacagtatatccacgacttggacagcaacagcttcgaactcgacttgcaattctccgaggacgaaaagcggctcctgctagagaaacaggcgggagggaacccttgtctgacggggcgcattatttag

SEQ ID NO: 93978 - DNA, 1714 bp, Artificial Sequence
  derived and/or modified sequence
cgggcgcaggatgagggcggccattgctggggctccgcttcggggaggaggacgctgaggaggcgccgagccgcgcagcgctgcgggggaggcgcccgcgccgacgcggggcccatggccaggaccaccagccagctgtatgacgccgtgcccatccagtccagcgtggtgttatgttcctgcccatccccatcaatggtgaggacccagactgagtccagcacgccccctggcattcctggtggcagcaggcagggccccgccatggacggcactgcagccgagcctcggcccggcgccggctccctgcagcatgcccagcctccgccgcagcctcggaagaagcggcctgaggacttcaagtttgggaaaatccttggggaaggctctttttccacggttgtcctggctcgagaactggcaacctccagagaatatgcgattaaaattctggagaagcgacatatcataaaagagaacaaggtcccctatgtaaccagagagcgggatgtcatgtcgcgcctggatcaccccttctttgttaagctttacttcacatttcaggacgacgagaagctgtatttcggccttagttatgccaaaaatggagaactacttaaatatattcgcaaaatcggttcattcgatgagacctgtacccgattttacacggctgagattgtgtctgctttagagtacttgcacggcaagggcatcattcacagggaccttaaaccggaaaacattttgttaaatgaagatatgcacatccagatcacagattttggaacagcaaaagtcttatccccagagagcaaacaagccagggccaactcattcgtgggaacagcgcagtacgtttctccagagctgctcacggagaagtccgcctgtaagagttcagacctttgggctcttggatgcataatataccagcttgtggcaggactcccaccattccgagctggaaacgagtatcttatatttcagaagatcattaagttggaatatgactttccagaaaaattcttccctaaggcaagagacctcgtggagaaacttttggttttagatgccacaaagcggttaggctgtgaggaaatggaaggatacggacctcttaaagcacacccgttcttcgagtccgtcacgtgggagaacctgcaccagcagacgcctccgaagctcaccgcttacctgccggctatgtcggaagacgacgaggactgctatggcaattatgacaatctcctgagccagtttggctgcatgcaggtgtcttcgtcctcctcctcacactccctgtcagcctccgacacgggcctgccccagaggtcaggcagcaacatagagcagtacattcacgatctggactcgaactcctttgaactggacttacagttttccgaagatgagaagaggttgttgttggagaagcaggctggcggaaacccttgcctaacaggacgtattatctgatggaccccagcgggaacgcacacaagtggtgcaggaagatccaggaggtttggaggcagcgataccagagccacccggacgccgctgtgcagtgacgtggcctgcggccgggctgcccttcgctgccaggacacctgccccagcgcggcttggccgccatccgggacgcttccagaccacctgccagccatcacaaggggaacgcagaggcggaaaccttgcagcatttttattt

SEQ ID NO: 93979 - DNA, 1479 bp, Artificial Sequence
  derived and/or modified sequence
cgggcccaggatgagggcggccactgctggggcagcgccagcggccgccgcaccctgcggcggcggcgggccgcccagagatgtggcggcggggcccgggcagatgctggccccatggcccggaccaccagccagctgtatgatgctgtgcccatccagagctctgtggtgctgtgcagctgccccagccccagcatggtgaggacccagacagagagcagcaccccacctggcatccctgggggcagccggcagggccctgccatggatggaacagctgctgagcccaggcctggggccggcagcctgcagcacgcccagcccccaccccagcccaggaagaagaggcctgaggacttcaagtttgggaagatcctgggggagggcagcttcagcacagtggtgctggcccgggagctggccaccagccgggagtatgccatcaagatcctggagaagaggcacatcatcaaggagaacaaggtgccctacgtgacccgggagagagatgtgatgagccggctggaccaccccttctttgtgaagctgtacttcaccttccaggatgatgagaagctgtacttcggcctgtcctatgccaagaatggagagctgctgaagtacatcaggaagattggcagctttgatgagacctgcacccgcttctacacagctgagatcgtgtctgccctggagtacctgcacggcaagggcatcatccaccgggacctgaagccagagaacatcctgctgaatgaagacatgcacatccagatcacagactttggaacagccaaggtgctgagccctgagagcaagcaggcccgggccaacagctttgtgggcacagcccagtatgtgtccccagagctgctgacagagaagagcgcctgcaagagcagtgacctgtgggccctgggctgcatcatctaccagctggtggccggcctgccccccttccgggctggaaatgagtacctgatcttccagaagatcatcaagctggagtatgacttccctgagaagttcttccccaaggcccgggacctggtggagaagctgctggtgctggatgccaccaagaggctgggctgtgaggagatggagggctacggccccctgaaggcccaccccttctttgagagcgtgacctgggagaacctgcaccagcagaccccacccaagctgacagcctacctgcctgccatgtctgaagatgatgaggactgctacggcaactatgacaacctgctgagccagtttggctgcatgcaggtgagcagcagcagcagcagccacagcctgagcgccagtgacaccggcctgccccagaggagcggcagcaacatcgagcagtacatccatgacctggacagcaacagctttgagctggacctgcagttctctgaagatgagaagaggctgctgctggagaagcaggccggcggcaacccctgcctgaccggccgcatcatctag

SEQ ID NO: 93980 - DNA, 1479 bp, Artificial Sequence
  derived and/or modified sequence
cgggcccaggacgagggcggccactgctggggcagcgccagcggccgtcggacactgagaaggaggcgcgcggcgcagcgatgcggcggcggcgcacgggctgacgcaggccctatggcacgcactactagtcagctctacgacgccgtgccaatacagtcttcagtggttctgtgttcctgtcccagccccagtatggtgagaacacagacggagtctagcacgcccccagggattcctgggggctcacggcaagggcccgctatggacggaacagctgctgaaccccggcctggcgctggttctctgcagcacgcccagcctccccctcagcctaggaaaaaacggcctgaagacttcaagttcggcaagatcttaggggagggatctttctccaccgtcgtgctagccagagaactagccacgagtagagagtacgccatcaagatactcgagaaacgccacattattaaggaaaataaggtgccttatgtgacacgcgaacgcgacgtgatgagcagattggaccaccccttttttgttaaactctatttcacattccaagacgatgagaagctgtacttcggcctatcttacgccaagaacggcgagttgctgaaatacattagaaagataggttctttcgacgaaacttgtactcggttttacacagccgagatcgtatctgccctggaatacctacatggtaagggaataattcacagagatttgaaacctgaaaatatattgctcaatgaagatatgcacatccagatcaccgactttggcacggctaaagtgctatcccctgagtcaaagcaggcccgagccaatagcttcgtcggcacagcccagtatgtttcccctgagctgttgactgagaagtctgcctgcaagagttccgatctctgggccttagggtgcatcatctaccaattggtggccggcttgccccctttccgcgcaggaaacgaatacttgatctttcagaagataatcaaactggagtacgactttcctgaaaagttctttcctaaagcacgggaccttgttgagaagttgctggtacttgacgcaacaaaacggctgggttgtgaggaaatggaagggtatggaccactgaaagcccatccttttttcgagagtgtgacatgggaaaaccttcatcagcagactcctccaaagttgactgcttacctgcccgccatgagcgaggacgacgaagactgttacgggaactatgacaatctgctgagccaatttggatgtatgcaagtgtcatccagttcttcttctcattcactgtccgcaagtgacaccggactgccacagcggtctggtagcaatatcgaacagtatatccacgacctcgacagcaattccttcgaactggatctgcagttttccgaggacgaaaagagactgttactggaaaagcaagccggcggcaatccatgcttgacgggtcggataatttag

SEQ ID NO: 93981 - DNA, 1479 bp, Artificial Sequence
  derived and/or modified sequence
cgcgctcaggacgagggtgggcactgttggggctccgcctccggacggaggacattacggaggcgaagggcagctcagagatgtggtggcggtgcacgagccgatgctggaccaatggctcggacaactagccagttgtatgatgcggtccccatacagtcctcagtcgtgctgtgcagttgtccctccccaagcatggtgagaacccagactgaatcatctactcctcctggcattccaggaggtagtcgacaggggccagcaatggacggtacagctgccgagcccagacccggagccggttccttacagcacgctcagcctcctcctcagcctcgcaagaaaagacccgaggatttcaaattcggaaagatccttggggaggggtcctttagcaccgtcgtgctagccagagaacttgccacatctagagaatatgcaatcaaaattctagagaaacgccatatcataaaggagaataaggtaccctacgtcacaagggagagggatgtaatgtcgcggttggatcaccccttttttgtcaaactttacttcacttttcaggatgatgagaagttatactttggcctgagttacgcgaagaatggggagctgcttaagtacatccggaagattgggagcttcgacgagacgtgcacgcgtttttacacagccgagattgtcagcgcattggagtatctgcacgggaagggaatcatccatcgcgatttgaaaccagagaatatcttgcttaacgaggacatgcacatccagatcactgattttggcacggcgaaagtgctgagtcccgaatccaagcaggcacgggctaattcattcgtggggactgctcaatatgtgtctcctgaactcctcacagagaagagcgcttgtaaaagttctgatctgtgggcactgggctgcatcatctaccaattggtggctggcttacctccttttcgagctggtaatgaataccttatctttcagaaaatcatcaagttggaatatgatttccccgaaaagtttttccctaaagccagagacctggtcgaaaagttactggtgctggacgctactaaacggcttggctgcgaagagatggaagggtatggtcctttgaaagcacatccctttttcgaatctgtgacttgggaaaacctccaccaacagactcccccaaaacttacggcttacctgcctgccatgagcgaggatgacgaagattgttacggaaactatgacaacctcctgtcacagttcggttgcatgcaggtgtcctcctcatccagctcccactccctgtccgcctccgacacaggacttcctcagcgaagtgggtccaatatcgaacagtacatccatgacctggatagtaattcatttgaattagacttacagttttctgaggacgagaaacgcttgctcctggaaaaacaggcaggaggaaacccttgcttgacgggtcggataatatag

SEQ ID NO: 93982 - DNA, 1479 bp, Artificial Sequence
  derived and/or modified sequence
agagcccaggacgagggcggccactgctggggcagcgccagcggcagaagaaccctgagaagaagaagagccgcccagagatgcggcggcggcgccagagccgacgccggccccatggccagaaccaccagccagctgtacgacgccgtgcccatccagagcagcgtggtgctgtgcagctgccccagccccagcatggtgagaacccagaccgagagcagcaccccccccggcatccccggcggcagcagacagggccccgccatggacggcaccgccgccgagcccagacccggcgccggcagcctgcagcacgcccagccccccccccagcccagaaagaagagacccgaggacttcaagttcggcaagatcctgggcgagggcagcttcagcaccgtggtgctggccagagagctggccaccagcagagagtacgccatcaagatcctggagaagagacacatcatcaaggagaacaaggtgccctacgtgaccagagagagagacgtgatgagcagactggaccaccccttcttcgtgaagctgtacttcaccttccaggacgacgagaagctgtacttcggcctgagctacgccaagaacggcgagctgctgaagtacatcagaaagatcggcagcttcgacgagacctgcaccagattctacaccgccgagatcgtgagcgccctggagtacctgcacggcaagggcatcatccacagagacctgaagcccgagaacatcctgctgaacgaggacatgcacatccagatcaccgacttcggcaccgccaaggtgctgagccccgagagcaagcaggccagagccaacagcttcgtgggcaccgcccagtacgtgagccccgagctgctgaccgagaagagcgcctgcaagagcagcgacctgtgggccctgggctgcatcatctaccagctggtggccggcctgccccccttcagagccggcaacgagtacctgatcttccagaagatcatcaagctggagtacgacttccccgagaagttcttccccaaggccagagacctggtggagaagctgctggtgctggacgccaccaagagactgggctgcgaggagatggagggctacggccccctgaaggcccaccccttcttcgagagcgtgacctgggagaacctgcaccagcagaccccccccaagctgaccgcctacctgcccgccatgagcgaggacgacgaggactgctacggcaactacgacaacctgctgagccagttcggctgcatgcaggtgagcagcagcagcagcagccacagcctgagcgccagcgacaccggcctgccccagagaagcggcagcaacatcgagcagtacatccacgacctggacagcaacagcttcgagctggacctgcagttcagcgaggacgagaagagactgctgctggagaagcaggccggcggcaacccctgcctgaccggcagaatcatctag

SEQ ID NO: 93983 - DNA, 1248 bp, Artificial Sequence
  derived and/or modified sequence
tacgacgccgtgcccatccagagcagcgtggtgctgtgcagctgccccagccccagcatggtgagaacccagaccgagagcagcaccccccccggcatccccggcggcagcagacagggccccgccatggacggcaccgccgccgagcccagacccggcgccggcagcctgcagcacgcccagccccccccccagcccagaaagaagagacccgaggacttcaagttcggcaagatcctgggcgagggcagcttcagcaccgtggtgctggccagagagctggccaccagcagagagtacgccatcaagatcctggagaagagacacatcatcaaggagaacaaggtgccctacgtgaccagagagagagacgtgatgagcagactggaccaccccttcttcgtgaagctgtacttcaccttccaggacgacgagaagctgtacttcggcctgagctacgccaagaacggcgagctgctgaagtacatcagaaagatcggcagcttcgacgagacctgcaccagattctacaccgccgagatcgtgagcgccctggagtacctgcacggcaagggcatcatccacagagacctgaagcccgagaacatcctgctgaacgaggacatgcacatccagatcaccgacttcggcaccgccaaggtgctgagccccgagagcaagcaggccagagccaacagcttcgtgggcaccgcccagtacgtgagccccgagctgctgaccgagaagagcgcctgcaagagcagcgacctgtgggccctgggctgcatcatctaccagctggtggccggcctgccccccttcagagccggcaacgagtacctgatcttccagaagatcatcaagctggagtacgacttccccgagaagttcttccccaaggccagagacctggtggagaagctgctggtgctggacgccaccaagagactgggctgcgaggagatggagggctacggccccctgaaggcccaccccttcttcgagagcgtgacctgggagaacctgcaccagcagaccccccccaagctgaccgcctacctgcccgccatgagcgaggacgacgaggactgctacggcaacgtgagctggcccggctggagagccagacaggtggccctgggccccccctgcaccggcctgcacgccagagcccccgaccccagagtgatctgcagcagaaagggcagagtgagcgtgcccctgagacaggcctgctggtggctgtag

SEQ ID NO: 93984 - DNA, 1248 bp, Artificial Sequence
  derived and/or modified sequence
tacgacgcggtgccaattcagagctctgtcgttctgtgctcctgcccgagtccctccatggtgagaacccagaccgagtccagcacccccccagggatcccaggaggatctcgccagggtccggccatggatggaaccgctgccgagccgcgaccaggtgctgggtctttgcagcacgcacagccacccccccaaccaaggaaaaagcggcccgaggacttcaagtttgggaagatattgggggagggctctttctcgactgtggtactggcgagggagcttgctaccagtcgtgagtacgcaattaaaatactggagaaacggcacattatcaaggagaataaagtcccctacgttacacgagagcgcgatgtgatgtctcgcttggaccacccgtttttcgtgaagttatatttcacgttccaagacgacgagaagctctattttggactgtcctatgctaaaaacggcgagctactcaagtacattcggaagattggaagtttcgacgagacgtgcacccggttttatacagctgaaatcgtaagcgccttggagtacttacacggaaagggaattatacatcgcgacttgaagccagagaatatcttgctgaacgaggatatgcacatccagataactgactttggcacagctaaggtcttatctccggaatcaaagcaagcaagagctaacagcttcgttggtaccgcccagtacgtttcccctgagctgttaactgaaaagtcagcctgcaaatcttcagatctttgggcccttggctgtattatctatcagttggtcgccggcttgcccccatttagggccgggaacgaatatctgattttccagaagatcattaaattggaatatgactttcccgaaaagttctttcccaaggccagagacctggtcgagaagttgcttgtgctggatgcaactaagcgattagggtgtgaggaaatggaagggtacggcccactgaaagcgcatccattctttgaatcagttacatgggaaaatctgcaccaacagactcctccaaagctgactgcttatctgcccgctatgtccgaggacgacgaagactgctatggaaatgtttcctggccagggtggcgtgcacggcaggtggcgctgggcccgccatgcactgggctccacgccagagcccctgatccaagggtgatctgcagccgcaaagggcgcgtgtctgtgccattgcggcaggcctgctggtggctgtag

SEQ ID NO: 93985 - DNA, 1248 bp, Artificial Sequence
  derived and/or modified sequence
tatgatgctgtgcccatccagagctctgtggtgctgtgcagctgccccagccccagcatggtgaggacccagacagagagcagcaccccacctggcatccctgggggcagccggcagggccctgccatggatggaacagctgctgagcccaggcctggggccggcagcctgcagcacgcccagcccccaccccagcccaggaagaagaggcctgaggacttcaagtttgggaagatcctgggggagggcagcttcagcacagtggtgctggcccgggagctggccaccagccgggagtatgccatcaagatcctggagaagaggcacatcatcaaggagaacaaggtgccctacgtgacccgggagagagatgtgatgagccggctggaccaccccttctttgtgaagctgtacttcaccttccaggatgatgagaagctgtacttcggcctgtcctatgccaagaatggagagctgctgaagtacatcaggaagattggcagctttgatgagacctgcacccgcttctacacagctgagatcgtgtctgccctggagtacctgcacggcaagggcatcatccaccgggacctgaagccagagaacatcctgctgaatgaagacatgcacatccagatcacagactttggaacagccaaggtgctgagccctgagagcaagcaggcccgggccaacagctttgtgggcacagcccagtatgtgtccccagagctgctgacagagaagagcgcctgcaagagcagtgacctgtgggccctgggctgcatcatctaccagctggtggccggcctgccccccttccgggctggaaatgagtacctgatcttccagaagatcatcaagctggagtatgacttccctgagaagttcttccccaaggcccgggacctggtggagaagctgctggtgctggatgccaccaagaggctgggctgtgaggagatggagggctacggccccctgaaggcccaccccttctttgagagcgtgacctgggagaacctgcaccagcagaccccacccaagctgacagcctacctgcctgccatgtctgaagatgatgaggactgctatggaaatgtgtcctggccaggctggagggcccggcaggtggccctgggccccccctgcaccggcctgcacgcccgggccccagaccccagggtcatctgcagcaggaagggccgggtgtctgtgcccctgcggcaggcctgctggtggctgtag

SEQ ID NO: 93986 - DNA, 1248 bp, Artificial Sequence
  derived and/or modified sequence
tacgacgccgtgcccatccagagcagcgtggtgctgtgcagctgcccatctccatcaatggttaggactcagactgagagcagcaccccccccggtattcccggggggtctcggcagggccccgctatggatggaaccgcggcagaaccacgacccggcgctgggagcctgcaacatgcccagcctcccccacagccaaggaaaaaacgcccagaggatttcaagtttggaaaaattctcggcgaaggatcgttttccaccgtcgtcctggccagggagctggcgacttcccgtgaatatgcaatcaagatattagagaagcgccatattattaaagaaaataaagtgccctacgtaaccagagagcgcgatgtgatgtctcggctcgaccacccgttctttgtgaaactgtacttcacttttcaggatgacgaaaaactgtacttcggactgtcgtacgccaagaatggggaactcctgaaatatataagaaaaatcggtagtttcgatgaaacttgtacccgcttctacactgcggagatcgttagcgctttagagtatctgcacggcaaaggcatcattcacagggacttgaagcctgagaacatcctgttaaatgaggacatgcacatccagattactgatttcggaacagccaaggtcctgtcacctgagtctaagcaggcacgagctaatagctttgttggtaccgcacagtacgtgtctcctgagctgctcacagaaaagtccgcttgcaagtcctccgatttgtgggctctgggctgcataatttatcagttggtggcaggcctgccgccctttcgcgccggaaatgagtatctgatattccaaaaaattataaagctggaatacgactttcctgagaagttctttcccaaagcgagggatttagttgagaagcttctggtgctggatgcgaccaagcgtctggggtgtgaagaaatggagggctatggacctctgaaggctcacccgttcttcgaaagcgtgacttgggagaacctccaccagcagaccccaccaaaactgaccgcttatttgccagctatgagtgaagacgacgaagattgttacggaaatgttagttggcctggctggcgagcccgacaggtggcactgggacctccatgtactggactgcacgcacgggccccggatccacgcgtgatctgctccagaaaagggagggtatcagtgcctctgaggcaagcttgttggtggctatag

SEQ ID NO: 93987 - DNA, 1248 bp, Artificial Sequence
  derived and/or modified sequence
tacgatgcggtaccgatccagtcttcagttgtcctctgcagctgtccttcacccagcatggtccgcactcaaactgaatcatccacccctccgggaatacctggcggatcccgtcagggccctgctatggacggcaccgctgcagaacccaggcccggagccggatcccttcagcacgcccagcctcctccccagcccagaaaaaagagaccagaggattttaagttcggaaagatcctcggagaaggcagtttctccaccgttgtgctggcccgagagcttgcaaccagtagagaatatgccataaagatcctggagaaaaggcacataattaaggagaacaaggtcccttacgtcactcgcgaaagagatgtgatgtccagacttgatcacccgttctttgtgaaactgtatttcacctttcaggatgacgagaagctgtattttggtctgtcatacgctaagaacggggagctgttaaagtacattcgtaagatcggtagctttgacgaaacctgtacacggttctacactgccgagatcgtgtctgccttggagtaccttcatggtaaaggcataatccatcgggacctgaaaccggaaaatattcttctgaacgaggacatgcatatccaaattactgactttggaacagctaaagttctaagccccgaatctaaacaggctagagcgaattctttcgtgggcaccgcacagtatgttagtcctgagttgttgacagagaaaagcgcttgcaaatcatctgacttgtgggctctcggctgcattatttatcagctagtggccggattgccaccattcagagccggaaacgaataccttatctttcagaagatcatcaaattggaatacgattttccagaaaaattcttcccaaaagccagagacctggtggagaagctgctagtccttgatgccaccaagaggctgggatgcgaggaaatggaaggttacgggcctctcaaggcccatcccttctttgaaagcgtgacttgggagaatcttcatcagcagacgccccctaagctaactgcttaccttccagcgatgtccgaggatgatgaggattgttatgggaatgtgagctggcccggatggcgggctaggcaggtggcattggggccaccatgcactgggctccatgcccgagcacctgaccccagagtgatctgctcacgaaaggggagggtatccgttcctctgcggcaggcttgttggtggctgtag

SEQ ID NO: 93988 - DNA, 2387 bp, Artificial Sequence
  derived and/or modified sequence
gacttcaggaccctactgagagatggaatcaagagctctccggggttctttgagtggggagttgtatcggaaaccaccatcagcgcgcctgagctcgcctcgcattgttcttctgtagtgcggggggccactgccaccaccgtgaggacacgttggggtctggggagggattgttatggctgtgggtgcaccttgcacgtcttgccgacctagctttgcacgctgatcttccctccgtgcccgcttacattgttaactgggtttctgccctccctcctctccttcgtatttctgtgtctcattgacaactgttctgtagtcgctttgttgacagttgccaaactgctttccaaaaacatttccactgcaatcccggtttttggtgccagccgcagtggtgtgagtacgctcgctttattatagtcttgccagcactgggcgtctctgtgtattgtaaacacatgcgatcatcactcttatctctccatcccccccacaattaaagatgtgccgtgctatctctgctcaggttaccttggccttgggatgagttggctggaggctcaggcagcgcgagggacaggaggagggcgaggcgctgcctggtggattagcggggagccatggcacgggcaggactcaggagaggaggccggcagctcacagcagaccgcggggctcagctggcctgccctgtgcttggggtttgtttttgagcgttgaaatgaggtccttaaaccttagtccgtgcattgagagcaaggcagctgccttgagccttacttccttttcctctttgtcgcctagtatgacgccgtgcccatccagtccagcgtggtgttatgttcctgcccatccccatcaatggtgaggacccagactgagtccagcacgccccctggcattcctggtggcagcaggcagggccccgccatggacggcactgcagccgagcctcggcccggcgccggctccctgcagcatgcccagcctccgccgcagcctcggaagaagcggcctgaggacttcaagtttgggaaaattcttggggaaggctctttttccacggttgtcctggctcgagaactggcaacctccagagaatatgcgattaaaattctggagaagcgacatatcataaaagagaacaaggtcccctatgtaaccagagagcgggatgtcatgtcgcgcctggatcaccccttctttgttaagctttacttcacatttcaggacgacgagaagctgtatttcggccttagttatgccaaaaatggagaactacttaaatatattcgcaaaatcggttcattcgatgagacctgtacccgattttacacggctgagattgtgtctgctttagagtacttgcacggcaagggcatcattcacagggaccttaaaccggaaaacattttgttaaatgaagatatgcacatccagatcacagattttggaacagcaaaagtcttatccccagagagcaaacaagccagggccaactcattcgtgggaacagcgcagtacgtttctccagagctgctcacggagaagtccgcctgtaagagttcagacctttgggctcttggatgcataatataccagcttgtggcaggactcccaccattccgagctggaaacgagtatcttatatttcagaagatcattaagttggaatatgactttccagaaaaattcttccctaaggcaagagacctcgtggagaaacttttggttttagatgccacaaagcggttaggctgtgaggaaatggaaggatacggacctcttaaagcacacccgttcttcgagtccgtcacgtgggagaacctgcaccagcagacgcctccgaagctcaccgcttacctgccggctatgtcggaagacgacgaggactgctatggcaatgtaagctggccgggatggcgggcgaggcaggtggcactgggtcctccgtgcactgggcttcatgcccgtgcgccagacccacgtgtgatttgtagccgaaaggggagggtgtctgtgccactgcggcaggcctgctggtggttgtagtctttgctgccgtgaggcagtggcgggtgaggtgctgggtgggtcattttctcctcatttccgtggccgtggacaggctagtgagtttccacccacagggtgccgctagaaccggacgccgagcacccccggcactggccccggggtcccacgtacggggcctcctgcccggcctgtcgcatctgcgcttggcttggtgcttgtacaactgtgcggccaagatgctccagaacactgcctgtctttccacagaaacccccgagtgttgtgtgcttgaacttttgggacgtggcgttggtggggacactggtaccttcttcagtgctgagtag

SEQ ID NO: 93989 - DNA, 327 bp, Artificial Sequence
  derived and/or modified sequence
atggagatcttggcatacctagcatacgagactgtcgcccagctggttgacctcgctctgcttgtgagacaggacatggtgaccaaggccggggatccgtttagccatgccatttcggccacattcatccagtaccacaatagcgctgaatcaactgcagcctgcggtgttgaggcccacagcgacgccatccagccatgccatattagagaggcaatcagacgctactctcatcggatcggccccctgagcccttttaccatctcattttccctgaccgaatgcctcccccaagaatgggacggttttagcagtttgttgatgtag

SEQ ID NO: 93990 - DNA, 327 bp, Artificial Sequence
  derived and/or modified sequence
atggagatcctggcctacctggcctatgaaacagtggcccagctggtggacctggccctgctggtgcggcaggacatggtgaccaaggccggggaccccttcagccacgccatcagcgccaccttcatccagtaccacaacagcgctgagagcacagctgcctgtggggtggaggcccacagtgatgccatccagccctgccacatccgggaggccatccgccgctacagccaccgcatcggccccctgagccccttcaccatctccttcagcctgacagagtgcctgccccaggagtgggatggcttcagcagcctgctgatgtag

SEQ ID NO: 93991 - DNA, 327 bp, Artificial Sequence
  derived and/or modified sequence
atggagatcctggcctacctggcctacgagaccgtggcccagctggtggatttagcactcctagtgcggcaggacatggtgacaaaagcaggcgaccctttttcacacgctatttcagctacctttattcaatatcacaacagcgctgagtccactgccgcatgtggcgtcgaagcccacagcgatgccattcagccatgccatatcagggaggctatccgcaggtacagccatcgcatcgggcccctgtcgcccttcactatctctttcagcctcacagagtgtctgccgcaagagtgggatggcttttcttccctgctgatgtag

SEQ ID NO: 93992 - DNA, 728 bp, Artificial Sequence
  derived and/or modified sequence
ggggcattatggctgcctctgttgccccacgcaggtcgccagggaagtgggggaaagccagcagccgcaggcctcacccagctcccatgcagcccacagcccgaaaggccggtctcactccaccatgccctctgcccgtaacagcaccaactttatttccaggcagctggtgagcagggctgagaactttccccaggctaccggcttcctagctgagaaagcaagcctactcacagttcctctgcgtcccacagagcctgcagtggtgatccacctccttcaagggccaaaaaagcttccaaatttcgagactggttggactgcagcagtatggagataaaacccaatgttgtcgcaatggaaatcttagcatatttagcgtatgaaactgtggcacagttagtggatctggctcttcttgtgaggcaagacatggtaaccaaggcaggggaccccttcagccatgccatttctgcaaccttcattcagtatcacaactctgctgagagcactgcagcctgtggtgttgaggctcacagcgatgccatccagccctgccacatcagagaggccattcgacgctacagccacaggattggcccactttccccattcacaatttctttttctttgacagaatgcctaccgcaggaatgggatggcttttctagcctgctgatgtgacaactgtgatgtgcctgcaacaacaggaaaggcaatgttatatt

SEQ ID NO: 93993 - DNA, 327 bp, Artificial Sequence
  derived and/or modified sequence
atggaaatactagcatatcttgcttatgaaactgttgcacagctggttgatctggctctactcgtgcggcaggacatggtgactaaagccggagatccgttctcccacgcaatcagcgcgacctttatacagtatcataactctgctgagtcgactgcagcttgcggcgtggaagcacattcagacgcgattcaaccatgccacatccgagaggcaattcgtaggtactcacaccgcatcggcccactgagtccttttactatctccttctccctgacggaatgtcttccccaggaatgggatgggttctcctccctgctcatgtag

SEQ ID NO: 93994 - DNA, 327 bp, Artificial Sequence
  derived and/or modified sequence
atggagatcctggcctacctggcctacgagaccgtggcccagctggtggacctggccctgctggtgagacaggacatggtgaccaaggccggcgaccccttcagccacgccatcagcgccaccttcatccagtaccacaacagcgccgagagcaccgccgcctgcggcgtggaggcccacagcgacgccatccagccctgccacatcagagaggccatcagaagatacagccacagaatcggccccctgagccccttcaccatcagcttcagcctgaccgagtgcctgccccaggagtgggacggcttcagcagcctgctgatgtag

SEQ ID NO: 93995 - protein, 1021 aa, Artificial Sequence
  derived and/or modified sequence
MALKMVKGSIDRMFDKNLQDLVRGIRNHKEDEAKYISQCIDEIKQELKQDNIAVKANAVCKLTYLQMLGYDISWAAFNIIEVMSASKFTFKRIGYLAASQSFHEGTDVIMLTTNQIRKDLSSPSQYDTGVALTGLSCFVTPDLARDLANDIMTLMSHTKPYIRKKAVLIMYKVFLKYPESLRPAFPRLKEKLEDPDPGVQSAAVNVICELARRNPKNYLSLAPLFFKLMTSSTNNWVLIKIIKLFGALTPLEPRLGKKLIEPLTNLIHSTSAMSLLYECVNTVIAVLISLSSGMPNHSASIQLCVQKLRILIEDSDQNLKYLGLLAMSKILKTHPKSVQSHKDLILQCLDDKDESIRLRALDLLYGMVSKKNLMEIVKKLMTHVDKAEGTTYRDELLTKIIDICSQSNYQYITNFEWYISILVELTRLEGTRHGHLIAAQMLDVAIRVKAIRKFAVSQMSALLDSAHLLASSTQRNGICEVLYAAAWICGEFSEHLQEPHHTLEAMLRPRVTTLPGHIQAVYVQNVVKLYASILQQKEQAGEAEGAQAVTQLMVDRLPQFVQSADLEVQERASCILQLVKHIQKLQAKDVPVAEEVSALFAGELNPVAPKAQKKVPVPEGLDLDAWINEPLSDSESEDERPRAVFHEEEQRRPKHRPSEADEEELARRREARKQEQANNPFYIKSSPSPQKRYQDTPGVEHIPVVQIDLSVPLKVPGLPMSDQYVKLEEERRHRQKLEKDKRRKKRKEKEERTKGKKKSKKQPPGSEEAAGEPVQNGAPEEEQLPPESSYSLLAENSYVKMTCDIRGSLQEDSQVTVAIVLENRSSSILKGMELSVLDSLNARMARPQGSSVHDGVPVPFQLPPGVSNEAQYVFTIQSIVMAQKLKGTLSFIAKNDEGATHEKLDFRLHFSCSSYLITTPCYSDAFAKLLESGDLSMSSIKVDGIRMSFQNLLAKICFHHHFSVVERVDSCASMYSRSIQGHHVCLLVKKGENSVSVDGKCSDSTLLSNLLEEMKATLAKC

SEQ ID NO: 93996 - protein, 1215 aa, Artificial Sequence
  derived and/or modified sequence
MALKMVKGSIDRMFDKNLQDLVRGIRNHKEDEAKYISQCIDEIKQELKQDNIAVKANAVCKLTYLQMLGYDISWAAFNIIEVMSASKFTFKRIGYLAASQSFHEGTDVIMLTTNQIRKDLSSPSQYDTGVALTGLSCFVTPDLARDLANDIMTLMSHTKPYIRKKAVLIMYKVFLKYPESLRPAFPRLKEKLEDPDPGVQSAAVNVICELARRNPKNYLSLAPLFFKLMTSSTNNWVLIKIIKLFGALTPLEPRLGKKLIEPLTNLIHSTSAMSLLYECVNTVIAVLISLSSGMPNHSASIQLCVQKLRILIEDSDQNLKYLGLLAMSKILKTHPKSVQSHKDLILQCLDDKDESIRLRALDLLYGMVSKKNLMEIVKKLMTHVDKAEGTTYRDELLTKIIDICSQSNYQYITNFEWYISILVELTRLEGTRHGHLIAAQMLDVAIRVKAIRKFAVSQMSALLDSAHLLASSTQRNGICEVLYAAAWICGEFSEHLQEPHHTLEAMLRPRVTTLPGHIQAVYVQNVVKLYASILQQKEQAGEAEGAQAVTQLMVDRLPQFVQSADLEVQERASCILQLVKHIQKLQAKDVPVAEEVSALFAGELNPVAPKAQKKVPVPEGLDLDAWINEPLSDSESEDERPRAVFHEEEQRRPKHRPSEADEEELARRREARKQEQANNPFYIKSSPSPQKRYQDTPGVEHIPVVQIDLSVPLKVPGLPMSDQYVKLEEERRHRQKLEKDKRRKKRKEKEKKGKRRHSSLPTESDEDIAPAQQVDIVTEEMPENALPSDEDDKDPNDPYRALDIDLDKPLADSEKLPIQKHRNTETSKSPEKDVPMVEKKSKKPKKKEKKHKEKERDKEKKKEKEKKAEDLDFWLSTTPPPAPAPAPAPVPSTGELSVNTVTTPKDECEDAKTEAQGEEDDAEGQDQDKKSPKPKKKKHRKEKEERTKGKKKSKKQPPGSEEAAGEPVQNGAPEEEQLPPESSYSLLAENSYVKMTCDIRGSLQEDSQVTVAIVLENRSSSILKGMELSVLDSLNARMARPQGSSVHDGVPVPFQLPPGVSNEAQYVFTIQSIVMAQKLKGTLSFIAKNDEGATHEKLDFRLHFSCSSYLITTPCYSDAFAKLLESGDLSMSSIKVDGIRMSFQNLLAKICFHHHFSVVERVDSCASMYSRSIQGHHVCLLVKKGENSVSVDGKCSDSTLLSNLLEEMKATLAKC

SEQ ID NO: 93997 - DNA, 3066 bp, Artificial Sequence
  derived and/or modified sequence
atggccctgaagatggtgaagggcagcatcgacagaatgttcgacaagaacctgcaggacctggtgagaggcatcagaaaccacaaggaggacgaggccaagtacatcagccagtgcatcgacgagatcaagcaggagctgaagcaggacaacatcgccgtgaaggccaacgccgtgtgcaagctgacctacctgcagatgctgggctacgacatcagctgggccgccttcaacatcatcgaggtgatgagcgccagcaagttcaccttcaagagaatcggctacctggccgccagccagagcttccacgagggcaccgacgtgatcatgctgaccaccaaccagatcagaaaggacctgagcagccccagccagtacgacaccggcgtggccctgaccggcctgagctgcttcgtgacccccgacctggccagagacctggccaacgacatcatgaccctgatgagccacaccaagccctacatcagaaagaaggccgtgctgatcatgtacaaggtgttcctgaagtaccccgagagcctgagacccgccttccccagactgaaggagaagctggaggaccccgaccccggcgtgcagagcgccgccgtgaacgtgatctgcgagctggccagaagaaaccccaagaactacctgagcctggcccccctgttcttcaagctgatgaccagcagcaccaacaactgggtgctgatcaagatcatcaagctgttcggcgccctgacccccctggagcccagactgggcaagaagctgatcgagcccctgaccaacctgatccacagcaccagcgccatgagcctgctgtacgagtgcgtgaacaccgtgatcgccgtgctgatcagcctgagcagcggcatgcccaaccacagcgccagcatccagctgtgcgtgcagaagctgagaatcctgatcgaggacagcgaccagaacctgaagtacctgggcctgctggccatgagcaagatcctgaagacccaccccaagagcgtgcagagccacaaggacctgatcctgcagtgcctggacgacaaggacgagagcatcagactgagagccctggacctgctgtacggcatggtgagcaagaagaacctgatggagatcgtgaagaagctgatgacccacgtggacaaggccgagggcaccacctacagagacgagctgctgaccaagatcatcgacatctgcagccagagcaactaccagtacatcaccaacttcgagtggtacatcagcatcctggtggagctgaccagactggagggcaccagacacggccacctgatcgccgcccagatgctggacgtggccatcagagtgaaggccatcagaaagttcgccgtgagccagatgagcgccctgctggacagcgcccacctgctggccagcagcacccagagaaacggcatctgcgaggtgctgtacgccgccgcctggatctgcggcgagttcagcgagcacctgcaggagccccaccacaccctggaggccatgctgagacccagagtgaccaccctgcccggccacatccaggccgtgtacgtgcagaacgtggtgaagctgtacgccagcatcctgcagcagaaggagcaggccggcgaggccgagggcgcccaggccgtgacccagctgatggtggacagactgccccagttcgtgcagagcgccgacctggaggtgcaggagagagccagctgcatcctgcagctggtgaagcacatccagaagctgcaggccaaggacgtgcccgtggccgaggaggtgagcgccctgttcgccggcgagctgaaccccgtggcccccaaggcccagaagaaggtgcccgtgcccgagggcctggacctggacgcctggatcaacgagcccctgagcgacagcgagagcgaggacgagagacccagagccgtgttccacgaggaggagcagagaagacccaagcacagacccagcgaggccgacgaggaggagctggccagaagaagagaggccagaaagcaggagcaggccaacaaccccttctacatcaagagcagccccagcccccagaagagataccaggacacccccggcgtggagcacatccccgtggtgcagatcgacctgagcgtgcccctgaaggtgcccggcctgcccatgagcgaccagtacgtgaagctggaggaggagagaagacacagacagaagctggagaaggacaagagaagaaagaagagaaaggagaaggaggagagaaccaagggcaagaagaagagcaagaagcagccccccggcagcgaggaggccgccggcgagcccgtgcagaacggcgcccccgaggaggagcagctgccccccgagagcagctacagcctgctggccgagaacagctacgtgaagatgacctgcgacatcagaggcagcctgcaggaggacagccaggtgaccgtggccatcgtgctggagaacagaagcagcagcatcctgaagggcatggagctgagcgtgctggacagcctgaacgccagaatggccagaccccagggcagcagcgtgcacgacggcgtgcccgtgcccttccagctgccccccggcgtgagcaacgaggcccagtacgtgttcaccatccagagcatcgtgatggcccagaagctgaagggcaccctgagcttcatcgccaagaacgacgagggcgccacccacgagaagctggacttcagactgcacttcagctgcagcagctacctgatcaccaccccctgctacagcgacgccttcgccaagctgctggagagcggcgacctgagcatgagcagcatcaaggtggacggcatcagaatgagcttccagaacctgctggccaagatctgcttccaccaccacttcagcgtggtggagagagtggacagctgcgccagcatgtacagcagaagcatccagggccaccacgtgtgcctgctggtgaagaagggcgagaacagcgtgagcgtggacggcaagtgcagcgacagcaccctgctgagcaacctgctggaggagatgaaggccaccctggccaagtgctag

SEQ ID NO: 93998 - DNA, 3648 bp, Artificial Sequence
  derived and/or modified sequence
atggccctgaagatggtgaagggcagcatcgacagaatgttcgacaagaacctgcaggacctggtgagaggcatcagaaaccacaaggaggacgaggccaagtacatcagccagtgcatcgacgagatcaagcaggagctgaagcaggacaacatcgccgtgaaggccaacgccgtgtgcaagctgacctacctgcagatgctgggctacgacatcagctgggccgccttcaacatcatcgaggtgatgagcgccagcaagttcaccttcaagagaatcggctacctggccgccagccagagcttccacgagggcaccgacgtgatcatgctgaccaccaaccagatcagaaaggacctgagcagccccagccagtacgacaccggcgtggccctgaccggcctgagctgcttcgtgacccccgacctggccagagacctggccaacgacatcatgaccctgatgagccacaccaagccctacatcagaaagaaggccgtgctgatcatgtacaaggtgttcctgaagtaccccgagagcctgagacccgccttccccagactgaaggagaagctggaggaccccgaccccggcgtgcagagcgccgccgtgaacgtgatctgcgagctggccagaagaaaccccaagaactacctgagcctggcccccctgttcttcaagctgatgaccagcagcaccaacaactgggtgctgatcaagatcatcaagctgttcggcgccctgacccccctggagcccagactgggcaagaagctgatcgagcccctgaccaacctgatccacagcaccagcgccatgagcctgctgtacgagtgcgtgaacaccgtgatcgccgtgctgatcagcctgagcagcggcatgcccaaccacagcgccagcatccagctgtgcgtgcagaagctgagaatcctgatcgaggacagcgaccagaacctgaagtacctgggcctgctggccatgagcaagatcctgaagacccaccccaagagcgtgcagagccacaaggacctgatcctgcagtgcctggacgacaaggacgagagcatcagactgagagccctggacctgctgtacggcatggtgagcaagaagaacctgatggagatcgtgaagaagctgatgacccacgtggacaaggccgagggcaccacctacagagacgagctgctgaccaagatcatcgacatctgcagccagagcaactaccagtacatcaccaacttcgagtggtacatcagcatcctggtggagctgaccagactggagggcaccagacacggccacctgatcgccgcccagatgctggacgtggccatcagagtgaaggccatcagaaagttcgccgtgagccagatgagcgccctgctggacagcgcccacctgctggccagcagcacccagagaaacggcatctgcgaggtgctgtacgccgccgcctggatctgcggcgagttcagcgagcacctgcaggagccccaccacaccctggaggccatgctgagacccagagtgaccaccctgcccggccacatccaggccgtgtacgtgcagaacgtggtgaagctgtacgccagcatcctgcagcagaaggagcaggccggcgaggccgagggcgcccaggccgtgacccagctgatggtggacagactgccccagttcgtgcagagcgccgacctggaggtgcaggagagagccagctgcatcctgcagctggtgaagcacatccagaagctgcaggccaaggacgtgcccgtggccgaggaggtgagcgccctgttcgccggcgagctgaaccccgtggcccccaaggcccagaagaaggtgcccgtgcccgagggcctggacctggacgcctggatcaacgagcccctgagcgacagcgagagcgaggacgagagacccagagccgtgttccacgaggaggagcagagaagacccaagcacagacccagcgaggccgacgaggaggagctggccagaagaagagaggccagaaagcaggagcaggccaacaaccccttctacatcaagagcagccccagcccccagaagagataccaggacacccccggcgtggagcacatccccgtggtgcagatcgacctgagcgtgcccctgaaggtgcccggcctgcccatgagcgaccagtacgtgaagctggaggaggagagaagacacagacagaagctggagaaggacaagagaagaaagaagagaaaggagaaggagaagaagggcaagagaagacacagcagcctgcccaccgagagcgacgaggacatcgcccccgcccagcaggtggacatcgtgaccgaggagatgcccgagaacgccctgcccagcgacgaggacgacaaggaccccaacgacccctacagagccctggacatcgacctggacaagcccctggccgacagcgagaagctgcccatccagaagcacagaaacaccgagaccagcaagagccccgagaaggacgtgcccatggtggagaagaagagcaagaagcccaagaagaaggagaagaagcacaaggagaaggagagagacaaggagaagaagaaggagaaggagaagaaggccgaggacctggacttctggctgagcaccacccccccccccgcccccgcccccgcccccgcccccgtgcccagcaccggcgagctgagcgtgaacaccgtgaccacccccaaggacgagtgcgaggacgccaagaccgaggcccagggcgaggaggacgacgccgagggccaggaccaggacaagaagagccccaagcccaagaagaagaagcacagaaaggagaaggaggagagaaccaagggcaagaagaagagcaagaagcagccccccggcagcgaggaggccgccggcgagcccgtgcagaacggcgcccccgaggaggagcagctgccccccgagagcagctacagcctgctggccgagaacagctacgtgaagatgacctgcgacatcagaggcagcctgcaggaggacagccaggtgaccgtggccatcgtgctggagaacagaagcagcagcatcctgaagggcatggagctgagcgtgctggacagcctgaacgccagaatggccagaccccagggcagcagcgtgcacgacggcgtgcccgtgcccttccagctgccccccggcgtgagcaacgaggcccagtacgtgttcaccatccagagcatcgtgatggcccagaagctgaagggcaccctgagcttcatcgccaagaacgacgagggcgccacccacgagaagctggacttcagactgcacttcagctgcagcagctacctgatcaccaccccctgctacagcgacgccttcgccaagctgctggagagcggcgacctgagcatgagcagcatcaaggtggacggcatcagaatgagcttccagaacctgctggccaagatctgcttccaccaccacttcagcgtggtggagagagtggacagctgcgccagcatgtacagcagaagcatccagggccaccacgtgtgcctgctggtgaagaagggcgagaacagcgtgagcgtggacggcaagtgcagcgacagcaccctgctgagcaacctgctggaggagatgaaggccaccctggccaagtgctag

SEQ ID NO: 93999 - DNA, 3066 bp, Artificial Sequence
  derived and/or modified sequence
atggcactaaaaatggttaaaggaagcattgaccgaatgttcgacaaaaacctgcaggatctggttcgtggaattaggaaccacaaggaggatgaagccaagtatatcagccagtgcattgacgaaataaagcaggaacttaagcaggacaacattgcggtgaaggccaatgcagtctgcaagcttacatacttgcaaatgttagggtatgatatctcttgggcagcgttcaatattatcgaagtcatgtcagcctctaagtttacttttaaaaggattgggtacctagctgcatctcaaagttttcacgagggcacagatgtgattatgttgaccacaaaccagattaggaaggacttgtcttccccatcgcagtatgacacaggggtggccctcacaggcttgagctgtttcgtgacacccgacttagctagagacctggcgaatgatatcatgacactgatgagccataccaagccttacatcaggaaaaaggctgtcctaattatgtacaaagtctttttgaaatatcctgaatccctgcgccccgcattcccaaggttgaaagaaaagctggaagatcccgatccaggcgtgcagtccgctgctgtgaacgttatttgtgagctcgcccgcaggaatcctaagaactacctgtcactggcaccactgtttttcaagctgatgaccagctccactaataactgggtgctgatcaaaattattaagctgttcggtgccttaacacccctggagcctcgactcggcaaaaaactgattgaaccccttaccaatctgattcactcgacatctgcgatgagtctgctctacgaatgtgttaacacagttatagccgtgttgatttccctgagttcagggatgccaaatcattcggcttcaatccagctgtgtgtccagaagctccgcattttaatcgaggattccgaccagaatctaaagtatctggggctgctagctatgtctaaaatcttaaagactcacccaaaatccgtccagagtcataaggatcttatactgcagtgccttgacgacaaggacgaaagcattaggctcagagcgctggacctgttgtacggcatggtgagcaaaaagaacctcatggagatcgtgaaaaagctaatgacgcacgttgacaaggccgagggaacaacataccgtgacgagttgttaacaaagattatagatatttgttcccagtcgaattaccagtatatcacgaattttgagtggtatataagcattctcgtagagctgactaggctggagggcacaaggcacggccatctcatcgccgcccaaatgttggacgtggccatccgcgtcaaagctatccgtaagtttgctgtcagtcagatgtctgccctgctggattctgctcacctcttagcttcatccacccagaggaatggaatatgcgaagtgctgtacgctgccgcgtggatctgcggagagttttctgagcacctgcaggagcctcaccacaccctcgaggcaatgctacgccctcgcgtgactacccttccaggacatattcaggctgtttacgtccagaatgtggtcaagctgtatgcctccatcctccagcagaaggagcaggctggcgaggcggagggggctcaggccgttacccaacttatggtggatcgcctgccccaattcgtacagagcgctgaccttgaagtgcaggagagagccagttgtatcctccagctcgttaaacacatccagaaactgcaggctaaggacgtgcccgtcgcagaggaagtatccgctttatttgcaggcgagcttaaccctgtggccccaaaggcccagaagaaggtgccagtgccggaaggattagacctggatgcctggatcaacgagccactctcggactccgagtctgaagatgagcgaccccgggccgtgttccacgaggaagaacagcgccgcccaaagcatagaccgtcagaggcagacgaagaggagttagcgagacggcgagaagcaaggaaacaggaacaagccaacaacccattctatataaaatcaagccccagtcctcagaagcgctatcaggacactcccggcgtggaacacatccccgtcgtgcagatcgatctcagtgtgcctttgaaagtgcctgggctcccgatgtccgatcagtacgtgaagctggaagaggagaggcgccacagacagaagctggaaaaggataagagaagaaaaaaacggaaggaaaaagaagagaggacaaagggcaaaaagaaaagcaagaagcagcctcccggttccgaggaggctgcaggtgaaccagtccagaatggtgccccggaggaagagcagctgccacccgagtcctcgtattccctgttggctgagaactcttacgtcaaaatgacctgcgacatacgaggatcattacaggaagatagccaggttacagtggccattgtcctggagaaccgctcttctagtatcctcaagggaatggaattgagcgttctggactcgctcaatgcgagaatggcacgcccccagggctcttcagtgcacgatggcgtgccagttccatttcagctgcctcccggggtttctaatgaagctcagtatgtatttactatccaatctatcgtcatggcccaaaaactaaaggggacacttagctttatcgccaaaaacgacgaaggcgcaacccacgaaaagctggactttcgcttgcatttctcctgtagcagctacctaatcacaacaccttgttacagtgacgctttcgctaaactgctagagtccggcgatctctcaatgtctagtattaaagttgacggcattcggatgtcctttcagaacctgcttgcaaagatctgcttccaccatcattttagcgtcgttgagagggtagactcttgtgccagcatgtattcgcgttcaattcagggtcaccacgtatgtttgctggttaagaagggcgagaatagtgtgtccgttgatggaaaatgttcggattccaccctgttatcaaacctgctggaagaaatgaaggccacattagcaaagtgttag

SEQ ID NO: 94000 - DNA, 3648 bp, Artificial Sequence
  derived and/or modified sequence
atggctctgaagatggtcaagggatcaattgataggatgttcgataagaacttacaggaccttgtgcgaggaattcgcaatcataaagaagacgaggcaaagtatatttcccagtgcattgatgaaatcaagcaagaattaaagcaggacaatatcgctgtaaaagcgaatgcagtctgtaagctcacttacctccagatgctcgggtatgacatcagctgggcggctttcaatatcatcgaggtgatgagcgcatcaaaattcaccttcaagcgcatcggctatttggcggcatcccagtccttccacgagggcaccgatgtcatcatgctcaccaccaatcagatccgcaaggacctctcttctccttctcagtacgatacaggcgtggctcttacaggactgagttgctttgttacaccagatctggcccgcgatctggcaaacgacataatgacgctcatgtcccacactaaaccatacattcgcaagaaggcggtgcttattatgtataaagtgttcctgaaataccccgagtccttacggccggcattccctagactcaaggaaaagctggaagatccagatcctggtgtccagagcgccgccgtgaacgtcatctgcgaattagctagacgaaatccaaaaaactacctgtccctggcaccgcttttcttcaagctcatgacgtcctctacaaataactgggttctcataaagataattaaactgtttggagccctgactcccttagagccccgactgggtaagaaattgatcgagcccctgacaaacctgatacatagcactagtgcgatgtcactcctgtatgagtgcgtgaacacagtaattgcagtcttaatcagtttgtctagcggtatgcccaatcattccgcctctattcagctatgcgttcagaagctcagaatccttatcgaagactccgaccagaatctcaagtatctagggctcctggccatgtccaagattcttaagacacaccctaaaagtgtgcagtctcataaggacctcatactgcaatgcctggacgataaggacgagtccataagattgcgcgcacttgacctgctgtacgggatggtgagtaagaagaaccttatggagatagtgaagaaactgatgacccatgtggacaaagccgaggggaccacatacagggacgaactcttaaccaagataatcgacatctgctcacagagcaactaccaatacattaccaattttgaatggtacattagcattcttgtggagctcaccaggctggagggtacacggcacggccatctgattgctgcccagatgctcgacgtggccatccgagtcaaggcgatcaggaaattcgctgtctcgcaaatgtctgccctacttgattctgcccatctactcgcaagctccacccagcgaaacggcatatgcgaggttctgtatgccgcagcatggatttgtggcgagttttctgaacacctccaagagccgcatcacacccttgaagctatgctaaggcctagggtgaccacactgccgggccacatccaggccgtgtacgtgcagaacgtcgtgaaactgtatgcaagcatcctgcagcagaaggaacaggccggggaggcagaaggcgcacaagccgtgactcaattgatggtggaccgccttccgcagttcgtccagagtgctgatcttgaggtacaggagcgagcttcctgtattctgcagctggtgaaacacatccaaaagctgcaggcaaaggatgtgccggtagcagaggaagtctcggctctgttcgccggagaactgaatcccgtggccccaaaagctcaaaaaaaagtgccagttccagagggactggacctcgacgcatggattaacgagcctctgagtgatagtgaatcagaggacgagcgccctcgggcggtgttccatgaagaggaacagcggaggcccaagcaccggccgagtgaagccgatgaagaggagcttgcccgccgaagggaggctcggaaacaggagcaagccaataatccattttatattaaatcgagtccttcaccgcaaaaacggtaccaggacacacctggcgtggaacatataccggtggtgcagattgatctgtccgtgcctctgaaggtcccaggcctgccaatgagcgaccagtatgtcaagctagaagaggagcgtagacataggcagaagttggagaaagataagagaagaaaaaaaagaaaggaaaaagaaaagaaaggaaagcgtcggcattcatctttgcccacagagtccgatgaagatatcgcccctgctcagcaggtggatatcgtgacggaggagatgcccgaaaacgctctccctagcgatgaagacgataaggatcccaacgacccatatagggcgttggatatcgatctcgacaagccgctggccgattcagaaaagctccccattcagaagcatcgcaacacagagaccagtaaaagccctgaaaaggatgtgccgatggtggagaaaaagagcaagaagccaaagaagaaggaaaagaagcataaggagaaagaacgcgataaggagaaaaagaaagaaaaagaaaagaaagcggaagatctagatttctggttgtcaactacgcccccgccagctcctgctccggcccctgcacccgtcccaagcaccggggaactgagcgtaaacaccgtgaccacaccgaaggacgagtgcgaggatgccaaaactgaagcacagggcgaagaagacgatgcagaggggcaagaccaggacaagaaaagtccaaagcctaagaaaaaaaaacaccgaaaggagaaagaggagcggaccaaaggaaagaagaaatccaagaaacagcctcctggttccgaggaagcagccggggaacccgttcagaacggagcccctgaggaggagcagctacctcccgaaagttcctactctttgctggctgagaactcatatgtgaaaatgacctgtgatattagagggtctctgcaggaggactcccaggtgaccgtggcaatcgtcctggaaaatcggagctctagtattctgaagggcatggagctgtcagtcctagatagcttgaatgctagaatggcccggccccagggcagctcagtgcacgatggcgtccccgtgccgtttcaacttcctcctggggtaagcaacgaagcgcagtacgtctttaccatacagagcatcgtcatggcccagaagctcaagggaacactgtcttttatcgcgaaaaatgatgagggagcaacccatgagaagttggactttcgactccacttttcctgcagcagttacctcatcaccaccccctgctactcagatgcttttgcgaaactgcttgagtcgggagacctctccatgagttcaattaaggtggacgggatccggatgagcttccagaatttgttagccaaaatctgcttccatcatcatttctcagtggtcgaacgggtggacagttgtgcatccatgtattccaggtctatacaaggccaccacgtatgcttgcttgtcaaaaaaggcgagaatagtgtgagcgtggacggaaaatgctccgacagcacactcttatctaacttactagaagagatgaaggccacactcgccaaatgctag

SEQ ID NO: 94001 - DNA, 4449 bp, Artificial Sequence
  derived and/or modified sequence
ggggcccggagcgggatcgcggcacctgccgagcgggtcgccgcctctgccgcggtccttggaccccgccgccgccctggcctgggagcttgccccgccgcagcggccggcagcgcggcgctccgcgggcggcaggcacgggccccgggccccctcacggcgcccagccgcgggcctcccgaggcaaaagcccgtgggccgccgcgatggccctcaagatggtgaagggcagcatcgaccgcatgttcgacaagaatctgcaggacttggtccgcggcatccgtaaccacaaggaggacgaggcaaaatacatatctcagtgcattgatgagatcaagcaggagctgaagcaggacaacatagcggtgaaggcgaacgcggtctgcaagctgacgtatttacagatgttgggatacgacatcagctgggccgccttcaacatcatagaagtgatgagtgcctccaagttcaccttcaagcgaattggctacctcgctgcttcccagagctttcacgaaggcaccgacgtcatcatgctgaccaccaatcagatccgtaaggacttgagcagccccagccagtacgacacaggtgttgcactgacgggtctgtcctgcttcgtcaccccagaccttgccagagacctggcaaatgacatcatgacactgatgtcacacaccaagccctacatcaggaagaaggctgtgctgatcatgtacaaggtgttcctgaagtaccccgagtcgctgcgccctgcctttccccggctgaaggagaagctggaggaccccgaccccggggttcagtcggctgccgtcaatgtcatctgcgagctggccagacgcaaccctaagaactacctgtccctggccccgctctttttcaagctgatgacgtcctccaccaacaactgggtcctcatcaagatcatcaagctgttcggtgctcttactcctttggaaccgcggctgggcaagaagctgatcgagcccctcaccaatctcatccacagcacgtctgccatgtctctcctctatgaatgtgtgaacaccgtgattgcagtgctcatctcgctgtcctccggcatgcccaaccacagcgccagcatccagctttgtgttcagaaattaaggatattgatcgaggactccgatcagaacttgaagtacctggggctgctggcaatgtccaagatcctgaagacccaccccaagtccgtgcagtcccacaaggacctcatcctgcagtgcctggacgacaaggacgagtccatccggctgcgggccctggacctgctctatgggatggtgtccaagaagaacctgatggagatcgtgaagaagctgatgacccacgtagacaaggcagagggtaccacctaccgtgacgagctgctcaccaagatcattgacatctgcagccagtccaactaccagtacatcaccaacttcgagtggtacatcagcatcctggtggagctgacccggctggagggcacacggcacggccacctcatcgccgcccaaatgctggacgtggccatccgcgtgaaggccatccgcaagttcgccgtgtcccagatgtctgcgctgcttgacagtgcacacctgctggccagcagcacccagcggaacgggatctgtgaggtgctgtacgctgccgcctggatctgcggggagttctcagagcatctgcaggaaccacaccacactttggaggccatgctgcggcccagagtcaccacgctgccaggccacatccaggccgtgtatgtgcagaacgtggtcaagctctacgcctccatcctgcagcagaaggagcaggccggggaggcagagggcgctcaggccgtcacccagctcatggtggaccggctgccccagtttgtgcagagcgcagacctggaggtgcaggagcgggcgtcctgcatcctgcagctggtcaagcacatccagaagcttcaggccaaggacgtgcctgtggcagaggaggtcagcgctctctttgctggggagctgaacccagtggcccccaaggcccagaagaaggttccagtccccgaaggcctggacctggacgcctggatcaatgagccactctcggacagcgagtcagaggacgagaggcccagggccgtcttccacgaggaggagcagcggcgtcccaagcaccggccgtcggaggcggacgaggaagagctggctcggcgccgagaggcccggaagcaggagcaggccaacaaccccttctacatcaagagctcgccatcgccacagaagcggtaccaggacaccccgggcgtggagcacattcccgtggtgcagattgacctctccgtccccttgaaggttccagggctgcctatgtcagatcagtatgtgaagctggaggaggagcggcggcaccggcagaagctggagaaggacaagaggaggaaaaagaggaaggagaaggaggagcggaccaaaggcaagaagaagtccaagaagcagcctccaggcagcgaggaggcagcgggggagccggtgcagaatggcgcgccagaggaggagcagctcccgcctgagtccagctactccctcctcgctgaaaattcctatgttaaaatgacctgtgacatccggggcagtctgcaggaggacagccaggtcactgtggccatcgtgctggagaacaggagcagcagcatcctcaagggcatggagctcagcgtgctggactcactcaatgccaggatggcccggccgcagggctcctccgtccacgatggcgtccccgtgcctttccagctgcccccaggcgtctccaacgaagcccagtatgtgttcaccatccagagcatcgtcatggcgcagaagctcaaggggaccctgtccttcattgccaagaatgacgagggtgcgacccacgagaagctggacttcaggctgcacttcagctgcagctcctacttgatcaccactccctgctacagtgacgcctttgctaagttgctggagtctggggacttgagcatgagctcaatcaaagtcgatggcattcggatgtccttccagaatcttctggcgaagatctgttttcaccaccatttttccgttgtggagcgagtggactcctgcgcctccatgtacagccgctccatccagggccaccatgtctgcctcctggtgaaaaagggtgagaactctgtctcagtcgacgggaagtgcagtgactccacgctactgagcaacttgttagaagagatgaaggcgacgctggccaagtgttgagagctgcctgcgagccccgcaccaccccgcggagcacgtacccagggaccgcagccctgacgtgtctcgcctctcctcagtcgtgtgtactgtacccaagcctgagtgttaatttaactctatgttgtccgccgtgtagacatccgaggtcatttgttgcgttgaattatctgaccatccttttttactgtgactcttcccattctctttggcaagaagtccccttctcgcccccaaaccagcaagggactcccccacctgggtctgtgccctgccccgcgctgggggccgagtccttgaatgtggcttcaggggctcctgtcctgggccagggcctgatgggcaccacgtgaggggcacttggtggacagggcggggctgacgtggcctcctctggggtcgcctgcttttgacccaaaggtcctgacggttgcgtccgggggaggggaaggaagggccgctgtcgccaaggttttctctcccagaacccacagtgggaaagcggtcttgccaggcgttgtccattgtcagtgtgctcgtgggctggtgactgggtcttgggatcccaggccacgcgccagccaggctgtgggcagggcggggccagggacgccaaagagaggttgcagtcagaaccgtggacggggtgggttgaggcctctctgccacccgtcttcctggtcagcagaagtgcatctcggcttgggtttggggtggtccgcatcccctgcttgccactatgcgcaccaaggtttccccacatccttcccagcacccttaggaaggcccaggcagggcctggaagcagcggacctgggctgttctgtgttgaaggagtgtgcccagtgcccttgggcaggacctgtgagagccacctcacaggcagagcccccaccaggcagggcaaggagactccgctcactccccacggccagcgtgggcacaggactgacccttcttcagagataatgacattttatcttctccttttgatgaaaactgtcactttagcatgtaatccattacagaatcccatgcagtgattccaggatttgaaattgtatgatgtgttacataagaatttatttgctatcgacattcccgtataaagagagagacatatcacgctgctgtcatgattttgtgtcaagatgatccaataaagttgtaaaacagg

SEQ ID NO: 94002 - DNA, 5031 bp, Artificial Sequence
  derived and/or modified sequence
ggggcccggagcgggatcgcggcacctgccgagcgggtcgccgcctctgccgcggtccttggaccccgccgccgccctggcctgggagcttgccccgccgcagcggccggcagcgcggcgctccgcgggcggcaggcacgggccccgggccccctcacggcgcccagccgcgggcctcccgaggcaaaagcccgtgggccgccgcgatggccctcaagatggtgaagggcagcatcgaccgcatgttcgacaagaatctgcaggacttggtccgcggcatccgtaaccacaaggaggacgaggcaaaatacatatctcagtgcattgatgagatcaagcaggagctgaagcaggacaacatagcggtgaaggcgaacgcggtctgcaagctgacgtatttacagatgttgggatacgacatcagctgggccgccttcaacatcatagaagtgatgagtgcctccaagttcaccttcaagcgaattggctacctcgctgcttcccagagctttcacgaaggcaccgacgtcatcatgctgaccaccaatcagatccgtaaggacttgagcagccccagccagtacgacacaggtgttgcactgacgggtctgtcctgcttcgtcaccccagaccttgccagagacctggcaaatgacatcatgacactgatgtcacacaccaagccctacatcaggaagaaggctgtgctgatcatgtacaaggtgttcctgaagtaccccgagtcgctgcgccctgcctttccccggctgaaggagaagctggaggaccccgaccccggggttcagtcggctgccgtcaatgtcatctgcgagctggccagacgcaaccctaagaactacctgtccctggccccgctctttttcaagctgatgacgtcctccaccaacaactgggtcctcatcaagatcatcaagctgttcggtgctcttactcctttggaaccgcggctgggcaagaagctgatcgagcccctcaccaatctcatccacagcacgtctgccatgtctctcctctatgaatgtgtgaacaccgtgattgcagtgctcatctcgctgtcctccggcatgcccaaccacagcgccagcatccagctttgtgttcagaaattaaggatattgatcgaggactccgatcagaacttgaagtacctggggctgctggcaatgtccaagatcctgaagacccaccccaagtccgtgcagtcccacaaggacctcatcctgcagtgcctggacgacaaggacgagtccatccggctgcgggccctggacctgctctatgggatggtgtccaagaagaacctgatggagatcgtgaagaagctgatgacccacgtagacaaggcagagggtaccacctaccgtgacgagctgctcaccaagatcattgacatctgcagccagtccaactaccagtacatcaccaacttcgagtggtacatcagcatcctggtggagctgacccggctggagggcacacggcacggccacctcatcgccgcccaaatgctggacgtggccatccgcgtgaaggccatccgcaagttcgccgtgtcccagatgtctgcgctgcttgacagtgcacacctgctggccagcagcacccagcggaacgggatctgtgaggtgctgtacgctgccgcctggatctgcggggagttctcagagcatctgcaggaaccacaccacactttggaggccatgctgcggcccagagtcaccacgctgccaggccacatccaggccgtgtatgtgcagaacgtggtcaagctctacgcctccatcctgcagcagaaggagcaggccggggaggcagagggcgctcaggccgtcacccagctcatggtggaccggctgccccagtttgtgcagagcgcagacctggaggtgcaggagcgggcgtcctgcatcctgcagctggtcaagcacatccagaagcttcaggccaaggacgtgcctgtggcagaggaggtcagcgctctctttgctggggagctgaacccagtggcccccaaggcccagaagaaggttccagtccccgaaggcctggacctggacgcctggatcaatgagccactctcggacagcgagtcagaggacgagaggcccagggccgtcttccacgaggaggagcagcggcgtcccaagcaccggccgtcggaggcggacgaggaagagctggctcggcgccgagaggcccggaagcaggagcaggccaacaaccccttctacatcaagagctcgccatcgccacagaagcggtaccaggacaccccgggcgtggagcacattcccgtggtgcagattgacctctccgtccccttgaaggttccagggctgcctatgtcagatcagtatgtgaagctggaggaggagcggcggcaccggcagaagctggagaaggacaagaggaggaaaaagaggaaggagaaggagaagaagggcaagcgccgccacagctcgctgcccacggagagcgacgaggacatcgcccctgcccagcaggtggacatcgtcacagaggagatgcctgagaatgctctgcccagcgacgaggatgacaaagaccccaacgacccctacagggctctggatattgacctggataagcccttagccgacagcgagaaactgcctattcagaaacacagaaacaccgagacctcaaaatcccctgagaaggacgttcccatggtagaaaagaagagcaagaaacccaagaagaaagagaaaaaacacaaagagaaagagagagacaaggagaagaagaaggagaaggagaagaaggctgaggacctggacttctggctgtctaccaccccaccgcctgcccccgcccccgcccccgcccccgttccatccacgggggagctcagtgtgaacactgtcactaccccgaaggacgagtgtgaggacgccaagacggaggcgcagggcgaggaggacgatgccgaggggcaagaccaggacaagaaatctcccaagcctaagaagaagaagcacaggaaggagaaggaggagcggaccaaaggcaagaagaagtccaagaagcagcctccaggcagcgaggaggcagcgggggagccggtgcagaatggcgcgccagaggaggagcagctcccgcctgagtccagctactccctcctcgctgaaaattcctatgttaaaatgacctgtgacatccggggcagtctgcaggaggacagccaggtcactgtggccatcgtgctggagaacaggagcagcagcatcctcaagggcatggagctcagcgtgctggactcactcaatgccaggatggcccggccgcagggctcctccgtccacgatggcgtccccgtgcctttccagctgcccccaggcgtctccaacgaagcccagtatgtgttcaccatccagagcatcgtcatggcgcagaagctcaaggggaccctgtccttcattgccaagaatgacgagggtgcgacccacgagaagctggacttcaggctgcacttcagctgcagctcctacttgatcaccactccctgctacagtgacgcctttgctaagttgctggagtctggggacttgagcatgagctcaatcaaagtcgatggcattcggatgtccttccagaatcttctggcgaagatctgttttcaccaccatttttccgttgtggagcgagtggactcctgcgcctccatgtacagccgctccatccagggccaccatgtctgcctcctggtgaaaaagggtgagaactctgtctcagtcgacgggaagtgcagtgactccacgctactgagcaacttgttagaagagatgaaggcgacgctggccaagtgttgagagctgcctgcgagccccgcaccaccccgcggagcacgtacccagggaccgcagccctgacgtgtctcgcctctcctcagtcgtgtgtactgtacccaagcctgagtgttaatttaactctatgttgtccgccgtgtagacatccgaggtcatttgttgcgttgaattatctgaccatccttttttactgtgactcttcccattctctttggcaagaagtccccttctcgcccccaaaccagcaagggactcccccacctgggtctgtgccctgccccgcgctgggggccgagtccttgaatgtggcttcaggggctcctgtcctgggccagggcctgatgggcaccacgtgaggggcacttggtggacagggcggggctgacgtggcctcctctggggtcgcctgcttttgacccaaaggtcctgacggttgcgtccgggggaggggaaggaagggccgctgtcgccaaggttttctctcccagaacccacagtgggaaagcggtcttgccaggcgttgtccattgtcagtgtgctcgtgggctggtgactgggtcttgggatcccaggccacgcgccagccaggctgtgggcagggcggggccagggacgccaaagagaggttgcagtcagaaccgtggacggggtgggttgaggcctctctgccacccgtcttcctggtcagcagaagtgcatctcggcttgggtttggggtggtccgcatcccctgcttgccactatgcgcaccaaggtttccccacatccttcccagcacccttaggaaggcccaggcagggcctggaagcagcggacctgggctgttctgtgttgaaggagtgtgcccagtgcccttgggcaggacctgtgagagccacctcacaggcagagcccccaccaggcagggcaaggagactccgctcactccccacggccagcgtgggcacaggactgacccttcttcagagataatgacattttatcttctccttttgatgaaaactgtcactttagcatgtaatccattacagaatcccatgcagtgattccaggatttgaaattgtatgatgtgttacataagaatttatttgctatcgacattcccgtataaagagagagacatatcacgctgctgtcatgattttgtgtcaagatgatccaataaagttgtaaaacagg

SEQ ID NO: 94003 - DNA, 3066 bp, Artificial Sequence
  derived and/or modified sequence
atggccctgaagatggtgaagggcagcattgacaggatgtttgacaagaacctgcaggacctggtgcggggcatccggaaccacaaggaggatgaggccaagtacatcagccagtgcattgatgagatcaagcaggagctgaagcaggacaacattgctgtgaaggccaatgctgtgtgcaagctgacctacctgcagatgctgggctatgacatctcctgggccgccttcaacatcatcgaggtgatgtctgccagcaagttcaccttcaagagaattggctacctggccgccagccagagcttccacgagggcacagatgtgatcatgctgaccaccaaccagatcaggaaggacctgagcagccccagccagtatgacaccggggtggccctgaccggcctgagctgctttgtgaccccagacctggcccgggacctggccaatgacatcatgaccctgatgagccacaccaagccctacatcaggaagaaggctgtgctgatcatgtacaaggtgttcctgaagtacccagagagcctgcggcctgccttcccccggctgaaggagaagctggaggaccctgaccccggggtgcagagcgctgctgtgaatgtcatctgtgagctggcccggaggaaccccaagaactacctgagcctggcccccctcttcttcaagctgatgaccagcagcaccaacaactgggtgctgatcaagatcatcaagctgtttggagccctgacccccctggagccccggctgggcaagaagctgattgagcccctgaccaacctgatccacagcaccagcgccatgagcctgctgtatgaatgtgtgaacacagtgattgctgtgctgatcagcctgagcagcggcatgcccaaccacagcgccagcatccagctgtgtgtgcagaagctgcgcatcctgattgaagattctgaccagaacctgaagtacctgggcctgctggccatgagcaagatcctgaagacccaccccaagtctgtgcagagccacaaggacctgatcctgcagtgcctggatgacaaggatgagagcatccggctgcgggccctggacctgctgtatggcatggtgtccaagaagaacctgatggagatcgtgaagaagctgatgacccacgtggacaaggccgagggcaccacctacagagatgagctgctgaccaagatcatcgacatctgcagccagagcaactaccagtacatcaccaactttgagtggtacatcagcatcctggtggagctgacccggctggagggcaccaggcatggccacctgattgctgcccagatgctggatgtggccatccgggtgaaggccatcaggaagtttgctgtgtcccagatgtctgccctgctggacagcgcccacctgctggccagcagcacccagagaaatggcatctgtgaggtgctgtatgctgctgcctggatctgtggggagttcagcgagcacctgcaggagccccaccacaccctggaggccatgctgcggccccgggtgaccaccctgcccggccacatccaggccgtgtatgtgcagaatgtggtgaagctgtatgccagcatcctgcagcagaaggagcaggccggggaggccgagggcgcccaggccgtgacccagctgatggtggaccggctgccccagtttgtgcagagcgctgacctggaggtgcaggagcgggccagctgcatcctgcagctggtgaagcacatccagaagctgcaggccaaggatgtgcctgtggccgaggaggtgtctgccctgtttgctggggagctgaaccctgtggcccccaaggcccagaagaaggtgcctgtgcctgagggcctggacctggatgcctggatcaatgagcccctgagtgacagcgagagtgaagatgagcggcccagggctgtgttccacgaggaggagcagaggcggcccaagcaccggcccagcgaggctgatgaggaggagctggcccggcggcgggaggccaggaagcaggagcaggccaacaaccccttctacatcaagagcagccccagcccccagaagcgctaccaggacaccccaggagtggagcacatccctgtggtgcagattgacctgtctgtgcccctgaaggtgcccggcctgcccatgtctgaccagtatgtgaagctggaggaggagaggaggcaccggcagaagctggagaaggacaagaggaggaagaagaggaaggagaaggaggagaggaccaagggcaagaagaagagcaagaagcagcccccaggcagcgaggaggccgccggggagcctgtgcagaatggagcccctgaggaggagcagctgcccccagagagcagctacagcctgctggctgaaaattcctatgtgaagatgacctgtgacatccggggcagcctgcaggaggacagccaggtgacagtggccatcgtgctggagaacagaagcagcagcatcctgaagggcatggagctgtctgtgctggacagcctgaatgccaggatggcccggccccagggcagctctgtgcatgatggagtgcctgtgcccttccagctgcccccaggagtgtccaatgaggcccagtatgtgttcaccatccagagcatcgtgatggcccagaagctgaagggcaccctgtccttcatcgccaagaatgatgagggcgccacccatgagaagctggacttccggctgcacttcagctgcagcagctacctgatcaccaccccctgctacagtgatgcctttgccaagctgctggagagcggggacctgtccatgagcagcatcaaggtggatggcatccgcatgtccttccagaacctgctggccaagatctgcttccaccaccacttctctgtggtggagcgggtggacagctgtgcctccatgtacagccgcagcatccagggccaccacgtgtgcctgctggtgaagaagggggagaacagcgtgtctgtggatggcaagtgcagcgacagcaccctgctgagcaacctgctggaggagatgaaggccaccctggccaagtgctag

SEQ ID NO: 94004 - DNA, 3648 bp, Artificial Sequence
  derived and/or modified sequence
atggccctgaagatggtgaagggcagcattgacaggatgtttgacaagaacctgcaggacctggtgcggggcatccggaaccacaaggaggatgaggccaagtacatcagccagtgcattgatgagatcaagcaggagctgaagcaggacaacattgctgtgaaggccaatgctgtgtgcaagctgacctacctgcagatgctgggctatgacatctcctgggccgccttcaacatcatcgaggtgatgtctgccagcaagttcaccttcaagagaattggctacctggccgccagccagagcttccacgagggcacagatgtgatcatgctgaccaccaaccagatcaggaaggacctgagcagccccagccagtatgacaccggggtggccctgaccggcctgagctgctttgtgaccccagacctggcccgggacctggccaatgacatcatgaccctgatgagccacaccaagccctacatcaggaagaaggctgtgctgatcatgtacaaggtgttcctgaagtacccagagagcctgcggcctgccttcccccggctgaaggagaagctggaggaccctgaccccggggtgcagagcgctgctgtgaatgtcatctgtgagctggcccggaggaaccccaagaactacctgagcctggcccccctcttcttcaagctgatgaccagcagcaccaacaactgggtgctgatcaagatcatcaagctgtttggagccctgacccccctggagccccggctgggcaagaagctgattgagcccctgaccaacctgatccacagcaccagcgccatgagcctgctgtatgaatgtgtgaacacagtgattgctgtgctgatcagcctgagcagcggcatgcccaaccacagcgccagcatccagctgtgtgtgcagaagctgcgcatcctgattgaagattctgaccagaacctgaagtacctgggcctgctggccatgagcaagatcctgaagacccaccccaagtctgtgcagagccacaaggacctgatcctgcagtgcctggatgacaaggatgagagcatccggctgcgggccctggacctgctgtatggcatggtgtccaagaagaacctgatggagatcgtgaagaagctgatgacccacgtggacaaggccgagggcaccacctacagagatgagctgctgaccaagatcatcgacatctgcagccagagcaactaccagtacatcaccaactttgagtggtacatcagcatcctggtggagctgacccggctggagggcaccaggcatggccacctgattgctgcccagatgctggatgtggccatccgggtgaaggccatcaggaagtttgctgtgtcccagatgtctgccctgctggacagcgcccacctgctggccagcagcacccagagaaatggcatctgtgaggtgctgtatgctgctgcctggatctgtggggagttcagcgagcacctgcaggagccccaccacaccctggaggccatgctgcggccccgggtgaccaccctgcccggccacatccaggccgtgtatgtgcagaatgtggtgaagctgtatgccagcatcctgcagcagaaggagcaggccggggaggccgagggcgcccaggccgtgacccagctgatggtggaccggctgccccagtttgtgcagagcgctgacctggaggtgcaggagcgggccagctgcatcctgcagctggtgaagcacatccagaagctgcaggccaaggatgtgcctgtggccgaggaggtgtctgccctgtttgctggggagctgaaccctgtggcccccaaggcccagaagaaggtgcctgtgcctgagggcctggacctggatgcctggatcaatgagcccctgagtgacagcgagagtgaagatgagcggcccagggctgtgttccacgaggaggagcagaggcggcccaagcaccggcccagcgaggctgatgaggaggagctggcccggcggcgggaggccaggaagcaggagcaggccaacaaccccttctacatcaagagcagccccagcccccagaagcgctaccaggacaccccaggagtggagcacatccctgtggtgcagattgacctgtctgtgcccctgaaggtgcccggcctgcccatgtctgaccagtatgtgaagctggaggaggagaggaggcaccggcagaagctggagaaggacaagaggaggaagaagaggaaggagaaggagaagaagggcaagagaagacacagcagcctgcccacagaaagtgatgaggacatcgccccagcccagcaggtggacatcgtgacagaggagatgccagaaaatgccctgcccagtgatgaagatgacaaggaccccaatgacccctaccgggccctggacatcgacctggacaagcccctggccgacagcgagaagctgcccatccagaagcacaggaacacagagaccagcaagagccctgagaaggatgtgcccatggtggagaagaagagcaagaagcccaagaagaaggagaagaagcacaaggagaaggagcgggacaaggagaagaagaaggagaaggagaagaaggccgaggacctggacttctggctgagcaccaccccacctccagccccagccccagccccagcccctgtgcccagcactggagagctgtctgtgaacacagtgaccacccccaaggatgaatgtgaagatgccaagacagaggcccagggcgaggaggatgatgctgagggccaggaccaggacaagaagagccccaagcccaagaagaagaagcacaggaaggagaaggaggagaggaccaagggcaagaagaagagcaagaagcagcccccaggcagcgaggaggccgccggggagcctgtgcagaatggagcccctgaggaggagcagctgcccccagagagcagctacagcctgctggctgaaaattcctatgtgaagatgacctgtgacatccggggcagcctgcaggaggacagccaggtgacagtggccatcgtgctggagaacagaagcagcagcatcctgaagggcatggagctgtctgtgctggacagcctgaatgccaggatggcccggccccagggcagctctgtgcatgatggagtgcctgtgcccttccagctgcccccaggagtgtccaatgaggcccagtatgtgttcaccatccagagcatcgtgatggcccagaagctgaagggcaccctgtccttcatcgccaagaatgatgagggcgccacccatgagaagctggacttccggctgcacttcagctgcagcagctacctgatcaccaccccctgctacagtgatgcctttgccaagctgctggagagcggggacctgtccatgagcagcatcaaggtggatggcatccgcatgtccttccagaacctgctggccaagatctgcttccaccaccacttctctgtggtggagcgggtggacagctgtgcctccatgtacagccgcagcatccagggccaccacgtgtgcctgctggtgaagaagggggagaacagcgtgtctgtggatggcaagtgcagcgacagcaccctgctgagcaacctgctggaggagatgaaggccaccctggccaagtgctag

SEQ ID NO: 94005 - DNA, 3066 bp, Artificial Sequence
  derived and/or modified sequence
atggccctgaagatggtgaagggcagcatcgaccggatgttcgacaaaaacctccaggacttggtgagaggtatacgtaaccataaagaagatgaggcgaaatatatttcccagtgtattgatgagatcaaacaggaactgaagcaggataacattgcagtcaaagctaatgctgtgtgcaagctgacctatctacaaatgctcggctatgatattagctgggctgcctttaatatcatagaagtgatgtcggcctccaagtttacgtttaaaagaatcggctatcttgccgcctcacaatctttccatgagggcaccgacgttataatgctcaccactaaccaaatccgcaaggatctgtcttccccaagtcaatacgataccggcgtcgcactcaccggactcagttgcttcgtaacgccagacctcgcccgtgacctcgcaaatgatatcatgaccctcatgtcccacacaaagccgtatattcgaaaaaaagctgtactgatcatgtataaggtattcttgaagtacccagaatctctgagaccagccttcccaaggttaaaggagaagctggaggaccccgaccccggcgtccaaagcgccgcagttaatgtgatttgcgaactagcacgacgcaacccaaagaactacctgtcgctcgcaccgcttttttttaagctgatgacttctagcacaaacaattgggttcttatcaaaatcatcaagctctttggcgccctcacaccactcgaaccacgcttgggtaagaaactcatcgagccgttgacaaacctcattcacagcacctccgctatgtccctcttgtatgagtgcgtcaacactgtcattgctgtactgatatccctgtcttccggtatgccaaaccactctgcttcaatccaactatgtgtgcagaagctgcgcatcctaatcgaggattcagatcagaacctgaaatacctggggttattggcaatgtccaagatcctgaagacacatccaaaaagcgtgcaatcccataaggacctcattctgcagtgccttgatgataaggatgaaagcattcggctgcgcgctctcgacctgctttacggtatggtgagcaagaaaaacctaatggagatcgtcaagaagctgatgacccatgtagataaggctgagggaactacttatcgcgatgaactgctcacgaaaatcatcgacatttgtagtcaatccaactaccagtacatcaccaactttgagtggtacatctctatcctggtggagttaacccggcttgaaggaacccgacacggtcacctgatcgctgcccagatgctggacgtagcaatccgagtgaaggcaatacggaagttcgcggtttctcaaatgtctgcccttctggattctgcccatctgctggcttcctcaacgcagcgcaatgggatatgtgaagtactttatgcagcagcctggatctgcggcgagttttccgaacatcttcaggagcctcaccatacactcgaggcgatgctgcgtccccgtgtgacgacgcttccaggtcatatccaagcagtgtatgttcagaatgtggtgaaattgtatgcgagtatcctacaacagaaagagcaggcgggcgaggccgagggggcccaggcagtaacccagctcatggtggatcggctcccccaattcgtccagagcgccgaccttgaggtccaggagagagctagctgtatacttcagcttgtgaagcacatacaaaagctgcaggctaaggacgtgcccgtggccgaggaagtcagtgccctattcgcgggggaactgaaccctgttgcgccaaaggcacagaagaaagtgcccgtaccagaggggctggaccttgacgcctggattaatgaaccgctgagtgacagcgaatctgaggatgaacgaccacgagctgtattccacgaagaggagcaacgcagacctaaacatcgcccctccgaggctgacgaggaagagcttgcacgccggcgcgaggctaggaaacaagaacaagctaacaatccattctacatcaaaagcagtccaagcccacagaaacgatatcaagatacgcctggcgtggagcatattccagtggtgcagatcgacttatctgtcccgcttaaggtgcccgggctgcccatgtccgaccagtacgtcaaacttgaggaggaacggcgacacagacagaagctggaaaaagacaagagaaggaagaaacgcaaagaaaaggaggaaaggaccaaagggaaaaagaagagcaagaaacaacccccagggtccgaggaggcagctggcgagccagtgcagaatggcgcaccagaggaggaacagctgcctcctgagtcctcctacagcttgctcgccgaaaatagctacgttaagatgacatgtgatatccgtggatccctgcaggaagattctcaagtgacggtggccattgtgctcgaaaatcgaagttccagcatcttaaaaggcatggagttgtccgtgctcgacagcctgaatgcccgcatggctcggccacaggggagtagtgtccacgacggggtgcctgttccgtttcaactgcctccaggggtctccaatgaggcgcaatacgtgttcaccatccagagcatcgtgatggcacagaaattgaagggtactctgagcttcatcgcgaagaacgacgagggagccacccatgagaagcttgactttcggctgcacttctcttgctcttcctatctgataactaccccctgttattctgatgcctttgccaagctcctcgaatctggcgatctgagtatgagttcaatcaaagttgacggcattcgcatgtcctttcaaaatctgctggccaagatctgctttcaccaccacttctccgtagtggagagggtggatagctgtgcttcaatgtatagtcgcagtatccaggggcaccatgtttgtcttctagtgaagaagggagaaaattctgtgagcgtggatgggaaatgcagtgatagcaccttactgtcaaatctgctggaggagatgaaagcgacgctggcaaagtgctag

SEQ ID NO: 94006 - DNA, 3648 bp, Artificial Sequence
  derived and/or modified sequence
atggccctgaagatggtgaagggcagcatcgaccggatgttcgacaagaacctacaggacctagtcaggggtattcgaaaccacaaggaggacgaggctaagtacatatcccaatgcatagacgaaatcaagcaggaattaaaacaggacaatatcgccgtgaaggcaaatgccgtgtgtaagctcacctacctgcaaatgctggggtatgatatcagctgggcggctttcaatattatcgaggttatgagcgcttccaagttcacattcaagcgaatcggatacctagccgccagccagagtttccacgaaggcaccgatgtgatcatgcttaccacgaatcagattcgaaaggacttatcttctccaagccaatatgataccggagtcgcactgaccggcctcagttgcttcgtgacacctgatctggcacgcgacctcgcaaatgatatcatgacactgatgagccatacgaaaccttacatcagaaaaaaagccgtgctgatcatgtacaaagtgtttctcaaatatccagaatcactgcgcccggcctttcctcgtctcaaggaaaagcttgaggacccagaccccggcgtgcagtctgctgctgtcaatgttatctgcgagctggcaaggcgcaatccaaagaactatctctctctggccccactgtttttcaaactgatgacctcaagtactaacaattgggtgttaataaagatcatcaagctgtttggcgccctcacaccattggaaccacgtctggggaagaagctgattgagcccttaaccaacctgatacactcaacaagtgccatgagcttgctgtatgagtgtgtgaacacagtcattgccgtgctgatctctctgagctccggtatgcccaaccactctgcgtccatacagctttgtgtgcaaaagctgaggattctgatcgaagattcagaccagaatctcaaatatttagggctattggcaatgtctaagatcctgaagacccatcctaagagtgtgcaatcacacaaagatcttatcctacagtgcctggacgataaggacgaatctataagattgagggccctggacctcctgtacggaatggtgagtaagaagaatcttatggaaattgtgaagaaactcatgactcacgtagacaaggccgaaggcacaacctaccgtgatgaactcttgacaaaaatcattgacatttgttcacagagcaattaccagtacatcacaaacttcgagtggtatattagtatcctcgtggaactgacccggctagagggaacaagacacgggcatcttatcgctgcgcagatgctcgacgttgccatcagagtgaaagccataaggaagttcgccgttagtcagatgagcgctcttctggatagtgctcatttgctggcgtcttccacacagagaaacggcatttgtgaggtgctgtacgcagctgcctggatttgtggggaattcagtgaacatctgcaggagccgcatcacaccctggaagcaatgcttcgaccacgggtcactactctgcctggacatattcaggccgtgtacgtccagaacgtcgtcaagctctatgcatctatcctgcagcagaaggagcaggctggcgaggctgaaggagcccaggccgtcactcagctgatggtagacagactgcctcaatttgtgcagtccgcggatcttgaagtgcaggagcgcgcttcatgcattctacagcttgtgaagcatatacaaaagttgcaagctaaagatgtaccagtcgctgaggaggtaagtgcattgttcgccggggaattgaatcccgttgcaccaaaagcacagaagaaggtacctgtgccggagggcttagacttggatgcgtggattaatgaaccgctgagcgacagtgagtctgaagatgagcgccctagagcagtttttcacgaagaggagcaacgtagaccaaaacatcgtcccagcgaagctgacgaggaagagttggcacgcagacgcgaagcaaggaagcaagaacaggctaacaacccattctatatcaagtcttcgccttctccacagaagagatatcaggacacacccggggtggagcacattcccgtagtccagattgacttatccgtgcctttgaaggtgccggggctcccaatgtctgatcaatatgtaaagctggaggaggagcgccgtcaccggcaaaagctggagaaggataagcgcagaaagaaacgtaaagaaaaggagaagaaaggaaagcgcaggcacagttccctgcctacagaatccgatgaggacatcgcccccgcccagcaagtggacatagtaaccgaggaaatgcccgaaaacgcccttccttccgacgaggacgataaagatcccaacgacccctatcgtgctctcgatatagacctggataaaccattagctgactcagagaagttaccgatacagaaacatagaaataccgaaaccagtaaaagccctgaaaaggatgtccccatggtagagaaaaagtctaagaaacccaaaaaaaaggagaaaaagcataaagagaaggagagggacaaagagaaaaaaaaggagaaggaaaagaaggcagaagacctggatttttggctgtctacaacaccgcccccagcgcctgcccctgcgccagccccagtcccaagcacgggcgagctgagcgttaatacggtgacaacccccaaggacgaatgcgaagacgccaaaacggaggctcaaggtgaagaagacgatgcagagggccaggaccaagacaaaaaaagcccgaaacccaaaaagaaaaaacatcgtaaggagaaagaagagagaaccaaagggaaaaagaagtcgaaaaaacagccccccggatcggaggaagcagcaggcgaacccgtccagaacggtgcccccgaggaggagcaactcccccccgagagttcctatagcttgttggcagaaaattcgtacgtgaagatgacctgcgacatacgcggatcactccaggaggattcccaggtcaccgtcgccattgtgctcgaaaatcggtcaagctcaatccttaagggcatggagctgtctgtcctggatagcctcaacgcgagaatggcccgaccacaaggcagttccgtgcacgacggagttcccgtgcccttccagttaccccccggagtcagcaatgaggcacagtacgtttttacgatccagtccatagtgatggcacagaagctgaaggggaccttgagctttatcgctaagaacgatgagggagccacccacgagaagttagactttcgcctccatttttcttgcagttcttatctcataaccaccccgtgttattcagacgctttcgccaaactattggaatccggcgatctgtcgatgtcttcaatcaaggtagatggcataagaatgagcttccagaacctgttggccaagatctgctttcaccaccacttctctgtggttgaaagagtggactcttgcgcctcaatgtattcccggtctatccaaggccatcacgtgtgtctgttagtgaagaagggagaaaattccgtgtccgtcgatggcaagtgttccgattcaacgctgttgtccaacctcttggaagagatgaaggccacattagcaaaatgctag

SEQ ID NO: 94007 - DNA, 3066 bp, Artificial Sequence
  derived and/or modified sequence
atggccctgaagatggtcaaaggttccatcgataggatgtttgacaagaatctacaggatttggtccggggtatacgtaatcataaagaggatgaggccaaatacattagccagtgtatcgatgaaattaaacaggagctgaagcaggataatatcgccgtcaaagcaaatgccgtgtgcaaactcacctacctgcagatgttggggtacgatattagctgggccgcttttaatatcattgaggtcatgtctgcatcaaagtttacttttaaacggattggttacctggcggcaagtcaatcctttcatgaaggcaccgacgtcattatgcttaccacgaatcagatccgtaaggatttaagtagtcccagtcagtatgacacaggggtcgcgctgaccggactctcttgctttgtgacacctgacttggctcgggacctcgccaatgacataatgacactgatgtctcacaccaagccgtacatccgtaaaaaggcagttcttatcatgtataaggtcttcttgaagtacccagagtcgctccggcctgcttttccccgactaaaggaaaagctcgaagaccctgacccaggtgtgcaaagcgcagccgtgaatgtcatctgtgagctcgcaagaaggaacccaaagaattatctgtcccttgcgcctctgttcttcaaactgatgaccagttccaccaataactgggtgttgattaagatcatcaaattattcggcgctctcacgcctctggaacctcggctcggcaagaaactgatcgaacccctgaccaacttgatccactccacaagtgctatgagccttctgtacgagtgtgttaataccgttatagcggttcttattagcctctctagcggcatgcctaatcacagcgcctcaatccaattgtgtgtccagaagctccgaattctaattgaggactctgaccagaacctaaagtatttgggactgctcgccatgtctaagatcctgaaaacgcaccctaaatcagtccaatctcacaaagatctcattcttcaatgtctggatgataaggatgagtccatcagactgcgcgctctcgatctgctgtatggtatggtctctaagaaaaacctgatggagatcgtcaaaaagcttatgactcacgtggacaaagctgaggggaccacatatcgggatgagctgctcaccaagatcattgatatttgcagccaaagcaactatcagtatataactaattttgagtggtatatttcaatcttggtggaactgactagactagagggtactcgccacgggcacctcattgcggctcaaatgctcgatgttgccatcagggtcaaagccataaggaaatttgctgttagccaaatgagtgctctgctggacagcgcccatctgctagctagtagtacccagagaaacggaatatgtgaggtgctgtacgccgctgcatggatctgtggcgaattttccgaacacctacaagaaccacaccacactctggaggctatgctgcggcctagggtcacaacactgccaggtcacatccaggccgtgtacgtccagaacgtcgtaaagctatatgcctcaatactacagcagaaggaacaggcaggcgaagccgaaggggctcaggcagtaacccagcttatggtcgaccggctgccacagttcgtgcagtccgcggatctggaggtacaggaaagggcatcctgtatcctccagctggtgaagcacatacagaagttgcaggcgaaggatgtgccagtggctgaggaagtctccgccctcttcgctggagaattaaatcccgtggcccctaaagcccaaaagaaggtccccgtgccagagggtctcgatctggacgcctggattaatgagcccctgtcagattccgagtctgaagacgagagacctagagccgtgtttcacgaggaagagcagaggcggcctaagcaccgtccttccgaagctgacgaagaagagctggcccgacggagagaggctaggaagcaggagcaggcgaataatcccttctatatcaaaagttcccctagtcctcagaagcggtaccaagatacgcctggagtggaacatattcctgtcgtgcagattgacctgtccgttccactaaaagtgcctggtctgcccatgagcgaccagtacgtcaagctagaggaggagcggaggcaccgacagaaattggagaaagacaagcggagaaagaagcgaaaagagaaagaagagcgcacaaagggaaagaagaagagtaaaaaacagccacccggatccgaagaggccgcaggtgagccagtgcagaatggtgcaccagaggaagagcagctgccaccagaatcaagctactctttactcgcagaaaactcctatgtaaaaatgacctgcgacattcggggttcattacaggaggactctcaggtaaccgtggccatcgttctcgaaaatcggtcttcatccatcctgaaaggtatggagctgtctgtgttagactccctgaacgcgaggatggctagacctcaaggctctagcgtgcatgatggcgtgcctgttccttttcaattgcccccaggcgtatccaatgaagcccaatatgtgttcaccatccagagcatcgtgatggcccagaagttgaagggcaccttaagctttattgctaaaaatgatgaaggcgctacccacgaaaaactggattttaggctgcacttttcctgtagttcttaccttatcacaactccttgctactccgatgccttcgccaagcttttagaatcaggggacttgtcaatgagcagcattaaggtcgacggaatcaggatgtcctttcagaacctgctcgctaagatatgtttccaccaccacttcagcgtggtggagagggtggactcatgcgcctctatgtactctcggagtattcagggccatcatgtgtgcctgttagtgaaaaaaggcgagaattcagtctcggtcgatggaaagtgctcggattccaccctgttgtcaaatttacttgaagaaatgaaagccactttggccaaatgctag

SEQ ID NO: 94008 - DNA, 3648 bp, Artificial Sequence
  derived and/or modified sequence
atggccctgaaaatggtgaaaggctccattgatcgaatgttcgacaagaacctgcaggatttggtgcgcggaatccgcaatcacaaagaggatgaggcaaagtacatttcacagtgcattgatgagattaagcaggagctcaaacaggacaacattgccgtgaaagccaacgctgtgtgtaagctgacatatcttcagatgctggggtacgacatttcttgggcagctttcaacataattgaagttatgtcggcctctaagttcacctttaagaggattggttacctggctgcctcccaaagcttccatgaagggaccgacgtgattatgttaaccactaatcagatccgcaaggacctgtcaagcccgtcccagtatgatacaggtgtggcgctcacgggactatcatgttttgtgacccctgacttggcacgggatttggccaatgatattatgacattgatgtcccacacaaaaccttatatcaggaagaaagcggtgttaatcatgtacaaggtcttcctaaagtatcccgagagtttgaggcccgcttttccacggctcaaggagaagctggaggatcccgatccaggggtccagtctgcggcagtgaatgtcatctgtgagctggcaaggaggaaccccaagaactacctgtcacttgctcctctgttctttaaactcatgaccagcagtacaaacaactgggtgttgatcaagataattaaattgtttggcgctctgactcccttggaaccacggctggggaaaaaactcatagaacccctgacgaatttaatccactctacaagcgccatgtctttactctacgaatgtgtgaacacggtgatcgcagttctcatatccctgtcaagcggtatgcctaaccacagtgcgagtattcaactgtgcgttcaaaagctccgtatactgatagaagactcagaccaaaatctgaaatacttgggtctgctcgctatgagcaaaatcctcaaaacgcatcccaagagcgtgcagtcacacaaagacctgatcttacagtgcctggatgacaaggatgagagcattcgcctacgggctctcgatctcctgtatgggatggtgtctaagaagaatctcatggaaattgtgaagaaattaatgacccatgttgacaaggcggaaggaaccacctacagggacgagctgctgacgaaaattattgacatttgttcgcagagcaattatcaatacatcacaaatttcgagtggtacatctccatactggtagaattaacgaggctcgagggtacacggcacggtcatctcatcgcagcacagatgctagatgtcgcgattagggtaaaagccatacgaaaatttgccgtcagccaaatgagtgcattactcgacagcgcccatttactggcctctagcacccagagaaacggtatctgcgaggtgctgtatgccgcagcttggatatgcggtgaattcagcgaacaccttcaggaaccccatcacactctcgaagcaatgctgcggccaagggtgactaccctgcctggacacatccaagcagtgtacgtgcagaatgtggttaagctgtacgcttcaatccttcagcagaaggagcaggccggtgaagccgagggcgctcaggccgtgacacaactcatggtagaccgtttgccgcagttcgtgcagtccgccgatctggaggtgcaggaacgagcttcttgtatcctccagctcgtaaaacacattcagaagctacaagccaaagacgttccagtagccgaagaagttagtgctctcttcgccggagaactaaacccggtggctcccaaagctcaaaagaaggtgcctgttccggaggggctggatctggatgcctggattaatgagccactctcagacagcgaaagcgaagacgaaagacctagagcggtatttcacgaagaagagcagcgacggcctaaacaccgccctagcgaggccgacgaggaggaactggcccgtcgtagagaagcgagaaagcaggagcaggcaaataaccccttttatattaagtcttccccgagtccgcagaagaggtatcaggatacacccggagtggagcatatacccgtcgtccagatcgatttgtccgtaccactaaaggtgccgggattacctatgagcgatcagtatgtgaagctggaagaggagaggaggcaccgtcaaaagctggaaaaggataaacggaggaagaagcgcaaggagaaagagaagaagggcaaacgcagacattcgagtctgcccactgaaagtgacgaagatatcgctccagcccagcaagtggacatcgttacagaagagatgccggaaaacgccctgcccagcgacgaggatgacaaggatccaaacgacccatatcgagctcttgacatagacctggataaacctctcgcagattcagaaaaactgccaatccagaaacaccggaatacggaaacatcgaagagtcctgagaaggacgtgccgatggttgagaaaaaaagcaaaaaacctaaaaaaaaagaaaaaaagcataaagaaaaagagagggacaaggagaaaaagaaagagaaagaaaagaaggccgaggatctggatttttggctgtccactaccccacctcctgccccagcaccggctccagcccctgtgccatccacaggtgagcttagcgtcaataccgtcacaactcccaaggacgagtgtgaggatgcaaagacagaggcccaaggcgaagaggacgatgccgaagggcaggaccaggacaaaaagtctccaaagcccaagaaaaagaagcatcggaaggaaaaggaggaacggaccaaaggcaagaagaagagcaagaagcagcccccaggaagtgaggaggccgcaggggaaccagttcagaacggcgcacccgaggaagagcagctacccccagaatcatcctatagccttctggctgagaatagttacgtgaagatgacctgcgatatcaggggctcattgcaggaagactcccaggtgacagtggcaatcgttctggagaacagaagctcgagcattttgaaaggcatggagctatcggtgctggactccctcaatgcacgcatggccaggccccagggttcttcggtgcatgacggagtgcctgtgccatttcagctcccccctggtgtgtcgaatgaagcccaatacgtgttcactattcagagtattgtaatggcacaaaaactcaaaggcactctgagctttatagcaaaaaatgatgagggggcaacacacgaaaaattggacttccgcctccactttagctgcagtagctacctgattaccaccccttgttacagcgatgcgtttgcaaagctgcttgaatcaggcgacctcagtatgtcttcgatcaaagttgacggcataaggatgtcttttcaaaacttgttggccaagatttgttttcaccatcacttttctgtcgtagagagggtggacagctgtgccagcatgtattcgagatctattcaggggcaccatgtatgcctactggtcaaaaagggcgagaattctgtgagcgtggacggaaagtgcagtgacagcacactcctcagtaatttactggaggagatgaaagcaacgttggcaaagtgttag

SEQ ID NO: 94009 - protein, 363 aa, Artificial Sequence
  derived and/or modified sequence
MASLAAANAEFCFNLFREMDDNQGNGNVFFSSLSLFAALALVRLGAQDDSLSQIDKSGLQSQLKRVFSDINASHKDYDLSIVNGLFAEKVYGFHKDYIECAEKLYDAKVERVDFTNHLEDTRRNINKWVENETHGKIKNVIGEGGISSSAVMVLVNAVYFKGKWQSAFTKSETINCHFKSPKCSGKAVAMMHQERKFNLSVIEDPSMKILELRYNGGINMYVLLPENDLSEIENKLTFQNLMEWTNPRRMTSKYVEVFFPQFKIEKNYEMKQYLRALGLKDIFDESKADLSGIASGGRLYISRMMHKSYIEVTEEGTEATAATGSNIVEKQLPQSTLFRADHPFLFVIRKDDIILFSGKVSCP

SEQ ID NO: 94010 - DNA, 1092 bp, Artificial Sequence
  derived and/or modified sequence
atggcttcactggcggccgccaatgctgagttctgcttcaatctgtttagggaaatggacgataatcagggcaatggcaacgtgttctttagctctttgtcgctgtttgcggcgcttgcgctggtcagattaggcgcgcaggatgatagtctctctcagattgataaatccggtctgcaatcacagttgaaaagagtcttctcggacataaatgctagccacaaggactacgatctctcaattgtgaatgggctgtttgctgagaaggtgtacggctttcacaaggactacattgagtgtgccgagaaactatacgatgctaaagtggaaagggtcgatttcactaatcacctcgaggacactaggcgcaacatcaacaagtgggtagagaacgagacgcatggaaagattaagaatgtgattggcgaggggggcataagctcatctgctgtgatggtgctagtcaatgctgtgtattttaagggaaagtggcagtctgcctttacgaaatcagagaccatcaattgccacttcaagtctcctaagtgttcaggcaaagctgttgccatgatgcaccaggagagaaaatttaatctgtcagtaatcgaggatccttcgatgaaaatcctcgaacttcgttacaacggcgggattaatatgtatgtcctcctccccgaaaatgacctgagcgagatagaaaataaacttaccttccagaacttgatggagtggacgaacccgcggcgcatgacttccaaatatgtcgaggtgtttttcccgcaatttaagattgagaagaattacgaaatgaagcaatacctgcgcgccttgggactcaaagacatcttcgatgagagtaaagccgatctgtccgggatcgcctctgggggtagactttacataagccgaatgatgcataagagctacatcgaggtgacggaagagggaaccgaggctacagccgcaaccggcagcaacatcgttgagaagcagttacctcagtccacactgttcagagccgaccatcccttcctgttcgtgatacgtaaagatgacattatcctcttctcagggaaggtaagctgtccatag

SEQ ID NO: 94011 - DNA, 1092 bp, Artificial Sequence
  derived and/or modified sequence
atggccagcctggccgccgccaatgctgagttctgcttcaacctcttccgggagatggatgacaaccagggcaatggaaatgtgttcttcagcagcctgagcctgtttgctgccctggccctggtgcggctgggcgcccaggatgacagcctgagccagattgacaagagcggcctgcagagccagctgaagagggtcttcagtgacatcaatgccagccacaaggactatgacctgagcatcgtgaatggcctgtttgctgagaaggtgtatggcttccacaaggactacattgaatgtgccgagaagctgtatgatgccaaggtggagcgggtggacttcaccaaccacctggaggacaccaggaggaacatcaacaagtgggtggagaatgagacccacggcaagatcaagaatgtgattggagagggcggcatcagcagcagcgctgtgatggtgctggtgaatgctgtgtacttcaagggcaagtggcagagcgccttcaccaagtctgagaccatcaactgccacttcaagagccccaagtgcagcggcaaggctgtggccatgatgcaccaggagaggaagttcaacctgtctgtgattgaggaccccagcatgaagatcctggagctgcgctacaatggaggcatcaacatgtatgtgctgctgcctgaaaatgacctgtctgaaattgagaacaagctgaccttccagaacctgatggagtggaccaaccccaggaggatgaccagcaaatatgtggaggtgttcttcccccagttcaagattgagaagaactatgagatgaagcagtacctgcgggccctgggcctgaaggacatctttgatgagagcaaggctgacctgtctggaattgccagcggcggccgcctgtacatcagcaggatgatgcacaagagctacatcgaggtgacagaggagggcacagaggccacagctgccaccggcagcaacatcgtggagaagcagctgccccagagcaccctcttccgggctgaccaccccttcctgtttgtgatcaggaaggatgacatcatcctcttcagcggcaaggtgtcctgcccctag

SEQ ID NO: 94012 - DNA, 1092 bp, Artificial Sequence
  derived and/or modified sequence
atggccagcctggccgccgccaacgccgagttctgcttcaacctgttcagagaaatggatgataatcagggcaatggtaacgtgtttttttcttccttgagcctgttcgccgctctcgctctggtaagacttggcgcacaggacgactcattgagccaaattgacaaaagtggccttcagtctcagcttaagcgcgtgtttagtgacatcaacgccagccacaaagattatgatctgagcattgtaaacggactcttcgccgagaaggtctacggattccacaaggattacatcgagtgtgctgagaaactctatgatgctaaggtggaacgggtggactttaccaatcacctggaggatacacgacgtaatatcaataagtgggtggaaaatgaaactcacggtaaaattaagaatgtgataggcgaagggggtatatccagctcggctgttatggtactcgttaatgctgtttatttcaaggggaaatggcaatctgcatttacaaaatcggagacaattaattgccactttaaatctccaaaatgctcgggcaaggccgtggcgatgatgcaccaggagcgaaagttcaatttatctgtcattgaggacccgtctatgaaaatcctggaactgaggtacaatggaggtattaatatgtacgtgttgctgccggagaacgacctgtcagaaatagaaaacaaactcaccttccagaatctgatggaatggaccaatcctcgccgaatgacaagcaaatacgtagaggtttttttccctcagtttaagatagagaagaactatgaaatgaaacagtatctgagggccctgggcctgaaggatatctttgacgaatcaaaagccgatctcagcggaatagcttctggaggtcggttatacatttccaggatgatgcacaaatcttatatcgaagtcacagaggagggcacggaagctaccgctgccaccggctccaatattgtggaaaagcagttgccccagtctactctctttcgggccgaccacccgtttctctttgtcattcgcaaagacgatataatcttgtttagtggaaaggtaagttgcccctag

SEQ ID NO: 94013 - DNA, 1092 bp, Artificial Sequence
  derived and/or modified sequence
atggcgtcactggcagcagcaaacgctgagttttgttttaatcttttccgcgagatggacgacaatcagggtaacggaaacgtcttcttttctagtctatcactgtttgcagcgctggctttggtgagattgggagcgcaggatgacagcctaagtcagattgacaagagtggcctacagagccaattaaagcgcgtgttttcagacataaacgcctcccataaggattacgacttgtctatcgtcaatggcctgttcgcagaaaaggtgtatgggtttcacaaagactacatcgaatgcgcagagaagctctacgacgcgaaggtggaacgcgtcgacttcacaaaccatctggaggacactagacggaacatcaataaatgggttgaaaatgagacacacggtaagattaaaaatgttattggcgaggggggaatcagttcaagcgccgtgatggtgctagtgaacgctgtgtatttcaaaggcaagtggcagtcagcatttacaaaatcagagacaattaactgtcattttaagagccctaagtgctcggggaaggcggtggctatgatgcatcaggaaaggaaattcaacctgagcgtaatcgaagatccctctatgaaaattctcgaacttaggtataacgggggtatcaacatgtacgtcctcctcccagagaacgatctaagcgagatcgaaaacaaactaaccttccaaaacctaatggaatggacaaatccccgacgcatgacttctaaatacgtcgaggtttttttccctcaatttaaaattgagaagaattatgaaatgaagcagtaccttagagctctgggactcaaggatattttcgatgagtccaaggcagacctcagcggaatagcatcgggagggcgtctgtatatttcacgtatgatgcacaagtcatatatcgaagtgactgaagagggcaccgaagccactgctgccacagggtccaacatcgtggaaaaacagctcccacagagcacactgttccgtgctgatcacccctttctcttcgttatccgcaaggatgacatcatcttgtttagcgggaaggtgtcatgtccgtag

SEQ ID NO: 94014 - DNA, 1446 bp, Artificial Sequence
  derived and/or modified sequence
aataagcagctgcctgtgcagagtgcaggctgcacctttggacagcctttaaaactgaattctcagaattttagaacaaatttttgtctagaaatgctgactttggttcattaggtagtggtaaaacaggctcccttcgaagctctccttcatcaccttcctaagtgcatgggggaaaatacctagggctcaacagtcttgagaagtgtggaaacattttctttgtgagtgagaacagatcacctagagaaaggagaccagattcccatcactgcttctgggtatcagatgctagcgctgcactccattttgcaatggcctcccttgctgcagcaaatgcagagttttgcttcaacctgttcagagagatggatgacaatcaaggaaatggaaatgtgttcttttcctctctgagcctcttcgctgccctggccctggtccgcttgggcgctcaagatgactccctctctcagattgataagtcagggctccagtctcaactgaaaagagttttttctgatataaatgcatcccacaaggattatgatctcagcattgtgaatgggctttttgctgaaaaagtgtatggctttcataaggactacattgagtgtgccgaaaaattatacgatgccaaagtggagcgagttgactttacgaatcatttagaagacactagacgtaatattaataagtgggttgaaaatgaaacacatggcaaaatcaagaacgtgattggtgaaggtggcataagctcatctgctgtaatggtgctggtgaatgctgtgtacttcaaaggcaagtggcaatcagccttcaccaagagcgaaaccataaattgccatttcaaatctcccaagtgctctgggaaggcagtcgccatgatgcatcaggaacggaagttcaatttgtctgttattgaggacccatcaatgaagattcttgagctcagatacaatggtggcataaacatgtacgttctgctgcctgagaatgacctctctgaaattgaaaacaaactgacctttcagaatctaatggaatggaccaatccaaggcgaatgacctctaagtatgttgaggtattttttcctcagttcaagatagagaagaattatgaaatgaaacaatatttgagagccctagggctgaaagatatctttgatgaatccaaagcagatctctctgggattgcttcggggggtcgtctgtatatatcaaggatgatgcacaaatcttacatagaggtcactgaggagggcaccgaggctactgctgccacaggaagtaatattgtagaaaagcaactccctcagtccacgctgtttagagctgaccacccattcctatttgttatcaggaaggatgacatcatcttattcagtggcaaagtttcttgcccttgaaaatccaattggtttctgttatagcagtccccacaacatc

SEQ ID NO: 94015 - DNA, 1092 bp, Artificial Sequence
  derived and/or modified sequence
atggccagcctggccgccgccaacgccgagttctgcttcaacctgttcagagagatggacgacaaccagggcaacggcaacgtgttcttcagcagcctgagcctgttcgccgccctggccctggtgagactgggcgcccaggacgacagcctgagccagatcgacaagagcggcctgcagagccagctgaagagagtgttcagcgacatcaacgccagccacaaggactacgacctgagcatcgtgaacggcctgttcgccgagaaggtgtacggcttccacaaggactacatcgagtgcgccgagaagctgtacgacgccaaggtggagagagtggacttcaccaaccacctggaggacaccagaagaaacatcaacaagtgggtggagaacgagacccacggcaagatcaagaacgtgatcggcgagggcggcatcagcagcagcgccgtgatggtgctggtgaacgccgtgtacttcaagggcaagtggcagagcgccttcaccaagagcgagaccatcaactgccacttcaagagccccaagtgcagcggcaaggccgtggccatgatgcaccaggagagaaagttcaacctgagcgtgatcgaggaccccagcatgaagatcctggagctgagatacaacggcggcatcaacatgtacgtgctgctgcccgagaacgacctgagcgagatcgagaacaagctgaccttccagaacctgatggagtggaccaaccccagaagaatgaccagcaagtacgtggaggtgttcttcccccagttcaagatcgagaagaactacgagatgaagcagtacctgagagccctgggcctgaaggacatcttcgacgagagcaaggccgacctgagcggcatcgccagcggcggcagactgtacatcagcagaatgatgcacaagagctacatcgaggtgaccgaggagggcaccgaggccaccgccgccaccggcagcaacatcgtggagaagcagctgccccagagcaccctgttcagagccgaccaccccttcctgttcgtgatcagaaaggacgacatcatcctgttcagcggcaaggtgagctgcccctag

SEQ ID NO: 94016 - DNA, 180 bp, Artificial Sequence
  derived and/or modified sequence
atggcgtctgagggactggctggagcactggctagcgtgctggccggtcaaggcagttctgtccactcatgcgactcagccccagccggtgaaccaccggcaccgagggcgggttgtggaaggacctgcgcaacctggtgctggccttgttcatccgccagtcgcatgcggtgctattag

SEQ ID NO: 94017 - protein, 302 aa, Artificial Sequence
  derived and/or modified sequence
MSSLSGKVQTVLGLVEPSKLGRTLTHEHLAMTFDCCYCPPPPCQEAISKEPIVMKNLYWIQKNAYSHKENLQLNQETEAIKEELLYFKANGGGALVENTTTGISRDTQTLKRLAEETGVHIISGAGFYVDATHSSETRAMSVEQLTDVLMNEILHGADGTSIKCGIIGEIGCSWPLTESERKVLQATAHAQAQLGCPVIIHPGRSSRAPFQIIRILQEAGADISKTVMSHLDRVRLLVEEGCEDRILVAHDIHTKTRLMKYGGHGYSHILTNVVPKMLLRGITENVLDKILIENPKQWLTFK

SEQ ID NO: 94018 - DNA, 909 bp, Artificial Sequence
  derived and/or modified sequence
atgagctccctgtccggtaaggtgcagaccgttctaggactggttgaaccttctaagctgggccgaactctcacccacgagcatctcgcgatgacattcgactgctgttattgtcctccaccaccatgtcaggaagccatctccaaagagcccatcgtgatgaaaaatttgtactggattcagaaaaacgcctattcgcacaaagagaatttacagctgaaccaggagaccgaggcaattaaggaggagcttctgtatttcaaggccaatggcgggggcgcgcttgtggagaacactactaccggaatatcaagagacacccagactctcaagaggctggctgaggaaactggagtccatattatttctggtgcagggttttacgtagacgctacccattctagtgagaccagggccatgagcgtcgagcagttaacagatgtcctgatgaatgaaattctgcacggcgcggatggcacgtccatcaagtgcgggattatcggagaaattggatgctcctggcccctgacagagtctgaacggaaagtgctccaggcaacagcccatgcacaggctcaacttgggtgcccagtgatcatccatccaggtagaagctctagggcccccttccagattatccgcatcttgcaggaggccggcgccgacatctccaagactgtcatgtcacatcttgacagagtgcgcttgcttgtagaagagggctgtgaggaccggatactcgtggcccacgacatacacactaaaacccgactaatgaaatacgggggccacgggtacagccatattttgaccaacgttgtgccaaaaatgctgttgaggggtatcaccgaaaacgtgctggacaagatactaattgagaatccaaagcagtggctaactttcaagtag

SEQ ID NO: 94019 - DNA, 909 bp, Artificial Sequence
  derived and/or modified sequence
atgagcagcctgagcggcaaggtgcagacagtgctgggcctggtggagcccagcaagctgggccgcaccctgacccatgagcacctggccatgacctttgactgctgctactgccccccaccaccctgccaggaggccatcagcaaggagcccatcgtgatgaagaacctgtactggatccagaagaatgcctacagccacaaggagaacctgcagctgaaccaggagacagaggccatcaaggaggagctgctgtacttcaaggccaacggcggcggggccctggtggagaacaccaccaccggcatcagccgggacacccagaccctgaagaggctggccgaggagactggagtgcacatcatctctggagctggcttctacgtggatgccacccacagcagcgagacccgggccatgtctgtggagcagctgacagatgtgctgatgaatgagatcctgcatggagcagatggcaccagcatcaagtgtggcatcattggagagatcggctgctcctggcccctgacagaaagtgagaggaaggtgctgcaggccacagcccacgcccaggcccagctgggctgccctgtgatcatccaccctggccgcagcagccgggcccccttccagatcatccgcatcctgcaggaggccggggctgacatcagcaagacagtgatgagccacctggacagagtgcggctgctggtggaggagggctgtgaagatcgcatcctggtggcccatgacatccacaccaagacccggctgatgaagtatggaggccacggctacagccacatcctgaccaacgtggtgcccaagatgctgctgcggggcatcacagaaaatgtgctggacaagatcctgattgagaaccccaagcagtggctgaccttcaagtag

SEQ ID NO: 94020 - DNA, 909 bp, Artificial Sequence
  derived and/or modified sequence
atgagcagcctgagcggcaaggtgcagaccgtgctgggcctggtggaaccatctaagctaggacgcacattaacgcacgagcacctggcgatgacctttgattgttgttactgccctccccctccatgccaggaggcaatcagcaaggaaccgatcgtgatgaaaaacctctattggatccaaaaaaacgcctattcacacaaagagaatctccagttgaatcaagaaacagaggccattaaggaggagctgttgtactttaaagcgaatggggggggcgcacttgtggagaacaccaccactggaatcagcagggatacccagactctgaaaagactggctgaagagacgggcgtccacatcatttccggcgctgggttctacgtcgatgccacgcactccagtgagacaagggccatgtctgtggaacagttaaccgacgtcctgatgaatgaaatcctacacggggcggacgggactagcattaagtgtgggatcatcggcgaaatcggatgttcgtggcccctcacggaaagcgaaagaaaagttctgcaggctaccgcccacgcacaggcacagttgggctgtcccgtcatcatccaccccggacgcagtagtagggcgccgtttcaaatcattaggattttgcaggaggctggcgcggatatttcaaagactgtgatgtctcatctggatcgagtgaggctgctggttgaggaaggctgtgaagataggatccttgtcgcacacgacatccacactaagacccgattaatgaagtacggcggtcacggctacagtcatatcctcaccaacgtggttcccaagatgttgcttcgtgggatcactgaaaacgtcctcgacaaaattttgattgagaaccctaagcagtggctcacatttaaatag

SEQ ID NO: 94021 - DNA, 3225 bp, Artificial Sequence
  derived and/or modified sequence
acaggggagactaaaaaggccagggaagttggcctgccggaagttcccagggagaaggcagcgcgttgtacccgagaaaaaagaaatcctctttttagaacatctcttggtggtaccatcagaaatgtcttccttaagtggaaaagtccaaaccgttttgggccttgtagagccaagcaaactgggccgtaccctgacccatgaacacctggccatgacctttgactgctgttactgtccacctcccccgtgccaggaagctatttccaaagaacctatcgtgatgaaaaatttatattggattcagaaaaacgcctattcccataaagaaaaccttcaattaaatcaggagacagaagccataaaggaagaactgttgtattttaaagctaatggtggaggggctttggtggaaaacacaaccactgggattagccgagacacacagacgttgaagaggcttgcagaagagactggcgtccatatcatatctggagccgggttttatgtggatgcaactcactcctcagagaccagggccatgtcagtggagcagcttaccgatgtccttatgaatgaaattctccatggagctgatggaaccagtatcaagtgtggcattattggagaaattggttgctcctggcctttgactgagagtgaaagaaaggttctccaggccacagctcatgcccaggctcagcttggttgtcctgttattatccatcctggacggagctccagggcaccatttcagattatccgaatattgcaagaagcaggcgcagacatctccaaaacagtcatgtcacacctggatagggtgcgtctcctggtggaagagggctgtgaagatcgaattctggtagcacatgacatacatacgaaaacccggctgatgaaatatggaggtcacggctattctcatatactcaccaatgttgttcctaaaatgttgctgagaggcataactgagaatgtgcttgataagattctaatagagaaccctaagcaatggctaactttcaaataggatggttgcttatgaattcacaccttgagtataaaacttgcagagaacattcagcgatttccagtccactgtgagatattaatcagttacctaggactaatgacagatcatttccttctgatgagaactaggagggtttgccttctctgagaccagctattacaactgtgcctctagggagttactcagcctaattgagccctattattttaacttaacaaaataaatacagaagtacctatttctaaacaatgatttaaagtctatatcccctaagcggagttgttgtttttctccctaatctatcagctgcactacttgagaaaatttaaagtgtttctagttaaattatttccttcttgagcgatctaatgtttcttgtaatattgatgatcctactaattatcctgctgttctttaattaatgcttaatgaataatatggcactgtaaaatagcttctgcaacaagggaagttaaattttgagacttttttccccaaaggatactgactgtaatacaattaccaattcacaatgataaaaatattttgaaaggttaattttatactgtccacctatctatatattcttctactgaaatgattttgatatctttggctttccggtatctatttttgccatacattttgctgttttgcaaagtttgtataagaacacataacactactgaattataaaaattcaatcataaaagtcaaaatatattacataatatagtttaatgaatcattacatttataataacaaaggccacaatttaattaattggtaagatataatgcaaaaaaaaaaagagaaatgtttgccttatgtatattccctttatttcctttaccttttgtttttccttggacctaaacagagaaaataatgcttatgtatctgaagaaaaggtcagatctattggaaatgacagcccgatacttgagcctcctctttaaaaggtatccagccctgatattttgtgtaaataaaatgtttttaaaacctgttagttaaaacacttaggtgatgggcactgctgcttataaattcatcttttggttgaatcctcactatgctatttggtacctaaaaatattctccaaacccttgctgccagttcctctttgataaatatatagttaattcgaaataaaatccattgcaattcatttatgagttatcttacatatcacaaagaccaattagaattagtcattattcttgatgaagagtctgtttttaatcataaaaatcatgacagttactcagacccaggcatttcaacagagctaacaccaccttcagataggcacaccatgcataactcttgggaagttgagctttgctaaataaaagatatttctgctgatcaaagatgatcaagctttctgtgtattggaacagaaagtaacaaagaggaatgagccaggagaacaaactaattcctttaaataaataaaaaaaaaaaatgcaaatgtccttcaccagtaaagcaagcaaatttttaaaatctctgtttttgaaatctactcgtcaaagagttttcagaggcaatgaaaggggaacagatttttcattgtaatagtggaagttgtgtgatagttaggagatatcaacatgcatttttaatcttttccttagatgaaagagatggcttttggcagtgtgttctaaccagaaagaaaggatttgtattactctccaaatctactgtactgtcagcttcactccacctgagaaaaaagaaaaaaaaattgatagctcaaatgcatgtaattcataaacactgcaaaggagagccacttggtgtctgcagtcctcatattaacagtctgtcacagaatgcagttaaagtattgattggcatatggtaatagagcaaccatagccttaacttacagacctgtgaaataaagggcattttgacctaatacaattaattttctggataactcttaaagagaagtcattttaactgtttttgctactccatatattgtcattcaaaatatattttaacccaaaataagttaaataatttgtgcatgtttgtgtgtgtatatatgcatacacttttttatattaaaattttgaggctatacagccactgtgccctgtggaataaagccatatatataaatgttttatatgtatatgttttatacataaataaaacatttcatct

SEQ ID NO: 94022 - DNA, 909 bp, Artificial Sequence
  derived and/or modified sequence
atgagcagcctgagcggcaaagtgcagactgtcctaggcctcgtggagccaagcaagctggggcgtacgctgacccacgagcacctggccatgaccttcgattgttgctactgtccccctccaccctgccaggaggcgatcagcaaggaacctatagtaatgaaaaacctgtactggatccagaaaaacgcatacagtcataaggagaatcttcaattaaatcaggaaaccgaggccatcaaggaggagctcctgtacttcaaagccaacggaggcggagcactggtggaaaatactacaaccgggatcagtagagatacacaaaccctcaagcggctcgctgaagagactggagtgcacatcatctctggagcagggttttatgtggatgcaacgcactccagcgagacacgagctatgagcgtggagcaactgacagacgttctcatgaatgagatcttacatggcgctgatggcaccagtattaaatgtggcataattggagaaattggatgttcttggcctctgaccgagagtgagagaaaggtcctgcaggccacagctcacgcacaggcgcagctgggttgtcccgtcattatccaccctggccgatcttcccgcgcacccttccaaataatccgcatactgcaggaggcaggcgcagatatttctaagacggtgatgagtcacctcgatcgcgttagactgcttgttgaggaggggtgtgaggatcgcatactagtagctcacgacatccacaccaaaactcgtctaatgaagtacggagggcatggctattcccatatcttgacaaacgtggtccctaagatgttgttaagagggatcacagagaacgtactggataagatcctgatagagaatcccaagcagtggctcaccttcaagtag

SEQ ID NO: 94023 - DNA, 909 bp, Artificial Sequence
  derived and/or modified sequence
atgagcagcctgagcggcaaggtgcagaccgtgctgggcctggtggagcccagcaagctgggcagaaccctgacccacgagcacctggccatgaccttcgactgctgctactgccccccccccccctgccaggaggccatcagcaaggagcccatcgtgatgaagaacctgtactggatccagaagaacgcctacagccacaaggagaacctgcagctgaaccaggagaccgaggccatcaaggaggagctgctgtacttcaaggccaacggcggcggcgccctggtggagaacaccaccaccggcatcagcagagacacccagaccctgaagagactggccgaggagaccggcgtgcacatcatcagcggcgccggcttctacgtggacgccacccacagcagcgagaccagagccatgagcgtggagcagctgaccgacgtgctgatgaacgagatcctgcacggcgccgacggcaccagcatcaagtgcggcatcatcggcgagatcggctgcagctggcccctgaccgagagcgagagaaaggtgctgcaggccaccgcccacgcccaggcccagctgggctgccccgtgatcatccaccccggcagaagcagcagagcccccttccagatcatcagaatcctgcaggaggccggcgccgacatcagcaagaccgtgatgagccacctggacagagtgagactgctggtggaggagggctgcgaggacagaatcctggtggcccacgacatccacaccaagaccagactgatgaagtacggcggccacggctacagccacatcctgaccaacgtggtgcccaagatgctgctgagaggcatcaccgagaacgtgctggacaagatcctgatcgagaaccccaagcagtggctgaccttcaagtag

SEQ ID NO: 94024 - protein, 305 aa, Artificial Sequence
  derived and/or modified sequence
MDMFQKVEKIGEGTYGVVYKAKNRETGQLVALKKIRLDLEMEGVPSTAIREISLLKELKHPNIVRLLDVVHNERKLYLVFEFLSQDLKKYMDSTPGSELPLHLIKSYLFQLLQGVSFCHSHRVIHRDLKPQNLLINELGAIKLADFGLARAFGVPLRTYTHEVVTLWYRAPEILLGSKFYTTAVDIWSIGCIFAEMVTRKALFPGDSEIDQLFRIFRMLGTPSEDTWPGVTQLPDYKGSFPKWTRKGLEEIVPNLEPEGRDLLMQLLQYDPSQRITAKTALAHPYFSSPEPSPAARQYVLQRFRH

SEQ ID NO: 94025 - DNA, 918 bp, Artificial Sequence
  derived and/or modified sequence
atggatatgtttcaaaaagtcgagaaaatcggggaaggaacatacggggtagtatataaggctaagaatagagagactggccagctggtcgctctcaagaagatccggctggatcttgaaatggagggggtgccaagtactgctataagagagatcagcctgctgaaagagttgaagcaccccaatatcgtgagactcttggatgtggtgcacaacgagagaaaattatatctggtcttcgagtttttgtctcaggacctgaaaaaatatatggatagcacacccggttctgaactgcctctgcatcttattaaatcttatctctttcaactcctgcagggcgtctccttttgtcatagccatagggtcattcacagagatcttaagccacagaaccttctgataaacgagctcggggccattaaactggctgattttggtctggccagagccttcggcgtgccattgaggacatacacccacgaggtggtgactctctggtatagagctccagaaatcctcctgggctctaaattttacaccaccgccgtggacatttggtccattggctgtattttcgcggaaatggtcactcgtaaggctctgtttcctggggacagcgaaattgatcagttattccgtatattccggatgttggggacacccagcgaggatacctggcctggggtgacccagcttccagactacaagggttcattccctaagtggaccaggaaaggcctggaagaaatcgtcccgaatctggagcccgaggggagagatctcttaatgcagctgctgcagtacgacccttcacaaaggatcactgccaagacggctcttgcccacccatacttcagttcacctgagccttcacccgccgccaggcagtacgtgctgcagagatttcggcactag

SEQ ID NO: 94026 - DNA, 918 bp, Artificial Sequence
  derived and/or modified sequence
atggatatgttccaaaaagtggagaaaattggcgaaggtacttacggtgtggtgtacaaagcgaaaaatagagaaacgggacagttggtagcattgaagaagataagattggacctggagatggagggtgtccccagcactgccatccgggagataagcttgttgaaggagctgaagcatcccaacattgttagactgttagacgttgtgcacaacgagcgcaaactgtatctggtgttcgagttcctgtcacaggacttgaagaaatatatggatagtaccccaggatcggagttacctctccatcttatcaagagctatctcttccagctgctgcagggagtgagcttttgtcacagccatagagtcattcatagagacctgaagccacagaacctgttgattaatgagctgggagcgatcaaattagcggactttgggctggcacgggcattcggagtgcctcttcggacctatactcacgaggtcgttaccctttggtatcgcgcacccgagatcctactcggatccaagttttacacaaccgcggtggacatctggtccattggctgcatctttgcagaaatggtgacccgcaaggctctatttcctggagatagcgagatagaccaactgtttcgcatttttaggatgcttgggaccccatccgaggatacatggcccggagtgactcaacttcccgattataaaggatcattccccaagtggaccagaaagggactcgaggagatagtacctaatctggagccagagggccgggatcttctgatgcagctgctccagtacgatccctctcagcgcattaccgccaaaaccgctctggcgcatccctacttcagctcaccagagccgagtcccgcagcccgccagtacgtgcttcagcgtttccggcattag

SEQ ID NO: 94027 - DNA, 918 bp, Artificial Sequence
  derived and/or modified sequence
atggacatgttccagaaggtggagaagatcggggagggcacctatggagtggtgtacaaggccaagaaccgggagaccggccagctggtggccctgaagaagatccggctggacctggagatggagggcgtgcccagcacagccatccgggagatcagcctgctgaaggagctgaagcaccccaacatcgtgcggctgctggatgtggtgcacaatgaaaggaagctgtacctggtgtttgagttcctgagccaggacctgaagaagtacatggacagcaccccaggcagcgagctgcccctgcacctgatcaagagctacctgttccagctgctgcagggcgtgtccttctgccacagccacagggtcatccaccgggacctgaagccccagaacctgctgatcaatgagctgggcgccatcaagctggccgactttggcctggcccgggccttcggcgtgcccctgcggacctacacccatgaggtggtgaccctgtggtaccgggcccctgagatcctgctgggcagcaagttctacaccacagctgtggacatctggagcatcggctgcatctttgctgagatggtgaccaggaaggccctcttccctggggacagcgagattgaccagctgttccgcatcttcaggatgctgggcaccccatctgaggacacctggccaggagtgacccagctgcctgactacaagggcagcttccccaagtggaccaggaagggcctggaggagatcgtgcccaacctggagcctgagggccgggacctgctgatgcagctgctgcagtatgaccccagccagaggatcacagccaagacagccctggcccacccctacttcagcagccctgagcccagccctgctgcccggcagtatgtgctgcagcgcttccgccactag

SEQ ID NO: 94028 - DNA, 918 bp, Artificial Sequence
  derived and/or modified sequence
atggacatgttccagaaggtggagaagatcggcgagggcacctacggcgtggtgtataaagcgaaaaatcgggagacagggcagttggtcgctctcaagaagatccgtctggatctggagatggagggcgttccaagtaccgcgatacgggagatctctttgctgaaggagttgaagcatccaaatatcgtacggctcctagatgtggtccataatgaacgtaaattgtatttggttttcgagttcctcagtcaagacttgaaaaaatatatggatagtacgcctgggtcagagctcccactccacttgataaagtcttacttgttccagcttcttcagggagtgagcttctgtcactcacacagagttatccacagagacttaaagccacagaacttgctgatcaacgaactgggagccattaagctggcagactttgggctcgctagagctttcggcgtgcctctgcggacgtacacacacgaggttgttactctgtggtaccgcgcgcccgaaatcctgctcggtagcaaattttacaccaccgccgttgacatttggtcaattggttgcatttttgctgagatggttacgcgcaaggcgctctttcccggagactcggagattgatcagttgtttcgaatcttccgcatgctggggacgccttcagaggacacctggcctggtgtgacgcagctgcccgactacaagggcagcttccctaaatggactagaaagggactggaggaaattgtacctaacttggagcctgaaggacgcgacttactgatgcagctgttgcagtatgacccatctcaacgcatcacggccaagacggcactggcccacccatacttctctagcccagagccttcaccagctgcacgccaatacgtgctgcagagattccgacactag

SEQ ID NO: 94029 - DNA, 918 bp, Artificial Sequence
  derived and/or modified sequence
atggacatgttccagaaggtggagaagatcggcgagggcacctacggagtggtgtataaagctaaaaaccgagaaactggacaactcgtcgcccttaagaagattcgccttgacctggaaatggagggcgtgccgagcaccgccatcagggagatatccctcttgaaggagttgaagcatcccaacatcgtgagactcctcgacgtggtacacaatgaacgcaagctgtatctggtgtttgagttcttaagccaggatctgaagaaatacatggacagtaccccgggaagcgaactccctctgcacctaatcaagagctatctcttccagctcctacagggcgtcagtttctgtcattcacaccgagtcattcaccgcgatcttaagccacagaatctgctaattaacgagttgggggcgattaaactcgccgattttgggctcgctagggcttttggggtgccactccgtacgtatactcacgaagttgtcaccttgtggtacagggctcctgagatcctgctgggatcaaaattttacactactgcagttgacatctggtccataggctgcatctttgctgagatggtgacccgtaaggccctctttccaggcgattctgaaatagatcagctcttcagaatcttccgcatgttgggcacaccatcagaggatacatggcccggagtgacccaactgccggattataaggggagttttcccaagtggactagaaagggactcgaggagatcgtgccaaatttagagcctgaagggcgcgatttactaatgcaactcctccaatatgacccgtctcagcgaatcaccgctaagactgctctggcccatccctattttagctctccagagccttctccggccgcccggcagtacgttctgcagcggttccggcattag

SEQ ID NO: 94030 - DNA, 918 bp, Artificial Sequence
  derived and/or modified sequence
atggacatgtttcagaaggtggaaaagattggcgaaggcacttacggagtggtgtacaaggccaagaacagagagaccggccaactggtggcgctcaaaaagattcggcttgatctcgagatggagggcgtgccttcaactgccattcgggaaatcagtctcttgaaggagctgaaacatcctaatattgttcggcttctcgatgtggtgcataatgagaggaaactgtatttagttttcgaattcctctcacaggatctgaagaaatatatggattcaacccccggaagtgaactcccacttcatctgattaagagctacctgtttcagttactgcagggggtgagtttctgccattctcatagagtgatccacagagacttaaaaccccaaaacctgctcatcaacgagctcggagccattaaattggctgattttggcctcgctcgcgcttttggtgtaccactgcgtacatacacacacgaggtcgtgaccctttggtatagagcgccagagattctgctgggcagtaagttctatacgactgctgtggacatttggagcattggatgcatatttgcggagatggtgacaagaaaagctttgttccctggagacagtgagatcgaccagttgttcaggatcttccgcatgcttgggaccccatcggaagacacatggcctggcgtgacgcagcttcctgattataagggatccttccctaaatggacccggaaggggcttgaagagatcgtgcccaacctagaacctgagggtagggacctgctgatgcagctgctacagtatgatccatctcagagaatcacagctaaaacagctctggctcacccatatttttccagcccggagccatcccccgcagccaggcagtacgtcctccagcgtttccgccactag

SEQ ID NO: 94031 - DNA, 918 bp, Artificial Sequence
  derived and/or modified sequence
atggacatgtttcagaaagtggagaaaattggagagggcacttacggagtggtttacaaggctaaaaatagagagaccggacaacttgtagctctgaaaaaaattcgactggacctggaaatggagggcgtgcctagtactgccattagggagattagcctgttaaaggagcttaaacatcctaacatcgtgaggctgctggacgttgtgcacaatgagagaaagctgtatctggtattcgaattcctcagccaggacctgaagaagtacatggacagcactccaggcagcgaacttcctctgcatttgattaagtcttacctttttcagctcctgcagggagtcagcttctgccactcccatagagttatccaccgcgatctaaagccccagaatctgctgataaatgagctgggagcaataaagctggcagattttggactggccagagcattcggcgtgccactccgaacatatactcatgaagtcgtgacattgtggtaccgggctccagagatcctactcggttctaaattttacactaccgctgttgacatctggtcaatcgggtgtatattcgccgaaatggttacacggaaagcactgttccccggagattcagagattgaccagttattcagaatcttcagaatgttaggcacgccatcggaggacacttggcctggtgtgactcagctgcctgactataagggaagttttcctaagtggaccagaaaggggctggaggagattgttccaaatttggagcctgagggcagagacctgttgatgcagctccttcagtacgatccctcccaacggatcaccgctaaaacggccctagcacacccctacttttctagccccgagccttctcctgctgcccgacaatacgtgctccagcgtttccgccattag

SEQ ID NO: 94032 - DNA, 1158 bp, Artificial Sequence
  derived and/or modified sequence
ccacatggaagctggaggagcaacgggagcgctgggcgtggggtgcaaattgcccggtgccttctgtttcccaggcagctctgtggccatggatatgttccagaaggtagagaagatcggagagggcacctatggggtggtgtacaaggccaagaacagggagacagggcagctggtggccctgaagaagatcagactggatttggagatggagggggtcccaagcactgccatcagggagatctcgctgctcaaggaactgaagcaccccaacatcgtccgactgctggacgtggtgcacaacgagaggaagctctatctggtgtttgagttcctcagccaggacctgaagaagtacatggactccaccccaggctcagagctccccctgcacctcatcaagagctacctcttccagctgctgcagggggtgagtttctgccactcacatcgggtcatccaccgagacctgaagccccagaacctgctcatcaatgagttgggtgccatcaagctggctgacttcggcctggctcgcgccttcggggtgcccctgcgcacctacacccatgaggtggtgacactgtggtatcgcgcccccgagattctcttgggcagcaagttctataccacagctgtggatatctggagcattggttgcatctttgcagagatggtgactcgaaaagccctgtttcctggtgactctgagattgaccagctctttcgtatctttcgtatgctggggacacccagcgaagacacatggcccggggtcacccagctgcctgactataagggcagcttccctaagtggaccaggaagggactggaagagattgtgcccaatctggagccagagggcagggacctgctcatgcaactcctgcagtatgaccccagccagcggatcacagccaagactgccctggcccacccgtacttctcatcccctgagccctccccagctgcccgccagtatgtgctgcagcgattccgccattgagaatgtcaaggccacactcagatcctttctcgagcagctgctgccccagctgcctcctacccattgccaagagaggatgcatctggggagagcaaagcactaaggaattcagcatcagcctgcagagggctgagtctgggttagtcctgccc

SEQ ID NO: 94033 - DNA, 1568 bp, Artificial Sequence
  derived and/or modified sequence
gcccttcctggccgccatgtgtacccagagcctgggactggctgggctgggcagtgacccaggcagctctgtggccatggatatgttccagaaggtagagaagatcggagagggcacctatggggtggtgtacaaggccaagaacagggagacagggcagctggtggccctgaagaagatcagactggatttggagatggagggggtcccaagcactgccatcagggagatctcgctgctcaaggaactgaagcaccccaacatcgtccgactgctggacgtggtgcacaacgagaggaagctctatctggtgtttgagttcctcagccaggacctgaagaagtacatggactccaccccaggctcagagctccccctgcacctcatcaagagctacctcttccagctgctgcagggggtgagtttctgccactcacatcgggtcatccaccgagacctgaagccccagaacctgctcatcaatgagttgggtgccatcaagctggctgacttcggcctggctcgcgccttcggggtgcccctgcgcacctacacccatgaggtggtgacactgtggtatcgcgcccccgagattctcttgggcagcaagttctataccacagctgtggatatctggagcattggttgcatctttgcagagatggtgactcgaaaagccctgtttcctggtgactctgagattgaccagctctttcgtatctttcgtatgctggggacacccagcgaagacacatggcccggggtcacccagctgcctgactataagggcagcttccctaagtggaccaggaagggactggaagagattgtgcccaatctggagccagagggcagggacctgctcatgcaactcctgcagtatgaccccagccagcggatcacagccaagactgccctggcccacccgtacttctcatcccctgagccctccccagctgcccgccagtatgtgctgcagcgattccgccattgagaatgtcaaggccacactcagatcctttctcgagcagctgctgccccagctgcctcctacccattgccaagagaggatgcatctggggagagcaaagcactaaggaattcagcatcagcctgcagagggctgagtctgggttagtcctgcccgcaggttagcgagatcctgtgttgttttttgggttggacggtgccgtttcaaaatagaggcacagatgctccatgcacgaggggtccccgggcactggaacaagtgccaagttgaaggcagggggcctgccagagctgggtgtgggtattcaggccctcacctgccctgcctgcagggccagaccctgaggaaagggcgccccctgctggtctttttggatttaaaatgtttgggggaagagttgagttccagttcagtcccaagttaaacaggagggagtgagggagaggagagagggcgttccccggatcccaggagagctgggctatgactgcaataaggagttgttccttcacctgagatgtgcttcttttggttcatttctggcttgacaacaataaataaacgtggtatgttcctg

SEQ ID NO: 94034 - DNA, 918 bp, Artificial Sequence
  derived and/or modified sequence
atggacatgttccagaaggtggagaagatcggcgagggcacctacggcgtggtgtacaaggccaagaacagagagaccggccagctggtggccctgaagaagatcagactggacctggagatggagggcgtgcccagcaccgccatcagagagatcagcctgctgaaggagctgaagcaccccaacatcgtgagactgctggacgtggtgcacaacgagagaaagctgtacctggtgttcgagttcctgagccaggacctgaagaagtacatggacagcacccccggcagcgagctgcccctgcacctgatcaagagctacctgttccagctgctgcagggcgtgagcttctgccacagccacagagtgatccacagagacctgaagccccagaacctgctgatcaacgagctgggcgccatcaagctggccgacttcggcctggccagagccttcggcgtgcccctgagaacctacacccacgaggtggtgaccctgtggtacagagcccccgagatcctgctgggcagcaagttctacaccaccgccgtggacatctggagcatcggctgcatcttcgccgagatggtgaccagaaaggccctgttccccggcgacagcgagatcgaccagctgttcagaatcttcagaatgctgggcacccccagcgaggacacctggcccggcgtgacccagctgcccgactacaagggcagcttccccaagtggaccagaaagggcctggaggagatcgtgcccaacctggagcccgagggcagagacctgctgatgcagctgctgcagtacgaccccagccagagaatcaccgccaagaccgccctggcccacccctacttcagcagccccgagcccagccccgccgccagacagtacgtgctgcagagattcagacactag

SEQ ID NO: 94035 - protein, 669 aa, Artificial Sequence
  derived and/or modified sequence
MACEIMPLQSSQEDERPLSPFYLSAHVPQVSNVSATGELLERTIRSAVEQHLFDVNNSGGQSSEDSESGTLSASSATSARQRRRQSKEQDEVRHGRDKGLINKENTPSGFNHLDDCILNTQEVEKVHKNTFGCAGERSKPKRQKSSTKLSELHDNQDGLVNMESLNSTRSHERTGPDDFEWMSDERKGNEKDGGHTQHFESPTMKIQEHPSLSDTKQQRNQDAGDQEESFVSEVPQSDLTALCDEKNWEEPIPAFSSWQRENSDSDEAHLSPQAGRLIRQLLDEDSDPMLSPRFYAYGQSRQYLDDTEVPPSPPNSHSFMRRRSSSLGSYDDEQEDLTPAQLTRRIQSLKKKIRKFEDRFEEEKKYRPSHSDKAANPEVLKWTNDLAKFRRQLKESKLKISEEDLTPRMRQRSNTLPKSFGSQLEKEDEKKQELVDKAIKPSVEATLESIQRKLQEKRAESSRPEDIKDMTKDQIANEKVALQKALLYYESIHGRPVTKNERQVMKPLYDRYRLVKQILSRANTIPIIEEEEGSEDDSNVKPDFMVTLKTDFSARCFLDQFEDDADGFISPMDDKIPSKCSQDTGLSNLHAASIPELLEHLQEMREEKKRIRKKLRDFEDNFFRQNGRNVQKEDRTPMAEEYSEYKHIKAKLRLLEVLISKRDTDSKSM

SEQ ID NO: 94036 - DNA, 4945 bp, Artificial Sequence
  derived and/or modified sequence
attgaggagcagaaggagtagggtgcgggggaggaggaggagcgcctttagtgctgcagcagctgctgctctgattggcccggtggttcagctgcttccctggaacaaaaggtcaaagtggactgcagtgtaaatgtagagaagcagccgataaaatagcattgcctgaagaagtttggaggctgagagcagcagtagactggccaactgcagagcaagttgtttctccagccgtgcggtgcagcctcatgcccccaacccagcttagccactgtaagaagacgttcactgtacagacgaccaaacttgccgtggaagagacagttgtgagattcccttgcaaatttacatacgagaatggcttgtgaaatcatgcctctgcaaagttcacaggaagatgaaagacctctgtcacctttctatttgagtgctcatgtaccccaagtcagcaatgtgtctgcaaccggagaactcttagaaagaaccatccgatcagctgtagaacaacatctttttgatgttaataactctggaggtcaaagttcagaggactcagaatctggaacactatcagcatcttctgccacatctgccagacagcgccgccgccagtccaaggagcaggatgaagttcgacatgggagagacaagggacttatcaacaaagaaaatactccttctgggttcaaccaccttgatgattgtattttgaatactcaggaagtcgaaaaggtacacaaaaatacttttggttgtgctggagaaaggagcaagcctaaacgtcagaaatccagtactaaactttctgagcttcatgacaatcaggacggtcttgtgaatatggaaagtctcaattccacacgatctcatgagagaactggacctgatgattttgaatggatgtctgatgaaaggaaaggaaatgaaaaagatggtggacacactcagcattttgagagccccacaatgaagatccaggagcatcccagcctatctgacaccaaacagcagagaaatcaagatgccggtgaccaggaggagagctttgtctccgaagtgccccagtcggacctgactgcattgtgtgatgaaaagaactgggaagagcctatccctgctttctcctcctggcagcgggagaacagtgactctgatgaagcccacctctcgccgcaggctgggcgcctgatccgtcagctgctggacgaagacagcgaccccatgctctctcctcggttctacgcttatgggcagagcaggcaatacctggatgacacagaagtgcctccttccccaccaaactcccattctttcatgaggcggcgaagctcctctctggggtcctatgatgatgagcaagaggacctgacacctgcccagctcacacgaaggattcagagccttaaaaagaagatccggaagtttgaagatagattcgaagaagagaagaagtacagaccttcccacagtgacaaagcagccaatccggaggttctgaaatggacaaatgaccttgccaaattccggagacaacttaaagaatcaaaactaaagatatctgaagaggacctaactcccaggatgcggcagcgaagcaacacactccccaagagttttggttcccaacttgagaaagaagatgagaagaagcaagagctggtggataaagcaataaagcccagtgttgaagccacattggaatctattcagaggaagctccaggagaagcgagcggaaagcagccgccctgaggacattaaggatatgaccaaagaccagattgctaatgagaaagtggctctgcagaaagctctgttatattatgaaagcattcatggacggccggtaacaaagaacgaacggcaggtgatgaagccactatacgacaggtaccggctggtcaaacagatcctctcccgagctaacaccatacccatcattgaagaagaggaggggtcagaagacgatagcaatgtgaagccagacttcatggtcactctgaaaaccgatttcagtgcacgatgctttctggaccaattcgaagatgacgctgatggatttatttccccaatggatgataaaataccatcaaaatgcagccaggacacagggctttcaaatctccatgctgcctcaatacctgaactcctggaacacctccaggaaatgagagaagaaaagaaaaggattcgaaagaaacttcgggattttgaagacaactttttcagacagaatggaagaaatgtccagaaggaagaccgcactcctatggctgaagaatacagtgaatataagcacataaaggcgaaactgaggctcctggaggtgctcatcagcaagagagacactgattccaagtccatgtgaggggcatggccaagcacagggggctggcagctgcggtgagagtttactgtccccagagaaagtgcagctctggaaggcagccttggggctggccctgcaaagcatgcagcccttctgcctctagaccatttggcatcggctcctgtttccattgcctgccttagaaactggctggaagaagacaatgtgacctgacttaggcattttgtaattggaaagtcaagactgcagtatgtgcacatgcgcacgcgcatgcacgcacacacacacacagtagtggagctttcctaacactagcagagattaatcactacattagacaacactcatctacagagaatatacactgttcttccctggataactgagaaacaagagaccattctctgtctaactgtgataaaaacaagctcaggactttattctatagagcaaacttgctgtggagggccatgctctccttggacccagttaactgcaaacgtgcattggagccctatttgctgccgctgccattctagtgacctttccacagagctgcgccttcctcacgtgtgtgaaaggttttccccttcagccctcaggtagatggaagctgcatctgcccacgatggcagtgcagtcatcatcttcaggatgtttcttcaggacttcctcagctgacaaggaattttggtccctgcctaggaccgggtcatctgcagaggacagagagatggtaagcagctgtatgaatgctgattttaaaaccaggtcatgggagaagagcctggagattctttcctgaacactgactgcacttaccagtctgattttatcgtcaaacaccaagccaggctagcatgctcatggcaatctgtttggggctgttttgttgtggcactagccaaacataaaggggcttaagtcagcctgcatacagaggatcggggagagaaggggcctgtgttctcagcctcctgagtacttaccagagtttaatttttttaaaaaaaatctgcactaaaatccccaaactgacaggtaaatgtagccctcagagctcagcccaaggcagaatctaaatcacactattttcgagatcatgtataaaaagaaaaaaaagaagtcatgctgtgtggccaattataatttttttcaaagactttgtcacaaaactgtctatattagacattttggagggaccaggaaatgtaagacaccaaatcctccatctcttcagtgtgcctgatgtcacctcatgatttgctgttacttttttaactcctgcgccaaggacagtgggttctgtgtccacctttgtgctttgcgaggccgagcccaggcatctgctcgcctgccacggctgaccagagaaggtgcttcaggagctctgccttagacgacgtgttacagtatgaacacacagcagaggcaccctcgtatgttttgaaagttgccttctgaaagggcacagttttaaggaaaagaaaaagaatgtaaaactatactgacccgttttcagttttaaagggtcgtgagaaactggctggtccaatgggatttacagcaacattttccattgctgaagtgaggtagcagctctcttctgtcagctgaatgttaaggatggggaaaaagaatgcctttaagtttgctcttaatcgtatggaagcttgagctatgtgttggaagtgccctggttttaatccatacacaaagacggtacataatcctacaggtttaaatgtacataaaaatatagtttggaattctttgctctactgtttacattgcagattgctataatttcaaggagtgagattataaataaaatgatgcactttaggatgtttcctatttttgaaatctgaacatgaatcattcacatgaccaaaaattgtgtttttttaaaaatacatgtctagtctgtcctttaatagctctcttaaataagctatgatattaatcagatcattaccagttagcttttaaagcacatttgtttaagactatgtttttggaaaaatacgctacagaatttttttttaagctacaaataaatgagatgctactaattgttttggaatctgttgtttctgccaaaggtaaattaactaaagatttattcaggaatccccatttgaatttgtatgattcaataaaagaaaacaccaagtaagttatataaaataaattgtgtatgagatgttgtgttttcctttgtaatttccactaactaactaactaacttatattcttcatggaatggagcccagaagaaatgagaggaagcccttttcacactagatcttatttgaagaaatgtttgttagtcagtcagtcagtggtttctggctctgccgagggagatgtgttccccagcaaccatttctgcagcccagaatctcaaggcactagaggcggtgtcttaattaattggcttcacaaagacaaaatgctctggactgggatttttcctttgctgtgttgggaatatgtgtttattaattagcacatgccaacaaaataaatgtcaagagttatttcataagtgtaagtaaacttaagaattaaagagtgcagacttataattttc

SEQ ID NO: 94037 - DNA, 2010 bp, Artificial Sequence
  derived and/or modified sequence
atggcttgtgaaatcatgccactgcaaagctcccaggaagatgaacgccctctttccccattctacctgagtgcccacgttccccaggtgagcaatgttagcgccacaggggagttgctcgagagaacaattcgtagcgccgtggaacagcacctgtttgacgttaataatagtggcggacaatctagcgaggatagcgagtccggcacgctttcagcttcatcagccacctcagcgagacaacggcgcaggcagtccaaagaacaggatgaggtgaggcatggtagggataagggactcataaataaagagaacacgccctcaggtttcaatcacttggacgattgcatactgaacacccaggaggtggagaaagtccacaagaatacttttggctgtgccggtgagcgatccaaaccaaagaggcagaagtcctccactaaattgtccgaactgcatgacaatcaggacggattggtgaatatggaatccctgaatagcacgaggtcacacgagcggacaggtccggatgattttgaatggatgtctgatgaacggaaggggaacgaaaaagacgggggtcacacgcagcacttcgagtcaccaacaatgaaaatccaggaacatccaagtctttcggacactaagcaacaacgcaatcaagacgctggcgaccaggaagaatctttcgttagcgaggtccctcagagcgacctaactgcattgtgtgacgagaagaactgggaggaacctattcccgcattttcgagctggcagagggagaacagtgatagtgacgaggcccacctaagccctcaggccggccgactgatcaggcaactgttggatgaagatagcgatcccatgttgagccctcgcttctatgcatatgggcagtctagacagtatttggacgatacagaggtgccaccatctcctcccaatagtcattcattcatgcgcaggcgctcctcttcactgggctcctacgatgatgaacaggaggatctcacccctgctcagcttactagaaggattcaaagcctgaagaaaaagattagaaaattcgaagaccgatttgaggaagaaaaaaagtaccgcccgtcccactcagacaaggccgctaacccagaggtgctaaaatggaccaacgatctggctaagttccgccgacaattaaaagaatcgaaactcaagatctccgaggaagacctgacaccacggatgcgacagcggtccaacacactgcccaaatctttcggcagccagttggagaaggaggacgagaagaagcaagagcttgttgacaaggctatcaagccgagcgtcgaggcaaccctggagtctattcagcggaagttacaggagaagcgggcagagagcagcaggccagaagatattaaggatatgacaaaggatcagatagcaaatgagaaagttgcactacagaaagccctgctgtactatgaaagcatacatggtagaccagtgacgaagaatgagaggcaggtgatgaagcctctatatgatagatatcgactggtcaaacaaatcctgagtcgagccaatactattcccatcatcgaagaggaggaaggtagtgaggacgactctaacgtcaagcccgactttatggtaaccttgaaaacggacttctcagcccgctgttttcttgatcaatttgaggacgatgccgatggatttatatcacccatggacgataagatcccttccaaatgctcacaagacacaggcctgagcaatctgcatgctgcatcaatccccgagctgctggaacatctgcaggaaatgcgcgaagaaaaaaaacgcattcggaaaaagctgcgggactttgaggataacttctttcgccagaacgggcgcaacgtacagaaggaagaccgcactcctatggcagaggaatactcagaatataaacatatcaaggcaaagctcaggcttcttgaagtgctcataagcaaacgagataccgattccaagtctatgtag

SEQ ID NO: 94038 - DNA, 2010 bp, Artificial Sequence
  derived and/or modified sequence
atggcctgtgagatcatgcccctgcagagcagccaggaggatgagcggcccctgagccccttctacctgagcgcccacgtgccccaggtgtccaatgtgtctgccaccggggagctgctggagaggaccatccgctctgctgtggagcagcacctgtttgatgtgaacaacagcggcggccagagcagcgaggacagcgagagcggcaccctgagcgccagcagcgccaccagcgcccggcagaggcggcggcagagcaaggagcaggatgaggtgcgccacggccgggacaagggcctcatcaacaaggagaacacccccagcggcttcaaccacctggatgactgcatcctgaacacccaggaggtggagaaggtgcacaagaacaccttcggctgtgccggggagaggagcaagcccaagaggcagaagagcagcaccaagctgtctgagctgcatgacaaccaggacggcctggtgaacatggagagcctgaacagcaccaggagccatgagaggacaggcccagatgactttgagtggatgtctgatgagaggaaaggaaatgagaaggatggcggccacacccagcactttgagagccccaccatgaagatccaggagcaccccagcctgagtgacaccaagcagcagaggaaccaggatgctggggaccaggaggagagctttgtgtctgaggtgccccagagcgacctgacagccctgtgtgatgagaagaactgggaggagcccatcccagccttcagctcctggcagagagaaaattctgacagtgatgaggcccacctgagcccccaggccggccgcctcatccggcagctgctggatgaggacagcgaccccatgctgagcccccgcttctacgcctacggccagagccggcagtacctggatgacacagaggtgccccccagcccccccaacagccacagcttcatgagaagaagaagcagcagcctgggcagctatgatgatgagcaggaggacctgaccccagcccagctgacccggcgcatccagagcctgaagaagaagatcaggaagtttgaagatagatttgaggaggagaagaagtaccggcccagccacagcgacaaggccgccaaccctgaggtgctgaagtggaccaatgacctggccaagttccggcggcagctgaaggagagcaagctgaagatcagcgaggaggacctgacccccaggatgaggcagaggagcaacaccctgcccaagagctttggcagccagctggagaaggaggatgagaagaagcaggagctggtggacaaggccatcaagcccagcgtggaggccaccctggagagcatccagaggaagctgcaggagaagagagctgagagcagcaggcctgaggacatcaaggacatgaccaaggaccagatcgccaatgagaaggtggccctgcagaaggccctgctgtactatgagagcatccacggccggcctgtgaccaagaatgaaaggcaggtgatgaagcccctgtatgaccgctaccgcctggtgaagcagatcctgagccgggccaacaccatccccatcatcgaggaggaggagggctctgaagatgacagcaatgtgaagccagacttcatggtgaccctgaagacagacttcagcgcccgctgcttcctggaccagtttgaagatgatgctgatggcttcatcagccccatggatgacaagatccccagcaagtgcagccaggacaccggcctgagcaacctgcatgctgccagcatccctgagctgctggagcacctgcaggagatgagggaggagaagaagaggatcaggaagaagctgcgggactttgaggacaacttcttccggcagaatggaagaaatgtgcagaaggaggacaggacccccatggccgaggagtacagcgagtacaagcacatcaaggccaagctgcggctgctggaggtgctgatcagcaagagggacacagacagcaagtccatgtag

SEQ ID NO: 94039 - DNA, 2010 bp, Artificial Sequence
  derived and/or modified sequence
atggcctgcgagatcatgcccctgcagagcagccaggaggacgagcggccattgtcacctttttacctttctgcccatgtgccacaggtatctaacgtgagcgcaaccggcgaactccttgaacgtactattcgtagcgcagtcgaacagcacttgttcgacgtcaataattctgggggacagtctagcgaagatagcgaatccggtactctgtcagccagtagcgccacttcagcacggcagcggcgacgccagagtaaagagcaggatgaggtccggcatggccgcgacaaggggttgatcaataaagagaatacaccaagcgggttcaatcacctggatgactgcatcctgaatacccaggaagtcgagaaggtgcacaaaaacactttcggctgtgcaggcgaaaggagcaaacccaagcgccagaagagtagtaccaagctgtcagagctccatgacaatcaggacgggctggttaacatggagagtttgaattccacaagatcccatgaacggaccggcccagatgactttgagtggatgagcgacgaacggaaggggaatgaaaaagatgggggacacactcagcattttgagagtccaactatgaaaattcaggagcaccctagtttaagtgatactaagcaacagagaaatcaagacgccggcgaccaggaagaaagctttgtgtcagaagtgccccagagcgacttgacagctttgtgtgacgagaaaaactgggaagaacccattccagccttctcgagttggcagagggagaactcagactccgacgaggcccatttgtctccccaggccggccgtttaatcaggcagctattagacgaggactcggacccgatgctgagtccaaggttttacgcttacggccagagcaggcaatatctggacgatacggaagtacccccttctccacccaactcccacagctttatgaggcgtaggagctcttcactagggtcttacgacgacgaacaggaggatctgacaccagctcagttgaccaggcgtattcagtccctgaagaaaaaaatccgcaaatttgaggaccggttcgaggaagagaagaagtacagaccgagccatagtgataaagcggcgaatcccgaggtgctgaaatggaccaacgacctcgctaagttcaggcgccagttgaaggagtccaaacttaaaatctctgaagaggacctcacaccacgcatgaggcaaaggtcgaacacgctgcctaagtcttttggtagccagctcgagaaggaggatgagaagaaacaggagctggtcgacaaagcgattaaacccagtgtggaagcgaccctggaatccatccagagaaaactgcaagaaaagagggccgaaagctccagaccagaggacatcaaggacatgacaaaagatcagatcgccaacgaaaaagtcgcactacaaaaggccctcctgtactacgagtctatccatggtaggccagtgaccaaaaacgagcgccaagttatgaaacccctctatgaccggtaccggctcgtgaagcagatcttgagcagagctaataccatcccaattatagaggaggaagaagggtcagaggacgattccaatgtgaaacctgacttcatggtgaccctgaagacagacttctccgccaggtgtttcttagatcagtttgaagatgatgctgacggatttatctctccgatggatgataaaataccaagtaaatgctctcaggacaccggcctaagcaatctgcacgcggcatccatacctgaactgctggagcatttgcaggagatgcgagaggagaaaaaacggatcagaaaaaagcttcgggattttgaggacaattttttcaggcaaaatggccggaatgtacagaaagaggatcgcactcctatggctgaagagtactcagagtacaagcacattaaggctaaattgcggctgttagaagtactcatctcaaagcgggatactgactccaagtccatgtag

SEQ ID NO: 94040 - DNA, 2010 bp, Artificial Sequence
  derived and/or modified sequence
atggcttgtgaaataatgcctttgcaaagctcgcaggaggatgagcgccctctgtccccattctacctctccgcacatgtcccgcaggtcagcaatgtctcagctaccggagagctattggaacgcaccattcgaagtgccgttgaacaacatctcttcgacgtgaacaatagcgggggtcagagcagtgaagactccgaatcaggaacattatctgcctccagtgccacctccgccaggcagagaaggaggcagtcaaaggagcaggatgaggttcgccacggtcgggataaggggctcatcaataaggaaaataccccttctggttttaatcaccttgatgactgcattctaaatacccaggaagtggagaaagtgcataagaataccttcggatgtgcaggtgaaagatcaaaaccaaagaggcagaagtcctctacaaaactttcagaactgcatgacaatcaagacgggctagttaacatggaatctttaaacagcactcgatcacacgagaggacagggcctgatgatttcgaatggatgtccgatgaaagaaagggcaatgaaaaagacggagggcacacgcagcacttcgaatcccctaccatgaagatacaagagcatccgtctctgagcgataccaaacaacagcggaaccaggacgccggagatcaggaagagtccttcgtttcggaggtgcctcaaagtgaccttaccgccttatgtgacgagaagaactgggaggagccgatcccagccttctcttcctggcagcgcgagaactccgatagcgatgaggcacacctctctccccaagccggacgactcattcgtcaactgctggatgaagactccgaccccatgctctcgccgaggttttatgcttacggacagagccggcagtatttggatgacaccgaagttcccccttccccaccaaactcacactcattcatgaggcgtagaagtagcagtctcggctcctacgatgacgagcaagaagacttgacaccggctcagctgactcgcagaattcagagtctgaaaaagaagattcgcaagtttgaggatcgatttgaagaggagaaaaagtatcggccaagccacagtgataaggccgctaacccggaggtcctgaaatggacaaatgacctcgctaaattccgtagacagttgaaagaaagcaagctcaagatcagcgaggaggatttgaccccacgcatgagacagagatctaataccctccccaagtccttcggatcccagctggaaaaggaagacgaaaagaagcaggaactggtggacaaggccataaagccctcggttgaggcgacactggagagtatccaacgtaagcttcaagagaagagggcagaatcctcccggcctgaggacattaaggacatgaccaaggaccagatcgcgaacgagaaagttgctctgcagaaagccctactgtactacgaatcaatacacggccgtcccgtgaccaagaacgaacgacaagtaatgaaacctctatatgatcggtatcgtctggtgaagcaaatcctgtctagagccaacacgattccaataatagaagaagaggaaggttcagaggacgatagcaacgtcaagcctgactttatggtaacgttgaaaacagacttcagtgccaggtgtttcctcgatcagttcgaggacgatgcagatggatttattagccccatggacgacaagattccatctaaatgttcccaggatactggcctgtctaaccttcatgcagctagcatccccgagctgttggaacatcttcaggaaatgcgtgaagaaaaaaagaggatacgtaaaaagctgagagactttgaggataacttctttcggcagaacggtagaaacgtgcagaaggaagaccgaactccaatggccgaagaatacagtgaatacaagcacataaaggccaaacttcggctgctcgaagtgctgatatcaaagagggatacggatagcaaatcgatgtag

SEQ ID NO: 94041 - DNA, 2010 bp, Artificial Sequence
  derived and/or modified sequence
atggcctgcgagatcatgcccctgcagagcagccaggaggacgagagacccctgagccccttctacctgagcgcccacgtgccccaggtgagcaacgtgagcgccaccggcgagctgctggagagaaccatcagaagcgccgtggagcagcacctgttcgacgtgaacaacagcggcggccagagcagcgaggacagcgagagcggcaccctgagcgccagcagcgccaccagcgccagacagagaagaagacagagcaaggagcaggacgaggtgagacacggcagagacaagggcctgatcaacaaggagaacacccccagcggcttcaaccacctggacgactgcatcctgaacacccaggaggtggagaaggtgcacaagaacaccttcggctgcgccggcgagagaagcaagcccaagagacagaagagcagcaccaagctgagcgagctgcacgacaaccaggacggcctggtgaacatggagagcctgaacagcaccagaagccacgagagaaccggccccgacgacttcgagtggatgagcgacgagagaaagggcaacgagaaggacggcggccacacccagcacttcgagagccccaccatgaagatccaggagcaccccagcctgagcgacaccaagcagcagagaaaccaggacgccggcgaccaggaggagagcttcgtgagcgaggtgccccagagcgacctgaccgccctgtgcgacgagaagaactgggaggagcccatccccgccttcagcagctggcagagagagaacagcgacagcgacgaggcccacctgagcccccaggccggcagactgatcagacagctgctggacgaggacagcgaccccatgctgagccccagattctacgcctacggccagagcagacagtacctggacgacaccgaggtgccccccagcccccccaacagccacagcttcatgagaagaagaagcagcagcctgggcagctacgacgacgagcaggaggacctgacccccgcccagctgaccagaagaatccagagcctgaagaagaagatcagaaagttcgaggacagattcgaggaggagaagaagtacagacccagccacagcgacaaggccgccaaccccgaggtgctgaagtggaccaacgacctggccaagttcagaagacagctgaaggagagcaagctgaagatcagcgaggaggacctgacccccagaatgagacagagaagcaacaccctgcccaagagcttcggcagccagctggagaaggaggacgagaagaagcaggagctggtggacaaggccatcaagcccagcgtggaggccaccctggagagcatccagagaaagctgcaggagaagagagccgagagcagcagacccgaggacatcaaggacatgaccaaggaccagatcgccaacgagaaggtggccctgcagaaggccctgctgtactacgagagcatccacggcagacccgtgaccaagaacgagagacaggtgatgaagcccctgtacgacagatacagactggtgaagcagatcctgagcagagccaacaccatccccatcatcgaggaggaggagggcagcgaggacgacagcaacgtgaagcccgacttcatggtgaccctgaagaccgacttcagcgccagatgcttcctggaccagttcgaggacgacgccgacggcttcatcagccccatggacgacaagatccccagcaagtgcagccaggacaccggcctgagcaacctgcacgccgccagcatccccgagctgctggagcacctgcaggagatgagagaggagaagaagagaatcagaaagaagctgagagacttcgaggacaacttcttcagacagaacggcagaaacgtgcagaaggaggacagaacccccatggccgaggagtacagcgagtacaagcacatcaaggccaagctgagactgctggaggtgctgatcagcaagagagacaccgacagcaagagcatgtag

SEQ ID NO: 94042 - DNA, 192 bp, Artificial Sequence
  derived and/or modified sequence
atggccgcccccctgagcgtggaggtggagttcggcagcagccccggctgcctgttcctgtggagcagcttcgccgaggtggtgagaagcagctgcctgaccgtgctgagaaacatcgagagcctgtgcctggacagaagaaaccccggcaccagcggcacctgcagcagcggcagcagaagaatctgctag

SEQ ID NO: 94043 - DNA, 192 bp, Artificial Sequence
  derived and/or modified sequence
atggccgcccccctgagcgtggaggtggagttcggcggcggcgccgagctgctgttcgacggcatcaagaagcacagagtgaccctgcccggccaggaggagccctgggacatcagaaacctgctgatctggatcaagaagaacctgctgaaggagagacccgagctgttcatccagggcgacagcgtgtag

SEQ ID NO: 94044 - DNA, 192 bp, Artificial Sequence
  derived and/or modified sequence
atggctgctcccttaagcgtcgaagtggagttcgggagctcccctggatgcctattcctgtggagctcattcgcagaggtagtgagatccagctgcctcaccgtgctccgcaatatcgaaagcttatgcttggatagacgaaatccaggtacttcagggacatgcagctccgggtcacggcgaatctgttag

SEQ ID NO: 94045 - DNA, 192 bp, Artificial Sequence
  derived and/or modified sequence
atggcagccccgcttagcgtggaggtggagtttggtggaggagctgaattattgttcgatggcattaaaaagcaccgtgtcaccctgcccgggcaggaagaaccgtgggatataaggaacctgctgatttggatcaagaaaaacctgttgaaggaaagacctgaactgtttattcagggagacagcgtgtag

SEQ ID NO: 94046 - DNA, 192 bp, Artificial Sequence
  derived and/or modified sequence
atggccgcccccctgtctgtggaggtggagtttggaggcggcgctgagctgctgtttgatggcatcaagaagcaccgggtgaccctgcccggccaggaggagccctgggacatccggaacctgctgatctggatcaagaagaacctgctgaaggagaggcctgagctgttcatccagggcgacagcgtgtag

SEQ ID NO: 94047 - DNA, 192 bp, Artificial Sequence
  derived and/or modified sequence
atggccgcccccctgagcgtggaggtggagttcggcagcagccccggttgtttgtttctatggagtagttttgccgaggtagtgaggtcctcttgccttaccgtactcagaaatatagaatccctgtgcttggatagacgcaacccaggaacctccggaacttgctctagcggaagtcgaagaatctgttag

SEQ ID NO: 94048 - DNA, 192 bp, Artificial Sequence
  derived and/or modified sequence
atggccgcccccctgagcgtggaggtggagttcggcggcggcgccgaacttctgtttgatggcatcaaaaaacatagagttaccttgcccggacaggaggaaccttgggacatccgtaacctccttatctggatcaaaaaaaacttactgaaggaacgacccgaactttttatacaaggagacagtgtctag

SEQ ID NO: 94049 - DNA, 192 bp, Artificial Sequence
  derived and/or modified sequence
atggcagcccctctctctgtcgaagtggagtttgggggaggggctgagctgttattcgatggcatcaagaaacacagggtgaccctcccaggccaggaggagccttgggatatcagaaacctgctcatttggatcaaaaagaatcttctgaaggaacggcctgagctttttatacagggtgatagtgtgtag

SEQ ID NO: 94050 - DNA, 753 bp, Artificial Sequence
  derived and/or modified sequence
cttcctcaacatggctgcgcccttgtcagtggaggtggagttcgggagctcacctggctgtctttttctctggtcctcctttgcagaggtggtgcggagctcctgtttgacggtattaagaaacatcgagtcactttgcctggacaggaggaaccctgggacatccggaacctgctcatctggatcaagaagaatttgctaaaagagcggccagagttgttcatccagggagacagcgtgtgagtcccactcctcccttccctgaagcaggtggagggagggacggatatttgagcccccaccctcgggttcagtcctggccttctctgaatccggttctccccttcctcctccctaactcttccagctctgagatctgttttcagttttcttgttactaaaccgaactcttgaggattttttaaatcccagatgaaaggagcctggtgaatttctcagaaaacttggattctgccctctggttgccacagacttgctgtgggaccttaggcgacttacttcgcttctctgggcctcagttactctctacacagaaagtgctgaggaaaaaacgtagctagtacaactgaagagctaaatattctgttttatttcattgtaatttaaatagccacatgcagctagtagattaccatacagtgcagcacgggtctagaattccaaggagtcattgactctgtgcgtgcacacacccatgcacatgcacacacactcactggggacaccccatag

SEQ ID NO: 94051 - protein, 157 aa, Artificial Sequence
  derived and/or modified sequence
MDPRLPAWALVLLGPALVFALGPAPTPEMREKLCGHHFVRALVRVCGGPRWSTEARRPATGGDQRESHSVSQAGLKLLSSSNPPTLTFQSVGISDVSCYSGWRDDICSMGWWPTVISRWDLACSPCPRPLTITATTVQLPPTLHATAASVAVPNKTC

SEQ ID NO: 94052 - DNA, 474 bp, Artificial Sequence
  derived and/or modified sequence
atggatcctcgactccctgcctgggccctggtccttctgggacctgctcttgtttttgccttgggacctgccccaaccccagagatgagggagaagctgtgcgggcaccacttcgttcgagctctggtcagggtctgcggcgggcctcggtggtctactgaagccagacggcctgccaccggcggagatcagcgcgagagccactctgtcagtcaggcagggctgaagctgctgagttcatctaatcctcctacgcttacctttcaatccgtcgggatatccgacgtgagttgctacagcggctggcgagacgatatatgttcaatgggctggtggcctacagtaatttcacgctgggaccttgcatgcagcccatgccctcgccccttaaccatcacagccaccaccgttcagctaccccctaccctgcacgccactgctgcatctgtggccgttcctaataagacatgctag

SEQ ID NO: 94053 - DNA, 898 bp, Artificial Sequence
  derived and/or modified sequence
cccccagctgggacggcccaggcgcctataaagggggtccccgcttggccccggcgccacccaccaccatggacccccgtctgcccgcctgggcgctggtgctgctgggccctgccctggtgttcgcgttgggccccgcgcccaccccagagatgcgtgagaagttgtgcggccaccacttcgtacgcgcgctagtgcgcgtgtgcgggggcccccgctggtccaccgaagccaggaggcctgcgaccggaggcgaccagagggagtctcactctgtttcccaggctggtctcaaactcctgagctcaagtaatcctcccaccttgaccttccaaagtgttgggattagcgatgtgagttgctacagtggctggagagacgacatctgctccatgggctggtggccgacagtaatctcacgctgggacctggcctgcagcccctgccccagacctctcaccatcaccgccaccaccgtgcagctgccaccaaccctgcacgctactgctgcctcagtggctgtacccaacaagacctgctgaccctctgtccctactgattcctccttgggtgcagcctcagagtggcctgaggcccagagggtctggtctggtgagctcctgaggccacacagcaccataaagtctcgcatctacaggcctttgattacctcctgggatgggtgctcactatctaccccagaccaatgccacctgcagcctgtggagtcaactgcagaataaatcacaccctagccctggcttggaggatccccgctttcacagatgctggacactgacagccaaatgtcctcactccaggggagccccagacgctccgctccctgcatgtgtaacaccccttcttgctgtctcttagtaaataaacgacccaaagc

SEQ ID NO: 94054 - DNA, 474 bp, Artificial Sequence
  derived and/or modified sequence
atggacccccggctgcctgcctgggccctggtgctgctgggccctgccctggtgtttgccctgggccctgcccccaccccagagatgagggagaagctgtgtggccaccactttgtgcgggccctggtgcgggtgtgtggcggcccccgctggagcacagaggcccggcggcctgccaccggcggggaccagcgggagagccacagcgtgtcccaggccggcctgaagctgctgagcagcagcaacccccccaccctgaccttccagagcgtgggcatcagtgatgtgtcctgctacagcggctggagagatgacatctgcagcatgggctggtggcccaccgtcatcagccgctgggacctggcctgcagcccctgcccccggcccctgaccatcacagccaccaccgtgcagctgccccccaccctgcacgccacagctgcctctgtggccgtgcccaacaagacctgctag

SEQ ID NO: 94055 - DNA, 474 bp, Artificial Sequence
  derived and/or modified sequence
atggacccccggctgcccgcctgggccctggtgctgctgggccccgcgcttgtgttcgccctggggccagctcccactcccgagatgcgggagaagctgtgcggccatcacttcgttagagccctggttcgggtttgtgggggtccgcgctggtctacagaggctagaagacccgccaccgggggggatcagagggaaagccattcagttagtcaagctggtctgaagctgcttagttcatcaaaccctccaactctgacgtttcagagcgttggcattagtgacgtctcatgctattcaggctggcgggacgacatctgctcaatgggctggtggcccaccgtgatttcgaggtgggacctggcctgctccccttgtccgaggccactaaccatcacggcaaccactgtacaactccctccgactctgcacgccactgctgcttctgtggctgtgccaaacaagacttgctag

SEQ ID NO: 94056 - DNA, 474 bp, Artificial Sequence
  derived and/or modified sequence
atggatccgaggctgcctgcttgggcattagtcctgctgggcccagcgctagtgttcgccttgggacccgcacctactcctgagatgagggagaaactgtgtggacatcattttgtgcgcgcactcgtcagggtctgtggcggacccaggtggtcgactgaagcaaggcgcccagcaactggaggtgatcagagagagagtcacagcgtgtcccaagcagggctcaagctgctgtcatcttccaatcctcctacgctcacatttcaaagcgttggaatctccgatgtatcctgttactctgggtggcgggatgacatctgctccatgggctggtggcccacagtcatatcccgctgggatctggcctgcagcccatgccctcgtccactgaccatcactgcaactacggtacagctgcccccaacactgcacgccaccgccgcttccgttgccgtccccaataaaacttgttag

SEQ ID NO: 94057 - DNA, 474 bp, Artificial Sequence
  derived and/or modified sequence
atggaccccagactgcccgcctgggccctggtgctgctgggccccgccctggtgttcgccctgggccccgcccccacccccgagatgagagagaagctgtgcggccaccacttcgtgagagccctggtgagagtgtgcggcggccccagatggagcaccgaggccagaagacccgccaccggcggcgaccagagagagagccacagcgtgagccaggccggcctgaagctgctgagcagcagcaacccccccaccctgaccttccagagcgtgggcatcagcgacgtgagctgctacagcggctggagagacgacatctgcagcatgggctggtggcccaccgtgatcagcagatgggacctggcctgcagcccctgccccagacccctgaccatcaccgccaccaccgtgcagctgccccccaccctgcacgccaccgccgccagcgtggccgtgcccaacaagacctgctag

SEQ ID NO: 94058 - DNA, 1339 bp, Artificial Sequence
  derived and/or modified sequence
agtaagagctcagtctcttcaccaggggctcccagtccttccatctgggaggccaaggcggcttcgcgttctgagaatagacagaacctctgttactctgtgaccggcaggcaccgggagatccgtagctcagacgccaggacatcccggaagctgggaaatggtgaatgtgccagatatcttttctcatgatactcaaggcctcttaagaaagaagcttatagaagcatcattccaaaaagtgatattggatggatatgggagctgtggccctcagaatttaaacttaaggaaagagtgggaaagtgagggtaagtgtgaaggtcacaatggatattatgatggacatacaaaatgtaagacaactacctataacaaaaacctcactgttacaggaggtcaaaaacatgaaaaaactcaatttatgtcagttgctttttctaaaccatgtgtttctgtaagtaagtgtcaacatcaatttttgaaacttaccttttcttttaaaggaaatttggataatccgaatagtgacttagtccatgtttcaaataatcatttaaaccaattaaaatatagaactggagtaaatgttcagtcaaatatttctgaaaaggagagatttaaaaacgaggaggtgatttctaaatatgatcaatttgatggatctttgttaaaagtttgtttcaccaacaaataacacctcgttctgcctgtgatcaatatagaaaggtcttcattcattcatcattgcttaatcaatgtcaaggaatagataatttgggaaaatatcacacacataataaaactttgacagcctttaggcaggactataccctaaataattaccagtatatttgtgttgcagagaaaaatcagtacaataaatctgatacaacattaagccaaggcataagccccagaagacatcagaaaactcattttctacataaccattgcaaacgtaaaaaatgtgagaaagcctttcatgaatgcaccaaccatgtccatcagagtatctttattcaagagaagtctgccaaatgtaataagtgtatagaaacttttatccagtcatcaaaacatactcagcctcagagaatccatattggagaaaagtcacacagatgtaataatggtgagaaaatccttagtaaattgtcaagtctaagaaaacataagataatccataatgaagagaaaccttacaaatgtaaagaatgtgacaaagcctttaaccatcgttcacaccttactcaacatcaaataattcatactggagagaaaccatacaaatgtaaagaatgtggcaaagccttcaattctagttcatattttacta

SEQ ID NO: 94059 - protein, 1032 aa, Artificial Sequence
  derived and/or modified sequence
MAEPSAATQSHSISSSSFGAEPSAPGGGGSPGACPALGTKSCSSSCADSFVSSSSSQPVSLFSTSQEGLSSLCSDEPSSEIMTSSFLSSSEIHNTGLTILHGEKSHVLGSQPILAKEGKDHLDLLDMKKMEKPQGTSNNVSDSSVSLAAGVHCDRPSIPASFPEHPAFLSKKIGQVEEQIDKETKNPNGVSSREAKTALDADDRFTLLTAQKPPTEYSKVEGIYTYSLSPSKVSGDDVIEKDSPESPFEVIIDKAAFDKEFKDSYKESTDDFGSWSVHTDKESSEDISETNDKLFPLRNKEAGRYPMSALLSRQFSHTNAALEEVSRCVNDMHNFTNEILTWDLVPQVKQQTDKSSDCITKTTGLDMSEYNSEIPVVNLKTSTHQKTPVCSIDGSTPITKSTGDWAEASLQQENAITGKPVPDSLNSTKEFSIKGVQGNMQKQDDTLAELPGSPPEKCDSLGSGVATVKVVLPDDHLKDEMDWQSSALGEITEADSSGESDDTVIEDITADTSFENNKIQAEKPVSIPSAVVKTGEREIKEIPSCEREEKTSKNFEELVSDSELHQDQPDILGRSPASEAACSKVPDTNVSLEDVSEVAPEKPITTENPKLPSTVSPNVFNETEFSLNVTTSAYLESLHGKNVKHIDDSSPEDLIAAFTETRDKGIVDSERNAFKAISEKMTDFKTTPPVEVLHENESGGSEIKDIGSKYSEQSKETNGSEPLGVFPTQGTPVASLDLEQEQLTIKALKELGERQVEKSTSAQRDAELPSEEVLKQTFTFAPESWPQRSYDILERNVKNGSDLGISQKPITIRETTRVDAVSSLSKTELVKKHVLARLLTDFSVHDLIFWRDVKKTGFVFGTTLIMLLSLAAFSVISVVSYLILALLSVTISFRIYKSVIQAVQKSEEGHPFKAYLDVDITLSSEAFHNYMNAAMVHINRALKLIIRLFLVEDLVDSLKLAVFMWLMTYVGAVFNGITLLILAELLIFSVPIVYEKYKTQIDHYVGIARDQTKSIVEKIQAKLPGIAKKKAE

SEQ ID NO: 94060 - DNA, 3042 bp, Artificial Sequence
  derived and/or modified sequence
atggcagaacccagcgcagccacgcagtcccattcaataagcagcagttccttcggtgcggaaccgagcgctcccgggggcggcggtagcccgggagcttgtcccgcactcgggactaagagctgctcttcatcatgcgcagagggcctcagttccctgtgctctgatgagccttcctccgaaattatgacaagctctttcttgagctccagtgaaattcacaacacgggtttgacaatcctgcatggagagaagtcccacgtccttggcagccagcccattctggctaaggaaggaaaggaccacttggacctcttggatatgaagaagatggaaaagccccagggcacgagtaataatgtgtcagacagctccgtctccctggctgcaggggtgcactgtgaccggccttccattcccgctagcttccctgaacaccccgcctttctgagtaagaagatcggccaggttgaagaacagatagacaaggagactaagaaccccaacggcgtgtccagcagggaggccaagaccgcgctcgatgcagacgatcgattcactctgttgaccgcacagaagccccctacagagtattccaaggtggaaggaatctacacttactctctgagccctagtaaggtatcaggggatgatgtgatcgagaaggattcccccgaatcacccttcgaggtcattatcgataaagcggcattcgataaggagtttaaagattcctataaggaatcgactgacgatttcgggagctggagcgtgcataccgataaggagtcctctgaagatatctcggaaactaacgataaactgttccccctcaggaacaaggaggccggcaggtaccctatgagtgctctgctcagccggcaattttcacacacaaacgcggcactggaagaagtctcccgttgcgttaacgatatgcataacttcactaatgagattctgacatgggatctggtgccacaggtaaagcagcaaaccgataaaagctcagattgtataactaaaacaaccggactggatatgtcggaatacaactcggaaatcccggtagtgaacttaaaaactagcacccaccagaagacacccgtgtgtagcattgatgggtctacccctatcaccaagtctacaggagattgggctgaggcctctctgcaacaagagaacgctattaccgggaagccggtgccagacagcctgaattcaaccaaggagttctcaataaagggagtgcaaggcaacatgcaaaaacaggatgacacattggctgagctcccgggttccccgcctgaaaaatgcgacagtctcgggagtggagtggcaacagtgaaggtcgtgcttcccgatgaccatctgaaagatgagatggactggcagtccagcgccctgggcgaaatcaccgaggccgactcctcaggagagtcagacgacacagtgatagaggacattaccgctgacactagtttcgaaaataataagattcaggcagagaagccggtgagcattccatctgccgtcgtgaagacaggcgagagagaaataaaagaaattccatcctgtgagcgggaagaaaagacaagcaagaactttgaggagctggtctcagactctgaactccaccaggaccagcccgatatcttgggaaggagtccagcttctgaagccgcatgtagcaaggtaccagacacgaatgtctctctagaggacgtgtccgaagtggccccagagaagcccataacaactgaaaatcctaaactgcccagcaccgtctctccgaacgtcttcaatgagacagaatttagcctgaatgttactacctccgcttatctggagtctctccacggtaagaatgtgaaacacattgacgattcatcgcctgaagatctgattgccgctttcacggagactcgggacaagggtatagtcgatagtgagcgcaacgcgttcaaagcgatctccgagaagatgacggatttcaaaacaactcctcccgtggaggtcttacacgagaacgagagtggcggctcagaaatcaaagacatcgggtccaaatactccgagcagagcaaagagacaaatggctccgagcccctcggggtttttccaacacaaggaacaccggtggccagccttgatctagagcaggagcagctcactattaaagccctgaaggagctcggggagaggcaagttgagaagtctacctcagctcagagggatgccgaactcccaagcgaggaggtcttaaagcagacctttaccttcgccccagagagttggcctcagcggtcttacgatatcttggagcggaatgttaaaaatgggtcagacctgggcatctcacagaagcctataaccatcagggagactacacgcgttgatgcagtgtcttccctgtcaaaaacagaactcgtgaaaaaacatgttctggccaggctcctcactgactttagcgtccatgacctgattttttggcgggacgtgaagaagactgggtttgtatttgggaccacgctgattatgctcttgtccctggccgcattctcagtgatcagcgtagtttcctacctgatactcgctctgttatctgtgactatatcttttcggatttacaagtccgttatccaggccgtgcagaagagcgaggagggccacccatttaaagcttatctggatgtcgacatcaccctcagtagcgaggcctttcacaactatatgaatgcagccatggttcacattaatagggcactcaagctcattatacggctgtttctcgtagaagatcttgtggatagtctcaaacttgcagttttcatgtggctgatgacatacgtgggtgctgtgttcaacggcataacattgctgatcctagccgagctcttgattttctcggtgcctattgtgtacgagaaatacaagacccagatcgaccactatgtggggatcgcacgtgaccagaccaagagcatcgtggaaaaaattcaggcaaaacttcctgggattgcgaagaaaaaagccgaatag

SEQ ID NO: 94061 - DNA, 3099 bp, Artificial Sequence
  derived and/or modified sequence
atggcggagcccagcgctgcaacccaatcacacagcatatcttcaagcagcttcggagcagaaccgtcagcgccaggtggaggcggctcaccaggcgcatgcccggccctcggtactaaaagctgttcttctagttgcgcagattcgttcgtttcttcctcctcatcccagcccgtgtcactcttctcgacctcccaagaaggcctgtccagcctgtgctcagacgaaccatcgagcgagattatgacatcgtccttcctgagctcctccgaaattcataacacaggattaacaatcttacacggggagaagtctcacgtgctcgggtcgcagcctattttggcaaaagagggcaaggatcatcttgatctgctcgatatgaagaaaatggagaaaccacaggggacgtccaacaatgtttcagacagttcggtgtctctggcagccggcgttcattgcgaccggccttctattcctgccagcttcccagagcatcctgcttttctatctaaaaaaatcggtcaagttgaggagcaaattgacaaggagacgaaaaacccaaatggagtgtcaagccgcgaggccaagactgcactggacgctgatgacagatttactctactaacagcccagaagccacctactgaatactcgaaagtcgagggaatatacacctatagcttgagcccaagtaaggtttcaggagatgatgtgatcgagaaagatagccctgagtcaccctttgaggttatcattgataaggcagcttttgataaggaatttaaggattcctacaaagaaagtacagacgactttggatcttggtctgtacacacagataaagaatcgtccgaagacatttcagaaaccaatgataaactgtttcccctccgcaataaggaggccggcagatacccaatgagtgccctgctttccagacagttttctcacaccaacgccgcacttgaggaggtgtcccggtgcgttaatgatatgcataacttcaccaatgagatcttaacctgggacctggttcctcaggtcaagcagcagaccgacaagtccagtgactgtattacgaagacgaccggtttggatatgagcgaatataattccgagattcctgtggtgaatcttaaaaccagcactcaccagaaaaccccagtctgcagtattgacggctccaccccgatcacaaaaagcaccggcgattgggccgaggcatcactgcagcaggagaatgcaatcaccggaaagcccgtccctgatagtttgaacagtactaaggagtttagcattaagggcgtccagggaaatatgcagaagcaggacgacaccttggccgaacttcctgggagtcctcccgagaaatgtgatagtcttgggtctggagtggctaccgtgaaagtagtgttacctgatgaccatctaaaggatgaaatggactggcagtcctccgctctcggcgagatcacggaagcagattcctccggcgagtccgacgacaccgttatagaagacattactgccgatactagcttcgaaaacaataagatacaagcagagaagccagtcagtattccttctgctgtggttaagacaggggaaagagagattaaagaaataccatcctgcgagagagaagaaaagacctcaaaaaatttcgaggagctggtgtctgactctgagctgcatcaggatcaacctgatatattgggacggagtcccgcctctgaggcggcttgctccaaagtgccggacactaacgtgagcctggaggacgtttccgaagtcgctcctgaaaagcccattacaactgagaaccctaagcttcctagcactgttagtccgaacgtctttaatgagaccgagttctccttgaacgtaacgacttctgcatacttggaaagtcttcacggaaaaaatgtgaagcatattgatgattcctctcctgaggatcttatcgctgccttcaccgaaacaagagataaagggattgtcgacagtgagagaaatgcttttaaagccatttccgaaaaaatgacagatttcaaaaccacaccacctgtggaagttctccacgaaaatgaatctgggggctccgaaatcaaggatattggatccaagtactcagaacagagtaaggagaccaacggctctgagcctctcggagtgtttccaactcaggggactcctgtagcgtccctggacctggaacaggagcaactgactattaaagcccttaaggagctgggggagcgacaagtcgaaaagtcgacttctgcacagagagatgccgaacttccttcagaagaggtgctcaagcaaacattcacgttcgcacctgagtcttggccacagagaagctacgatatcctggaacggaacgtgaagaatggatctgatctgggtatatcccaaaagccgatcaccattcgggaaactacgagggttgacgcagtgagcagcctctcgaagactgaacttgttaaaaagcacgttctcgcccgcctcctgactgatttcagcgtgcacgatttaatattctggcgagatgtcaagaaaactggctttgtcttcggaaccactctaattatgctcttgtcccttgccgccttctccgttatctcagtcgtgtcttacctgatcctggcgctgctgtctgtaacgatctcattccgaatctacaaatccgtgatccaggcagtccaaaagagtgaggagggccacccatttaaagcctacctggacgtggacatcactttgtcctctgaggcatttcacaactacatgaacgctgccatggtccatatcaatagagctctgaaattgataatcagattatttctagtagaggatctggtagattcgctgaagctagccgtttttatgtggttaatgacttacgtcggggctgtgttcaacgggataaccctgcttattctggctgagctcctcattttttcagtgcccattgtctacgagaagtacaagactcagattgatcactacgttggcatagcacgagatcagaccaaatctatcgtggagaagatacaggcgaaactgccagggattgctaaaaaaaaggctgagtag

SEQ ID NO: 94062 - DNA, 3042 bp, Artificial Sequence
  derived and/or modified sequence
atggccgagcccagcgctgccacccagagccacagcatcagcagcagcagctttggagctgagcccagcgcccctgggggcggcggcagccctggggcctgcccagccctgggcaccaagagctgcagcagcagctgtgccgagggcctgagcagcctgtgcagtgatgagcccagcagcgagatcatgaccagcagcttcctgagcagcagcgagatccacaacacaggcctgaccatcctgcacggggagaagagccacgtgctgggcagccagcccatcctggccaaggagggcaaggaccacctggacctgctggacatgaagaagatggagaagccccagggcaccagcaacaacgtgtctgacagctctgtgtccctggccgccggcgtgcactgtgaccggcccagcatcccagccagcttccctgagcacccagccttcctgagcaagaagattggccaggtggaggagcagattgacaaggagaccaagaaccccaatggagtgagcagccgggaggccaagacagccctggatgctgatgaccgcttcaccctgctgacagcccagaagccacccacagagtacagcaaggtggagggcatctacacctacagcctgagccccagcaaggtgtctggagatgatgtgattgagaaggacagccctgagagcccctttgaagtcatcatcgacaaggccgcctttgacaaggagttcaaggacagctacaaggagagcacagatgactttggctcctggagcgtgcacacagacaaggagagcagcgaggacatcagcgagaccaatgacaagctgttccccctgaggaacaaggaggccggccgctaccccatgtctgccctgctgagccggcagttcagccacaccaatgctgccctggaggaggtgagccgctgtgtgaatgacatgcacaacttcaccaatgagatcctgacctgggacctggtgccccaggtgaagcagcagacagacaagagcagtgactgcatcaccaagaccaccggcctggacatgtctgagtacaacagcgagatccctgtggtgaacctgaagaccagcacccaccagaagacccctgtgtgcagcattgatggcagcacccccatcaccaagagcactggagactgggccgaggccagcctgcagcaggagaatgccatcaccgggaagcctgtgcctgacagcctgaacagcaccaaggagttcagcatcaagggcgtgcagggcaacatgcagaagcaggatgacaccctggccgagctgcccggcagccccccagagaagtgtgacagcctgggcagcggcgtggccaccgtgaaggtggtgctgcctgatgaccacctgaaggatgagatggactggcagagcagcgccctgggggagatcacagaagctgacagcagcggggagagtgatgacacagtgattgaggacatcacagctgacaccagctttgagaacaacaagatccaggccgagaagcctgtgtccatccccagcgctgtggtgaagacaggagagcgggagatcaaggagatccccagctgtgagcgggaggagaagaccagcaagaactttgaggagctggtgtctgattctgagctgcaccaggaccagcctgacatcctgggccgcagccctgccagcgaggccgcctgcagcaaggtgcctgacaccaacgtgtccctggaggatgtgtctgaggtggcccctgagaagcccatcaccacagagaaccccaagctgcccagcacagtgagccccaacgtgttcaatgaaacagagttcagcctgaatgtgaccaccagcgcctacctggagagcctgcacggcaagaatgtgaagcacattgatgacagcagccctgaggacctgattgctgccttcacagagacccgggacaagggcatcgtggacagcgagagaaatgccttcaaggccatcagcgagaagatgacagacttcaagaccaccccacctgtggaggtgctgcatgaaaatgaaagtggcggcagcgagatcaaggacatcggcagcaagtacagcgagcagagcaaggagaccaatggaagtgagcccctgggcgtcttccccacccagggcacccctgtggccagcctggacctggagcaggagcagctgaccatcaaggccctgaaggagctgggggagcggcaggtggagaagagcaccagcgcccagagagatgctgagctgcccagcgaggaggtgctgaagcagaccttcacctttgcccctgagagctggccccagaggagctatgacatcctggagagaaatgtgaagaatggaagtgacctgggcatcagccagaagcccatcaccatccgggagaccaccagggtggatgctgtgagcagcctgagcaagacagagctggtgaagaagcacgtgctggcccggctgctgacagacttctctgtgcatgacctgatcttctggagagatgtgaagaagacaggctttgtgtttggcaccaccctcatcatgctgctgagcctggccgccttcagcgtcatctctgtggtgtcctacctgatcctggccctgctgtctgtgaccatctccttccgcatctacaagagcgtcatccaggccgtgcagaagtctgaggagggccaccccttcaaggcctacctggatgtggacatcaccctgagcagcgaggccttccacaactacatgaatgctgccatggtgcacatcaacagagccctgaagctgatcatccgcctcttcctggtggaggacctggtggacagcctgaagctggccgtgttcatgtggctgatgacctacgtgggcgctgtgttcaacggcatcaccctgctgatcctggccgagctgctgatcttctctgtgcccatcgtgtatgagaagtacaagacccagattgaccactacgtgggcatcgcccgggaccagaccaagagcatcgtggagaagatccaggccaagctgcccggcatcgccaagaagaaggccgagtag

SEQ ID NO: 94063 - DNA, 3099 bp, Artificial Sequence
  derived and/or modified sequence
atggccgagcccagcgctgccacccagagccacagcatcagcagcagcagctttggagctgagcccagcgcccctgggggcggcggcagccctggggcctgcccagccctgggcaccaagagctgcagcagcagctgtgccgacagctttgtgagcagcagcagcagccagcctgtgtccctcttcagcaccagccaggagggcctgagcagcctgtgcagtgatgagcccagcagcgagatcatgaccagcagcttcctgagcagcagcgagatccacaacacaggcctgaccatcctgcatggagagaagagccacgtgctgggcagccagcccatcctggccaaggagggcaaggaccacctggacctgctggacatgaagaagatggagaagccccagggcaccagcaacaacgtgtctgacagctctgtgtccctggccgccggcgtgcactgtgaccggcccagcatcccagccagcttccctgagcacccagccttcctgagcaagaagattggccaggtggaggagcagattgacaaggagaccaagaaccccaacggggtgagcagccgggaggccaagacagccctggatgctgatgaccgcttcaccctgctgacagcccagaagcccccaacagagtacagcaaggtggagggcatctacacctacagcctgagccccagcaaggtgtctggagatgatgtgattgagaaggacagccctgagagcccctttgaggtgatcatcgacaaggccgcctttgacaaggagttcaaggacagctacaaggagagcacagatgactttggctcctggagcgtgcacacagacaaggagagcagcgaggacatcagcgagaccaatgacaagctgttccccctgaggaacaaggaggccggccgctaccccatgtctgccctgctgagccggcagttcagccacaccaatgctgccctggaggaggtgagccgctgtgtgaatgacatgcacaacttcaccaatgagatcctgacctgggacctggtgccccaggtgaagcagcagacagacaagagcagtgactgcatcaccaagaccaccggcctggacatgtctgagtacaacagcgagatccctgtggtgaacctgaagaccagcacccaccagaagacccctgtgtgcagcattgatggcagcacccccatcaccaagagcactggagactgggccgaggccagcctgcagcaggagaatgccatcaccgggaagcctgtgcctgacagcctgaacagcaccaaggagttcagcatcaagggcgtgcagggcaacatgcagaagcaggatgacaccctggccgagctgcccggcagccccccagagaagtgtgacagcctgggcagcggcgtggccaccgtgaaggtggtgctgcctgatgaccacctgaaggatgagatggactggcagagcagcgccctgggggagatcacagaggccgacagcagtggagagagtgatgacacagtgattgaggacatcacagctgacaccagctttgagaacaacaagatccaggccgagaagcctgtgtccatccccagcgctgtggtgaagacaggagagcgggagatcaaggagatccccagctgtgagcgggaggagaagaccagcaagaactttgaggagctggtgtctgacagcgagctgcaccaggaccagcctgacatcctgggccgcagccctgccagcgaggccgcctgcagcaaggtgcctgacaccaacgtgtccctggaggatgtgtctgaggtggcccctgagaagcccatcaccacagagaaccccaagctgcccagcacagtgagccccaacgtgttcaatgaaacagagttcagcctgaatgtgaccaccagcgcctacctggagagcctgcacggcaagaatgtgaagcacattgatgacagcagccctgaggacctgattgctgccttcacagagacccgggacaagggcatcgtggacagcgagagaaatgccttcaaggccatcagcgagaagatgacagacttcaagaccaccccacctgtggaggtgctgcatgaaaatgaaagtggcggcagcgagatcaaggacatcggcagcaagtacagcgagcagagcaaggagaccaacggcagcgagcccctgggcgtcttccccacccagggcacccctgtggccagcctggacctggagcaggagcagctgaccatcaaggccctgaaggagctgggggagcggcaggtggagaagagcaccagcgcccagagagatgctgagctgcccagcgaggaggtgctgaagcagaccttcacctttgcccctgagagctggccccagaggagctatgacatcctggagagaaatgtgaagaatggaagtgacctgggcatcagccagaagcccatcaccatccgggagaccaccagggtggatgctgtgagcagcctgagcaagacagagctggtgaagaagcacgtgctggcccggctgctgacagacttctctgtgcatgacctgatcttctggagagatgtgaagaagacaggctttgtgtttggcaccaccctcatcatgctgctgagcctggccgccttcagcgtcatctctgtggtgtcctacctgatcctggccctgctgtctgtgaccatctccttccgcatctacaagagcgtcatccaggccgtgcagaagtctgaggagggccaccccttcaaggcctacctggatgtggacatcaccctgagcagcgaggccttccacaactacatgaatgctgccatggtgcacatcaacagagccctgaagctgatcatccgcctcttcctggtggaggacctggtggacagcctgaagctggccgtgttcatgtggctgatgacctacgtgggcgctgtgttcaacggcatcaccctgctgatcctggccgagctgctgatcttctctgtgcccatcgtgtatgagaagtacaagacccagattgaccactacgtgggcatcgcccgggaccagaccaagagcatcgtggagaagatccaggccaagctgcccggcatcgccaagaagaaggccgagtag

SEQ ID NO: 94064 - DNA, 3042 bp, Artificial Sequence
  derived and/or modified sequence
atggccgagcccagcgccgccacccagagccacagcatcagcagcagttcatttggcgccgaaccgagtgcacccggaggcggcggatcgccaggagcctgtcccgcactgggaactaaatcctgcagtagctcatgcgcagaaggtctatccagcctgtgcagtgatgagccctcttccgagattatgaccagttcatttctgagcagctccgagattcacaatacaggcttgactatcctccacggggagaagtcccatgttttgggcagtcagccaattctggccaaagaagggaaagatcacctggacctcctcgatatgaaaaagatggagaaaccacagggtactagcaataacgttagtgacagctcagtgtcccttgctgctggagtgcactgcgatagaccttcaattccagcctcatttcccgagcaccccgcctttctcagcaaaaaaattggccaggtggaggagcagattgacaaggagacaaagaatcctaatggagtctcctctagggaagccaaaaccgccctggatgccgacgatcggttcactctcctgacggcacaaaagccacctaccgaatacagcaaggtcgaaggaatatacacctactcactcagcccctctaaggtgtcgggcgatgacgtgatcgagaaagactccccagagtcaccctttgaagtcatcatcgacaaagctgcatttgataaagaattcaaagatagctataaggagtcaactgatgactttggctcgtggtcagtccacacagataaggagtcatctgaggatataagtgagacgaacgacaagctgttcccccttagaaacaaggaagctggaagatacccaatgtccgccctgcttagtaggcagttctcacacacgaacgcagcactggaagaagtctcacgctgtgtcaatgatatgcacaattttacaaacgagatactgacctgggacctggtgccacaggtgaaacaacagacagacaaaagtagtgactgcataactaaaaccaccggactggatatgtcagaatacaattctgagattcctgtcgtcaacctcaagacatccacccaccagaagaccccggtttgcagcatcgacggctctacccccatcacaaagtctactggagattgggccgaggcttctctacagcaggagaatgcaataactggcaagcctgtcccggattcactcaactcaacgaaggagttctcaattaaaggcgtacaaggaaatatgcagaaacaggacgacaccctagccgagctgccaggctcgcccccggagaagtgcgattccctgggctccggcgttgcaacagtgaaagtagttcttcccgacgaccatctgaaagacgaaatggattggcaatcgtccgctctcggagaaatcacggaagcggactcttccggcgagagtgatgatacggtaatcgaagacatcaccgcagacactagctttgagaacaataaaatccaagccgaaaaaccagtctccattcctagcgctgtggtaaagaccggggagagggaaattaaggaaataccctcatgtgaaagggaagaaaaaacatccaagaactttgaagaactggtaagcgacagtgagctccaccaggaccaaccagacatcctgggtaggagtcccgcgagtgaagctgcctgttcaaaggttccggataccaatgttagccttgaagatgtgtctgaagtggcccctgagaaaccaattacgacagagaacccaaagctcccatccacagtgtctcctaacgtattcaatgaaacggaattctccctgaacgtgaccactagcgcttacctggaatctctgcacggtaagaatgttaagcacatcgacgacagctcacctgaggatttgattgccgcatttaccgagacccgggataagggtattgttgactccgagcgtaatgcgtttaaggcaattagtgagaagatgacagactttaagaccacccctccagtggaagtgctccatgagaatgaatctggcggcagcgaaatcaaagatattggaagcaaatacagcgagcagtccaaggagactaatgggtctgagcccttgggtgtatttcccactcagggaactccagtggccagtctcgaccttgaacaggagcagcttactataaaggctttgaaagagctgggcgagcggcaggtggagaaaagtacttccgctcaaagagatgcggagttacccagtgaggaggtacttaaacagacattcacttttgcccctgagtcgtggcctcaaagaagctacgatattttggaaaggaatgtgaagaacgggtcggatctgggaatctctcagaagccaataactatccgtgaaacaaccagagtcgatgcggtgtcctctctcagcaaaaccgaactcgtcaaaaaacacgtacttgcacggttgctgaccgattttagcgttcacgatctcatattttggcgggatgtcaaaaaaaccgggttcgtctttggtactacactcattatgctgctgtctctcgctgcgttctcagtcatatccgtggtgtcatacttgattttggccctgctgagcgtgacaatctcattcagaatttataaaagcgttatccaggccgtgcagaagtcagaggagggccatccgtttaaagcatacctcgacgttgatatcacactaagctcagaggctttccacaattatatgaacgccgccatggtgcacatcaaccgggcactcaagctgataattaggctctttctggtagaagatctggtcgacagtttaaaattagcagtcttcatgtggctaatgacatatgtgggtgctgtgtttaatgggattactttactgatattggctgaactcctgatcttctccgtcccaatcgtgtacgagaagtataagacacagatcgaccactatgtcggcattgcccgggaccagaccaagtctatcgtggaaaaaatacaggcaaaactgcccggtatcgccaagaaaaaggctgagtag

SEQ ID NO: 94065 - DNA, 3099 bp, Artificial Sequence
  derived and/or modified sequence
atggccgagcccagcgccgccacccagagccacagcatcagcagctcaagtttcggagcagagccttcggcgccgggtgggggaggctcccccggtgcatgtcctgcactcggcaccaaatcctgctcaagctcgtgtgcagactctttcgtttctagttcatcttcgcagcccgttagcctgtttagcactagccaggaggggctgtcttcgctctgctctgacgagccgagctcagagattatgacatcatctttcttatcttcgtccgaaatccacaacactggcctgaccatcctccacggggaaaaaagtcacgttctcgggtcccagccgattttggctaaggaaggaaaggaccacctggacctgcttgacatgaaaaagatggaaaagcctcagggcacttctaacaacgtaagtgactcatcagtgagtcttgccgcgggagttcattgtgatagaccgagtataccggcttcctttcctgaacaccctgcttttctatccaaaaagatcgggcaggtggaagagcaaatcgacaaggagaccaagaatccaaacggagtatccagtcgggaggctaagacggctctggacgcagacgaccggtttacactgcttactgctcagaaacctccaactgagtattcaaaggtggagggtatttacacatattccctgtccccctctaaagtgtcaggggacgacgtcattgaaaaggactccccggaaagccctttcgaagtcattatcgacaaggccgcgttcgacaaagaattcaaggattcatacaaagagagtactgacgatttcggctcatggtccgttcacacagataaggagtcgtccgaggatatcagcgagacaaatgataagttattcccccttaggaacaaagaagcagggagatacccgatgtcagctctgttatcccgccagttttcccatacaaacgccgcactggaagaggtgtcacggtgcgttaacgacatgcacaattttaccaacgaaatcctaacgtgggatctggtgcctcaagtgaagcagcagaccgacaaatcgtccgattgtattactaagactactggtctagacatgagcgaatataactcggaaatacccgtagtgaacctgaagacttccacccatcagaagacccctgtttgctccatcgacggcagtaccccgattaccaaatcgacaggagactgggctgaggcatcactccagcaggagaacgctattactggaaagcctgttccagactctctgaactcaactaaggagtttagtattaaaggggtacaaggcaacatgcaaaaacaagatgatacgttagcagagcttccgggcagtccccccgaaaagtgtgactctctcggctccggagttgccaccgtgaaggtcgttctgcccgatgaccatctcaaagacgagatggattggcagagtagcgctttaggcgagatcacagaagctgattcttctggtgagtcggatgacacagtgatcgaggacattacagcagatacaagtttcgaaaacaacaagatccaggcggaaaaacccgtgagtatccctagcgcggtcgtaaagactggcgagagggaaattaaagaaatcccatcttgcgagagagaggagaaaacctccaagaatttcgaagaactggtgagcgactccgagctccatcaggaccagccggatattcttggcaggtctcctgcctccgaggcggcctgctccaaagtaccagataccaatgtttcactcgaggatgtctccgaagttgcccccgagaaacccattacaactgaaaatccaaagctgccttccaccgtgagcccgaacgtctttaatgagaccgagttctcattaaacgttacgaccagcgcctatctggaatcattgcatggtaagaatgtgaaacatattgacgacagttcccctgaagacctgattgctgcgtttactgagaccagggacaagggcatagtggacagcgagaggaacgcatttaaagccatttcagaaaaaatgactgatttcaaaaccacccctcctgtggaggtgctgcacgaaaacgaaagtgggggatcagagataaaggatatcggtagcaagtacagcgagcagtccaaggagactaacggcagcgagccactcggcgtcttcccaactcagggcacccccgtcgcctctctagacttagagcaggaacaactcaccatcaaagccctcaaggagctgggagaacgccaggtagaaaaatccacctccgctcaacgggatgcagaactcccgagcgaagaggttttgaaacagacttttacctttgctcccgaaagttggcctcagcggtcctatgacattctggagcgcaatgtgaagaacgggtctgatctgggcatttctcagaagccaattactattagggagacaacaagagtggacgccgtaagctcactgagcaagaccgagcttgtgaagaaacatgtcctggcccgactcctgactgatttttccgtgcatgatttaattttttggcgtgacgttaagaaaacaggattcgtattcggcacgacattgattatgctgctctcccttgctgcctttagcgttatatcagtggtctcttatctcatcctggcgctgctttccgtcactatttcatttcgaatatacaagtctgttattcaagccgttcagaaatcagaggaggggcacccattcaaggcttacctggatgtagacattactttgtcttctgaggccttccataactacatgaacgcagctatggtacacattaatcgcgcactgaagctcatcataagactgttcctagtggaggacctggttgactcactaaagcttgcggtgtttatgtggctgatgacctatgttggagctgtattcaacgggatcacgttgctcatcctcgctgagttgctcatcttttcagtacctatcgtctacgaaaaatataaaacacagatcgaccactacgtcggtatcgcccgagaccagactaaatccattgttgagaaaatccaggctaagctgccgggcatcgccaaaaagaaagccgaatag

SEQ ID NO: 94066 - DNA, 3042 bp, Artificial Sequence
  derived and/or modified sequence
atggccgaaccatcagcagccacacaatcccattccatctcaagcagcagctttggcgcagagccttccgcgcctgggggaggcggttcgcctggggcttgccccgcactcggaactaagagctgcagctcaagttgtgcagaaggactctctagtctgtgttctgacgagccttcttccgagatcatgacgagctcattccttagctcttccgagatccataatacgggtttaacaatcctacacggagagaagagccacgtactgggctcacagccaattttggcaaaagagggtaaggatcacttggacctgctggatatgaagaaaatggagaaaccccagggaacaagtaacaatgtaagcgactctagtgtgtccttggccgcaggagtgcactgtgaccggccaagcattcctgcctctttccccgaacatcctgcctttttgtccaagaagatcgggcaagtggaggagcaaatcgataaggagacaaagaatcctaacggcgtgagctctagggaggccaaaacggcactcgacgctgatgaccggttcaccctgctgacggcccagaagccacccacggagtatagtaaagtggaaggcatctacacctatagcctttctccctctaaggtaagcggagatgatgtcatagagaaagactcccccgagtcccccttcgaggttattattgacaaagccgctttcgacaaagagttcaaggacagctacaaggaatcaaccgacgactttggtagctggtcagtgcataccgataaagaatcatccgaggatatctctgaaaccaacgataaactgttcccattgcggaataaagaagccggacggtatcctatgtccgcgctcctctcaaggcagtttagccatacgaatgcagcactcgaggaggtaagtaggtgcgtgaacgatatgcataatttcactaatgaaatcctgacctgggatcttgttccacaggtgaagcagcaaactgataagagttccgactgcattactaagaccaccggactggacatgtccgagtacaattccgagatcccagttgtcaacctgaagacaagtacccaccagaaaactcctgtgtgttcaattgatggatccactcctattacaaaaagtacaggggactgggcagaagcctctttacaacaggaaaatgctattacagggaagcctgtacccgacagcctgaatagtacaaaggaattctccattaaaggagttcagggaaatatgcagaagcaagatgacaccctggccgaactgcccggttcgcctcccgaaaagtgcgacagtctaggcagcggagtagccacagtaaaggtagtccttcctgacgaccacttgaaagatgaaatggattggcagtcctccgcgctgggtgaaatcacagaagcggattcatcaggcgagtctgatgatacagtaatcgaggatattacagcagatacttcgttcgagaataacaaaattcaggccgagaagccagtgagcatcccctctgccgtcgtgaaaaccggtgagcgcgagatcaaggaaatccctagttgcgagagagaggagaagacttctaagaatttcgaagagctggtgtccgatagcgaactgcatcaggatcagccagacatcttagggagatctccggcttccgaggcagcctgctctaaggtcccagatacaaacgtatctctggaagatgtatcagaggttgcacccgaaaagcctatcacgactgaaaatcctaagctcccgagcacagtgagcccgaacgtattcaacgagacagagttctccttgaacgtaaccacgtccgcttatctcgagagcttgcacggcaagaacgtaaagcatatagacgattcctcacccgaggatttgatcgcggctttcacagagacccgcgacaaaggtattgtggattcagaacgcaatgcatttaaagccatatcagaaaagatgaccgattttaagactacgcctcccgtcgaggttctgcatgaaaacgagagtggcggttccgagattaaggacatcgggtcgaagtattctgagcaatctaaagagacaaacggatcagaacctctgggagtattccctacacaggggaccccagtggcctcacttgatcttgagcaggaacagctgactattaaagcactgaaagaactgggcgagcgtcaggtcgaaaaaagtaccagcgcccagagggatgcagaacttccttccgaggaggtcctgaagcagaccttcacctttgctcctgagagctggccgcaacgtagttacgatatattggagaggaacgttaaaaatgggagcgatctcggaatcagccaaaagcctattaccatacgtgaaaccacccgggtcgacgcagtgtcttcactgtccaaaaccgagttggtcaaaaagcacgtgttggcaagattgctgaccgacttttccgttcatgacttgattttctggagagatgtgaagaagactgggtttgtgtttggcacaaccttgatcatgttgctgagcttggcagccttctctgtgatttccgtagtcagctatctgatcttggccctgctgtctgtcactataagcttcaggatctataagagcgtgatccaagctgtccagaagtccgaagagggacatccatttaaggcataccttgatgttgatatcactctctcgtcagaagcctttcataattacatgaacgccgctatggtgcacatcaatagagcccttaaactaataatccggctgttcctcgtggaggacctggtggacagtctgaaacttgctgtgtttatgtggctgatgacttacgtcggcgctgtcttcaatggtattactctactcatactggccgaactgctgattttctccgtacctatagtatatgagaagtataaaacccaaatagaccattacgtcgggatcgccagagaccagactaaatccatcgtcgagaagatccaagctaaactgcctgggattgctaaaaagaaggccgaatag

SEQ ID NO: 94067 - DNA, 3099 bp, Artificial Sequence
  derived and/or modified sequence
atggccgaaccaagcgcagcaactcaatctcactcaatttcaagctcttctttcggtgctgagccatcagcccctggtggcggaggctcccctggagcatgcccagcgctgggcaccaagtcctgcagctctagctgcgcagattccttcgtttcaagtagcagctcacagcctgtttctttgttttctacttcacaggaggggctctcgtccttgtgcagcgacgagccaagttcagaaattatgaccagctccttcctgagcagcagcgagatccataatactgggctgactatcctgcatggcgaaaagagccatgtgctcggaagccagcccatcctggctaaagagggcaaagatcatctagatctactggatatgaagaaaatggaaaagcctcagggtacttctaacaatgttagcgatagcagcgttagcctggcggcaggggtacattgcgatcgtccttcgattcctgcttcatttccagaacatcctgccttcctgtcaaaaaagataggccaagtcgaagagcagatcgacaaagagaccaagaatcccaatggagtgagttcacgagaggccaagaccgcactcgatgccgatgatcggtttacactgctgacagcccaaaaaccgcctacggaatattccaaagtggaagggatctatacgtatagcctcagccccagtaaagtgagcggagatgacgtgatcgagaaagattcccctgagagcccttttgaggtcattatcgacaaagcggcttttgacaaagaattcaaggacagttataaagaatctacagatgatttcgggtcctggagcgttcacactgataaagagtccagcgaagatatatcagagaccaacgacaagctcttccccctgaggaacaaagaggcgggtagataccctatgtctgccctactgagtagacagttttcccacacaaacgcagccctcgaggaggtgagccggtgcgtgaatgatatgcacaactttactaacgaaattctgacctgggatcttgttccgcaggttaaacagcagaccgacaagtcatctgactgcataacgaaaaccacaggcttggacatgtctgaatataacagcgagatcccagtcgtaaatctgaaaactagcactcaccaaaaaacaccggtgtgcagcattgacggatctacgccaataaccaaaagcacgggggattgggcggaagccagtctacagcaggagaacgccatcacaggaaagcccgtcccggattccctaaattcgaccaaagagtttagcatcaaaggggtgcagggcaacatgcagaagcaagatgatacattggcagaactgcctggtagtccccctgaaaaatgcgattccctaggaagcggagtggccactgtaaaagtagtcctgccagatgatcatctcaaggacgaaatggattggcaatctagcgctctgggagaaattacagaagctgactctagcggcgaatccgacgacactgtcatcgaggacattactgctgatacctcctttgagaacaacaagatacaggccgagaagcccgtgagcattccaagtgcagtggtgaagacaggagaacgcgaaataaaggagattccaagttgtgaacgtgaggagaagacaagcaagaactttgaggagctcgtgagcgactccgagctacaccaagaccaacctgatatcctgggaagatctcccgctagtgaggccgcatgcagcaaagttcccgacacaaacgtgtctttagaggacgtgagcgaagtcgctccagaaaagcccataaccactgaaaatcccaagctgccatcaaccgtaagtccgaacgtctttaacgagaccgaattctccctcaatgtgaccactagcgcgtatctggagagtctgcacgggaagaacgttaagcatatcgatgattcttctcctgaggatctgattgcagcttttacagaaacacgagacaaaggcatagtggatagcgagcgtaatgcctttaaggcaatcagtgaaaaaatgacagacttcaaaaccaccccccctgtggaggttctgcacgaaaacgagtccggaggtagtgaaatcaaggatatcgggtccaagtactctgagcagagcaaggagacaaatgggagtgaacctctgggtgtgtttcccactcagggaacaccagttgcaagcctggacctggagcaggaacagctgacaatcaaggctctgaaggaattaggcgagagacaggtggaaaaaagcacgagcgcacaacgtgacgctgaattgccctctgaggaagtgctaaagcagaccttcactttcgcaccagagtcatggccccaacgatcgtatgacatcctggagcgtaacgtgaaaaatggttccgacttgggcatttcgcagaaacccatcactatccgggagaccaccagggtggacgcagtcagcagcctcagcaagaccgagctcgtgaaaaagcatgtcttggctaggctgttgaccgattttagcgtccatgatctgatcttctggcgggacgtaaagaaaacaggattcgtgttcggaactacgctaattatgctgctttccttagcagctttcagcgttataagtgtcgtgtcctatttaattcttgcgctgctgtctgttactataagtttcaggatctacaaaagcgtcattcaggccgttcagaagagtgaggagggacatccatttaaggcctacctggatgtcgatattactctgtcctcggaggcctttcataattacatgaatgctgctatggtgcacatcaaccgagcccttaagcttatcatccgactgttcctggtcgaagaccttgtggacagtctcaagctggcggtgtttatgtggctgatgacatacgtgggagccgtgtttaatggtatcactctccttatcttggccgagctccttattttctcagttccaattgtttacgagaagtacaaaacccaaattgaccactacgtaggcatcgctagagaccaaactaaatccattgtcgaaaaaatccaggcaaagctgccaggcattgctaaaaaaaaggctgagtag

SEQ ID NO: 94068 - DNA, 4886 bp, Artificial Sequence
  derived and/or modified sequence
gctcggctgagtcagtcagtctgtcggagtctgtcctcggagcaggcggagtaaagggacttgagcgagccagttgccggattattctatttcccctccctctctcccgccccgtatctcttttcacccttctcccaccctcgctcgcgtagccatggcggagccgtcggcggccactcagtcccattccatctcctcgtcgtccttcggagccgagccgtccgcgcccggcggcggcgggagcccaggagcctgccccgccctggggacgaagagctgcagctcctcctgtgcggagggattgagctctctttgctctgatgagccatcttcagaaattatgacttcttcctttctttcatcttctgaaatacataacactggccttacaatactacatggagaaaaaagccatgtgttagggagccagcctattttagccaaagaaggaaaagaccacttggatcttctagatatgaaaaagatggaaaagcctcaggggaccagcaacaacgtatcagactcttcagtttctcttgcagcaggagttcattgtgaccgtccttctattccagccagtttcccagagcatcctgcttttctctcaaagaaaattggtcaagtggaagagcaaatagataaagagaccaagaacccaaatggggtatcaagtagggaggctaaaactgcattggatgctgatgacagattcactttgctgacagcccagaaaccacctactgagtactctaaggtagaaggcatttatacatattctttgtctccatccaaagtttcaggagatgatgttattgaaaaggattcccctgaatcaccatttgaagtaattattgacaaagcagcatttgacaaagaatttaaagactcatataaggagagcacagatgattttggtagctggtctgtgcacactgataaagaatcatccgaagacatttcagagactaatgacaagctttttccactgagaaataaagaggcaggacgttacccaatgtctgcattgctcagtaggcagttttcacacacaaatgcagcactggaagaggtgtccagatgcgtgaatgatatgcataactttactaacgaaatactgacttgggatctggttccccaagtgaaacaacagaccgataaatcttctgactgcatcacaaaaactacaggacttgacatgagtgaatataattcagaaattccagttgtaaatcttaaaactagcactcatcagaaaactcctgtatgttctattgatgggagcactcccatcactaaatcaacaggtgattgggcagaagcatctctccagcaagaaaatgctattactggaaaacctgtacctgactctttgaattccacaaaagaattcagtatcaaaggtgtgcaaggcaatatgcagaaacaggatgacacacttgcagaattacctggatctccacctgagaaatgtgactctttgggttctggagtggccacagtgaaagtggttttacctgatgaccacctgaaagatgaaatggactggcagagctctgcattgggagaaatcacagaagctgatagttctggtgagtctgatgacacagtaatagaggacatcacagcagatacatcatttgaaaataacaaaattcaggctgaaaaacctgtttccattccaagtgctgttgtaaaaacaggtgaaagagaaatcaaagagattcccagttgtgagagagaagaaaaaacatctaaaaactttgaagaattggtcagtgactctgagctgcatcaagatcagcctgatattcttggaaggagtccagctagtgaggcagcatgttcaaaagtacccgatacgaatgtctccttagaagatgtgagtgaagttgctcctgaaaagcctattactactgagaaccccaaacttccttcaacagtgtctccaaatgtttttaatgagacagaattctcattaaatgtgacaacatctgcctatttggagtcattacatgggaaaaatgttaaacatatagatgattcctccccagaggacctgatagcagcctttacagaaaccagagataaaggaatagtagatagtgaaagaaatgcttttaaagcaatatcagagaagatgacagactttaaaacaactcctcctgtagaagtcttacatgaaaatgagtccggtggttctgaaattaaagacattggaagcaaatacagtgaacaaagcaaagaaacaaatggaagtgagcctctaggtgttttccctacccaaggtactccagtagcatctcttgacttagaacaagaacagctcacaattaaggctcttaaagaattaggtgaaagacaggttgagaagtcaacttctgcacagcgtgacgcagaattgccttctgaagaagtactgaagcaaactttcacatttgctccagaatcttggccacagagatcatatgacatcctagaacgtaatgtcaagaatggatctgatcttgggatttcccagaagcccatcactatcagagaaactactagggtagatgctgtttccagccttagcaagactgaattggtaaaaaagcatgtcctagcaagacttctgacagacttctcagtgcacgatctgattttctggagagatgtgaagaagactgggtttgtctttggcaccacgctgatcatgctgctttccctggcagctttcagtgtcatcagtgtggtttcttacctcatcctggctcttctctctgtcaccatcagcttcaggatctacaagtccgtcatccaagctgtacagaagtcagaagaaggccatccattcaaagcctacctggacgtagacattactctgtcctcagaagctttccataattacatgaatgctgccatggtgcacatcaacagggccctgaaactcattattcgtctctttctggtagaagatctggttgactccttgaagctggctgtcttcatgtggctgatgacctatgttggtgctgtttttaacggaatcacccttctaattcttgctgaactgctcattttcagtgtcccgattgtctatgagaagtacaagacccagattgatcactatgttggcatcgcccgagatcagaccaagtcaattgttgaaaagatccaagcaaaactccctggaatcgccaaaaaaaaggcagaataagtacatggaaaccagaaatgcaacagttactaaaacaccatttaatagttataacgtcgttacttgtactatgaaggaaaatactcagtgtcagcttgagcctgcattccaagctttttttttaatttggtgttttctcccatcctttccctttaaccctcagtatcaagcacaaaaattgatggactgataaaagaactatcttagaactcagaagaagaaagaatcaaattcataggataagtcaataccttaatggtggtagagcctttacctgtagcttgaaaggggaaagattggaggtaagagagaaaatgaaagaacacctctgggtccttctgtccagttttcagcactagtcttactcagctatccattatagttttgcccttaagaagtcatgattaacttatgaaaaaattatttggggacaggagtgtgataccttccttggtttttttttgcagccctcaaatcctatcttcctgccccacaatgtgagcagctacccctgatactccttttctttaatgatttaactatcaacttgataaataacttataggtgatagtgataattcctgattccaagaatgccatctgataaaaaagaatagaaatggaaagtgggactgagagggagtcagcaggcatgctgcggtggcggtcactccctctgccactatccccagggaaggaaaggctccgccatttgggaaagtggtttctacgtcactggacaccggttctgagcattagtttgagaactcgttcccgaatgtgctttcctccctctcccctgcccacctcaagtttaataaataaggttgtacttttcttactataaaataaatgtctgtaactgctgtgcactgctgtaaacttgttagagaaaaaaataacctgcatgtgggctcctcagttattgagtttttgtgatcctatctcagtctgggggggaacattctcaagaggtgaaatacagaaagcctttttttcttgatcttttcccgagattcaaatctccgattcccatttgggggcaagtttttttcttcaccttcaatatgagaattcagcgaacttgaaagaaaaatcatctgtgagttccttcaggttctcactcatagtcatgatccttcagagggaatatgcactggcgagtttaaagtaagggctatgatatttgatggtcccaaagtacggcagctgcaaaaagtagtggaaggaaattgtctacgtgtcttggaaaaattagttaggaatttggatgggtaaaaggtacccttgccttactccatcttattttcttagccccctttgagtgttttaactggtttcatgtcctagtaggaagtgcattctccatcctcatcctctgccctcccaggaagtcagtgattgtctttttgggcttcccctccaaaggaccttctgcagtggaagtgccacatccagttcttttcttttgttgctgctgtgtttagataattgaagagatctttgtgccacacaggatttttttttttttttaagaaaaacctatagatgaaaaattactaatgaaactgtgtgtacgtgtctgtgcgtgcaacataaaaatacagtagcacctaaggagcttgaatcttggttcctgtaaaatttcaaattgatgtggtattaataaaaaaaaaaaaaacacaaacaa

SEQ ID NO: 94069 - DNA, 4937 bp, Artificial Sequence
  derived and/or modified sequence
gctcggctgagtcagtcagtctgtcggagtctgtcctcggagcaggcggagtaaagggacttgagcgagccagttgccggattattctatttcccctccctctctcccgccccgtatctcttttcacccttctcccaccctcgctcgcgtagccatggcggagccgtcggcggccactcagtcccattccatctcctcgtcgtccttcggagccgagccgtccgcgcccggcggcggcgggagcccaggagcctgccccgccctggggacgaagagctgcagctcctcctgtgcggattcctttgtttcttcctcttcctctcagcctgtatctctattttcgacctcacaagagggattgagctctctttgctctgatgagccatcttcagaaattatgacttcttcctttctttcatcttctgaaatacataacactggccttacaatactacatggagaaaaaagccatgtgttagggagccagcctattttagccaaagaaggaaaagaccacttggatcttctagatatgaaaaagatggaaaagcctcaggggaccagcaacaacgtatcagactcttcagtttctcttgcagcaggagttcattgtgaccgtccttctattccagccagtttcccagagcatcctgcttttctctcaaagaaaattggtcaagtggaagagcaaatagataaagagaccaagaacccaaatggggtatcaagtagggaggctaaaactgcattggatgctgatgacagattcactttgctgacagcccagaaaccacctactgagtactctaaggtagaaggcatttatacatattctttgtctccatccaaagtttcaggagatgatgttattgaaaaggattcccctgaatcaccatttgaagtaattattgacaaagcagcatttgacaaagaatttaaagactcatataaggagagcacagatgattttggtagctggtctgtgcacactgataaagaatcatccgaagacatttcagagactaatgacaagctttttccactgagaaataaagaggcaggacgttacccaatgtctgcattgctcagtaggcagttttcacacacaaatgcagcactggaagaggtgtccagatgcgtgaatgatatgcataactttactaacgaaatactgacttgggatctggttccccaagtgaaacaacagaccgataaatcttctgactgcatcacaaaaactacaggacttgacatgagtgaatataattcagaaattccagttgtaaatcttaaaactagcactcatcagaaaactcctgtatgttctattgatgggagcactcccatcactaaatcaacaggtgattgggcagaagcatctctccagcaagaaaatgctattactggaaaacctgtacctgactctttgaattccacaaaagaattcagtatcaaaggtgtgcaaggcaatatgcagaaacaggatgacacacttgcagaattacctggatctccacctgagaaatgtgactctttgggttctggagtggccacagtgaaagtggttttacctgatgaccacctgaaagatgaaatggactggcagagctctgcattgggagaaatcacagaagctgatagttctggtgagtctgatgacacagtaatagaggacatcacagcagatacatcatttgaaaataacaaaattcaggctgaaaaacctgtttccattccaagtgctgttgtaaaaacaggtgaaagagaaatcaaagagattcccagttgtgagagagaagaaaaaacatctaaaaactttgaagaattggtcagtgactctgagctgcatcaagatcagcctgatattcttggaaggagtccagctagtgaggcagcatgttcaaaagtacccgatacgaatgtctccttagaagatgtgagtgaagttgctcctgaaaagcctattactactgagaaccccaaacttccttcaacagtgtctccaaatgtttttaatgagacagaattctcattaaatgtgacaacatctgcctatttggagtcattacatgggaaaaatgttaaacatatagatgattcctccccagaggacctgatagcagcctttacagaaaccagagataaaggaatagtagatagtgaaagaaatgcttttaaagcaatatcagagaagatgacagactttaaaacaactcctcctgtagaagtcttacatgaaaatgagtccggtggttctgaaattaaagacattggaagcaaatacagtgaacaaagcaaagaaacaaatggaagtgagcctctaggtgttttccctacccaaggtactccagtagcatctcttgacttagaacaagaacagctcacaattaaggctcttaaagaattaggtgaaagacaggttgagaagtcaacttctgcacagcgtgacgcagaattgccttctgaagaagtactgaagcaaactttcacatttgctccagaatcttggccacagagatcatatgacatcctagaacgtaatgtcaagaatggatctgatcttgggatttcccagaagcccatcactatcagagaaactactagggtagatgctgtttccagccttagcaagactgaattggtaaaaaagcatgtcctagcaagacttctgacagacttctcagtgcacgatctgattttctggagagatgtgaagaagactgggtttgtctttggcaccacgctgatcatgctgctttccctggcagctttcagtgtcatcagtgtggtttcttacctcatcctggctcttctctctgtcaccatcagcttcaggatctacaagtccgtcatccaagctgtacagaagtcagaagaaggccatccattcaaagcctacctggacgtagacattactctgtcctcagaagctttccataattacatgaatgctgccatggtgcacatcaacagggccctgaaactcattattcgtctctttctggtagaagatctggttgactccttgaagctggctgtcttcatgtggctgatgacctatgttggtgctgtttttaacggaatcacccttctaattcttgctgaactgctcattttcagtgtcccgattgtctatgagaagtacaagacccagattgatcactatgttggcatcgcccgagatcagaccaagtcaattgttgaaaagatccaagcaaaactccctggaatcgccaaaaaaaaggcagaataagtacatggaaaccagaaatgcaacagttactaaaacaccatttaatagttataacgtcgttacttgtactatgaaggaaaatactcagtgtcagcttgagcctgcattccaagctttttttttaatttggtgttttctcccatcctttccctttaaccctcagtatcaagcacaaaaattgatggactgataaaagaactatcttagaactcagaagaagaaagaatcaaattcataggataagtcaataccttaatggtggtagagcctttacctgtagcttgaaaggggaaagattggaggtaagagagaaaatgaaagaacacctctgggtccttctgtccagttttcagcactagtcttactcagctatccattatagttttgcccttaagaagtcatgattaacttatgaaaaaattatttggggacaggagtgtgataccttccttggtttttttttgcagccctcaaatcctatcttcctgccccacaatgtgagcagctacccctgatactccttttctttaatgatttaactatcaacttgataaataacttataggtgatagtgataattcctgattccaagaatgccatctgataaaaaagaatagaaatggaaagtgggactgagagggagtcagcaggcatgctgcggtggcggtcactccctctgccactatccccagggaaggaaaggctccgccatttgggaaagtggtttctacgtcactggacaccggttctgagcattagtttgagaactcgttcccgaatgtgctttcctccctctcccctgcccacctcaagtttaataaataaggttgtacttttcttactataaaataaatgtctgtaactgctgtgcactgctgtaaacttgttagagaaaaaaataacctgcatgtgggctcctcagttattgagtttttgtgatcctatctcagtctgggggggaacattctcaagaggtgaaatacagaaagcctttttttcttgatcttttcccgagattcaaatctccgattcccatttgggggcaagtttttttcttcaccttcaatatgagaattcagcgaacttgaaagaaaaatcatctgtgagttccttcaggttctcactcatagtcatgatccttcagagggaatatgcactggcgagtttaaagtaagggctatgatatttgatggtcccaaagtacggcagctgcaaaaagtagtggaaggaaattgtctacgtgtcttggaaaaattagttaggaatttggatgggtaaaaggtacccttgccttactccatcttattttcttagccccctttgagtgttttaactggtttcatgtcctagtaggaagtgcattctccatcctcatcctctgccctcccaggaagtcagtgattgtctttttgggcttcccctccaaaggaccttctgcagtggaagtgccacatccagttcttttcttttgttgctgctgtgtttagataattgaagagatctttgtgccacacaggatttttttttttttttaagaaaaacctatagatgaaaaattactaatgaaactgtgtgtacgtgtctgtgcgtgcaacataaaaatacagtagcacctaaggagcttgaatcttggttcctgtaaaatttcaaattgatgtggtattaataaaaaaaaaaaaaacac

SEQ ID NO: 94070 - DNA, 3042 bp, Artificial Sequence
  derived and/or modified sequence
atggccgagcccagcgccgccacccagagccacagcatcagcagcagcagcttcggcgccgagcccagcgcccccggcggcggcggcagccccggcgcctgccccgccctgggcaccaagagctgcagcagcagctgcgccgagggcctgagcagcctgtgcagcgacgagcccagcagcgagatcatgaccagcagcttcctgagcagcagcgagatccacaacaccggcctgaccatcctgcacggcgagaagagccacgtgctgggcagccagcccatcctggccaaggagggcaaggaccacctggacctgctggacatgaagaagatggagaagccccagggcaccagcaacaacgtgagcgacagcagcgtgagcctggccgccggcgtgcactgcgacagacccagcatccccgccagcttccccgagcaccccgccttcctgagcaagaagatcggccaggtggaggagcagatcgacaaggagaccaagaaccccaacggcgtgagcagcagagaggccaagaccgccctggacgccgacgacagattcaccctgctgaccgcccagaagccccccaccgagtacagcaaggtggagggcatctacacctacagcctgagccccagcaaggtgagcggcgacgacgtgatcgagaaggacagccccgagagccccttcgaggtgatcatcgacaaggccgccttcgacaaggagttcaaggacagctacaaggagagcaccgacgacttcggcagctggagcgtgcacaccgacaaggagagcagcgaggacatcagcgagaccaacgacaagctgttccccctgagaaacaaggaggccggcagataccccatgagcgccctgctgagcagacagttcagccacaccaacgccgccctggaggaggtgagcagatgcgtgaacgacatgcacaacttcaccaacgagatcctgacctgggacctggtgccccaggtgaagcagcagaccgacaagagcagcgactgcatcaccaagaccaccggcctggacatgagcgagtacaacagcgagatccccgtggtgaacctgaagaccagcacccaccagaagacccccgtgtgcagcatcgacggcagcacccccatcaccaagagcaccggcgactgggccgaggccagcctgcagcaggagaacgccatcaccggcaagcccgtgcccgacagcctgaacagcaccaaggagttcagcatcaagggcgtgcagggcaacatgcagaagcaggacgacaccctggccgagctgcccggcagcccccccgagaagtgcgacagcctgggcagcggcgtggccaccgtgaaggtggtgctgcccgacgaccacctgaaggacgagatggactggcagagcagcgccctgggcgagatcaccgaggccgacagcagcggcgagagcgacgacaccgtgatcgaggacatcaccgccgacaccagcttcgagaacaacaagatccaggccgagaagcccgtgagcatccccagcgccgtggtgaagaccggcgagagagagatcaaggagatccccagctgcgagagagaggagaagaccagcaagaacttcgaggagctggtgagcgacagcgagctgcaccaggaccagcccgacatcctgggcagaagccccgccagcgaggccgcctgcagcaaggtgcccgacaccaacgtgagcctggaggacgtgagcgaggtggcccccgagaagcccatcaccaccgagaaccccaagctgcccagcaccgtgagccccaacgtgttcaacgagaccgagttcagcctgaacgtgaccaccagcgcctacctggagagcctgcacggcaagaacgtgaagcacatcgacgacagcagccccgaggacctgatcgccgccttcaccgagaccagagacaagggcatcgtggacagcgagagaaacgccttcaaggccatcagcgagaagatgaccgacttcaagaccaccccccccgtggaggtgctgcacgagaacgagagcggcggcagcgagatcaaggacatcggcagcaagtacagcgagcagagcaaggagaccaacggcagcgagcccctgggcgtgttccccacccagggcacccccgtggccagcctggacctggagcaggagcagctgaccatcaaggccctgaaggagctgggcgagagacaggtggagaagagcaccagcgcccagagagacgccgagctgcccagcgaggaggtgctgaagcagaccttcaccttcgcccccgagagctggccccagagaagctacgacatcctggagagaaacgtgaagaacggcagcgacctgggcatcagccagaagcccatcaccatcagagagaccaccagagtggacgccgtgagcagcctgagcaagaccgagctggtgaagaagcacgtgctggccagactgctgaccgacttcagcgtgcacgacctgatcttctggagagacgtgaagaagaccggcttcgtgttcggcaccaccctgatcatgctgctgagcctggccgccttcagcgtgatcagcgtggtgagctacctgatcctggccctgctgagcgtgaccatcagcttcagaatctacaagagcgtgatccaggccgtgcagaagagcgaggagggccaccccttcaaggcctacctggacgtggacatcaccctgagcagcgaggccttccacaactacatgaacgccgccatggtgcacatcaacagagccctgaagctgatcatcagactgttcctggtggaggacctggtggacagcctgaagctggccgtgttcatgtggctgatgacctacgtgggcgccgtgttcaacggcatcaccctgctgatcctggccgagctgctgatcttcagcgtgcccatcgtgtacgagaagtacaagacccagatcgaccactacgtgggcatcgccagagaccagaccaagagcatcgtggagaagatccaggccaagctgcccggcatcgccaagaagaaggccgagtag

SEQ ID NO: 94071 - DNA, 3099 bp, Artificial Sequence
  derived and/or modified sequence
atggccgagcccagcgccgccacccagagccacagcatcagcagcagcagcttcggcgccgagcccagcgcccccggcggcggcggcagccccggcgcctgccccgccctgggcaccaagagctgcagcagcagctgcgccgacagcttcgtgagcagcagcagcagccagcccgtgagcctgttcagcaccagccaggagggcctgagcagcctgtgcagcgacgagcccagcagcgagatcatgaccagcagcttcctgagcagcagcgagatccacaacaccggcctgaccatcctgcacggcgagaagagccacgtgctgggcagccagcccatcctggccaaggagggcaaggaccacctggacctgctggacatgaagaagatggagaagccccagggcaccagcaacaacgtgagcgacagcagcgtgagcctggccgccggcgtgcactgcgacagacccagcatccccgccagcttccccgagcaccccgccttcctgagcaagaagatcggccaggtggaggagcagatcgacaaggagaccaagaaccccaacggcgtgagcagcagagaggccaagaccgccctggacgccgacgacagattcaccctgctgaccgcccagaagccccccaccgagtacagcaaggtggagggcatctacacctacagcctgagccccagcaaggtgagcggcgacgacgtgatcgagaaggacagccccgagagccccttcgaggtgatcatcgacaaggccgccttcgacaaggagttcaaggacagctacaaggagagcaccgacgacttcggcagctggagcgtgcacaccgacaaggagagcagcgaggacatcagcgagaccaacgacaagctgttccccctgagaaacaaggaggccggcagataccccatgagcgccctgctgagcagacagttcagccacaccaacgccgccctggaggaggtgagcagatgcgtgaacgacatgcacaacttcaccaacgagatcctgacctgggacctggtgccccaggtgaagcagcagaccgacaagagcagcgactgcatcaccaagaccaccggcctggacatgagcgagtacaacagcgagatccccgtggtgaacctgaagaccagcacccaccagaagacccccgtgtgcagcatcgacggcagcacccccatcaccaagagcaccggcgactgggccgaggccagcctgcagcaggagaacgccatcaccggcaagcccgtgcccgacagcctgaacagcaccaaggagttcagcatcaagggcgtgcagggcaacatgcagaagcaggacgacaccctggccgagctgcccggcagcccccccgagaagtgcgacagcctgggcagcggcgtggccaccgtgaaggtggtgctgcccgacgaccacctgaaggacgagatggactggcagagcagcgccctgggcgagatcaccgaggccgacagcagcggcgagagcgacgacaccgtgatcgaggacatcaccgccgacaccagcttcgagaacaacaagatccaggccgagaagcccgtgagcatccccagcgccgtggtgaagaccggcgagagagagatcaaggagatccccagctgcgagagagaggagaagaccagcaagaacttcgaggagctggtgagcgacagcgagctgcaccaggaccagcccgacatcctgggcagaagccccgccagcgaggccgcctgcagcaaggtgcccgacaccaacgtgagcctggaggacgtgagcgaggtggcccccgagaagcccatcaccaccgagaaccccaagctgcccagcaccgtgagccccaacgtgttcaacgagaccgagttcagcctgaacgtgaccaccagcgcctacctggagagcctgcacggcaagaacgtgaagcacatcgacgacagcagccccgaggacctgatcgccgccttcaccgagaccagagacaagggcatcgtggacagcgagagaaacgccttcaaggccatcagcgagaagatgaccgacttcaagaccaccccccccgtggaggtgctgcacgagaacgagagcggcggcagcgagatcaaggacatcggcagcaagtacagcgagcagagcaaggagaccaacggcagcgagcccctgggcgtgttccccacccagggcacccccgtggccagcctggacctggagcaggagcagctgaccatcaaggccctgaaggagctgggcgagagacaggtggagaagagcaccagcgcccagagagacgccgagctgcccagcgaggaggtgctgaagcagaccttcaccttcgcccccgagagctggccccagagaagctacgacatcctggagagaaacgtgaagaacggcagcgacctgggcatcagccagaagcccatcaccatcagagagaccaccagagtggacgccgtgagcagcctgagcaagaccgagctggtgaagaagcacgtgctggccagactgctgaccgacttcagcgtgcacgacctgatcttctggagagacgtgaagaagaccggcttcgtgttcggcaccaccctgatcatgctgctgagcctggccgccttcagcgtgatcagcgtggtgagctacctgatcctggccctgctgagcgtgaccatcagcttcagaatctacaagagcgtgatccaggccgtgcagaagagcgaggagggccaccccttcaaggcctacctggacgtggacatcaccctgagcagcgaggccttccacaactacatgaacgccgccatggtgcacatcaacagagccctgaagctgatcatcagactgttcctggtggaggacctggtggacagcctgaagctggccgtgttcatgtggctgatgacctacgtgggcgccgtgttcaacggcatcaccctgctgatcctggccgagctgctgatcttcagcgtgcccatcgtgtacgagaagtacaagacccagatcgaccactacgtgggcatcgccagagaccagaccaagagcatcgtggagaagatccaggccaagctgcccggcatcgccaagaagaaggccgagtag

SEQ ID NO: 94072 - protein, 214 aa, Artificial Sequence
  derived and/or modified sequence
MAEPSAATQSHSISSSSFGAEPSAPGGGGSPGACPALGTKSCSSSCAVHDLIFWRDVKKTGFVFGTTLIMLLSLAAFSVISVVSYLILALLSVTISFRIYKSVIQAVQKSEEGHPFKPRLITMLASPEIRPSQLLKRSKQNSLESPKKRQNKYMETRNATVTKTPFNSYNVVTCTMKENTQCQLEPAFQAFFLIWCFLPSFPFNPQYQAQKLMD

SEQ ID NO: 94073 - DNA, 645 bp, Artificial Sequence
  derived and/or modified sequence
atggcagaaccaagcgcagcaacccagagccatagcatttcttcgtctagctttggtgccgagccttccgccccagggggaggtggctctcctggcgcttgtccagctctcggaactaaatcttgcagttctagctgtgctgtgcacgacctgatcttctggagggatgttaagaagaccggatttgtctttgggacaacattgatcatgcttctctcactcgcggctttttcagtgatttcagtagtgtcctatctcatcttagcacttctctctgtgaccatttccttccgcatatacaaatctgtcatccaagcagtacagaaaagcgaggagggccatcccttcaaaccccggttaataaccatgctggcctccccagagatacggccgagccaactgctgaaaaggagcaaacaaaatagcttggagtcccctaagaagcggcaaaacaaatatatggagactaggaatgccactgttaccaaaacgccttttaatagctataatgtcgtaacctgcactatgaaggaaaacactcaatgtcagctggagcccgcattccaggccttctttctgatctggtgtttccttccttctttccccttcaaccctcaataccaagcccagaagcttatggattag

SEQ ID NO: 94074 - DNA, 372 bp, Artificial Sequence
  derived and/or modified sequence
atggcagaaccatctgccgccactcagtcgcactccatttcgagcagttctttcggtgcagagccaagcgcacccggcggagggggctcccccggtgcgtgcccggccctgggaactaagtcatgttccagttcatgtgccgtccacgatctgatattctggcgcgacgtgaagaaaacaggttttgtattcggcaccaccctaataatgctgctatcactcgctgccttttcagtgatttcagtggtatcatatctgatccttgccctgttatccgtgacgatctcctttaggatttataagagcgtgatccaggcggtgcagaagagcgaggaaggacacccatttaactggctgagttcctgcgggtag

SEQ ID NO: 94075 - DNA, 645 bp, Artificial Sequence
  derived and/or modified sequence
atggccgagcccagcgctgccacccagagccacagcatcagcagcagcagctttggagctgagcccagcgcccctgggggcggcggcagccctggggcctgcccagccctgggcaccaagagctgcagcagcagctgtgctgtgcatgacctgatcttctggagagatgtgaagaagacaggctttgtgtttggcaccaccctcatcatgctgctgagcctggccgccttcagcgtcatctctgtggtgtcctacctgatcctggccctgctgtctgtgaccatctccttccgcatctacaagagcgtcatccaggccgtgcagaagtctgaggagggccaccccttcaagcccaggctcatcaccatgctggccagccctgagatccggcccagccagctgctgaagaggagcaagcagaacagcctggagagccccaagaagaggcagaacaagtacatggagaccagaaatgccaccgtgaccaagacccccttcaacagctacaacgtggtgacctgcaccatgaaggagaacacccagtgccagctggagcccgccttccaggccttcttcctgatctggtgcttcctgcccagcttccccttcaacccccagtaccaggcccagaagctgatggactag

SEQ ID NO: 94076 - DNA, 372 bp, Artificial Sequence
  derived and/or modified sequence
atggccgagcccagcgctgccacccagagccacagcatcagcagcagcagctttggagctgagcccagcgcccctgggggcggcggcagccctggggcctgcccagccctgggcaccaagagctgcagcagcagctgtgctgtgcatgacctgatcttctggagagatgtgaagaagacaggctttgtgtttggcaccaccctcatcatgctgctgagcctggccgccttcagcgtcatctctgtggtgtcctacctgatcctggccctgctgtctgtgaccatctccttccgcatctacaagagcgtcatccaggccgtgcagaagtctgaggagggccaccccttcaactggctgagcagctgtggctag

SEQ ID NO: 94077 - DNA, 645 bp, Artificial Sequence
  derived and/or modified sequence
atggccgagcccagcgccgccacccagagccacagcatcagcagctcttcctttggggctgagcctagcgctccaggaggcggaggcagcccaggcgcttgtccagctctcggtaccaaatcctgttcctccagttgcgctgttcatgacttaatattctggagggacgtcaaaaaaacaggcttcgtgtttggaactacactcataatgctcctgtcgcttgccgcatttagcgtcataagcgtcgtgtcttatctgatcctggctctgttatccgtaacaatttctttccgtatctataagtctgtcatccaagcggttcaaaaaagcgaggaaggtcacccttttaaaccaagactgatcaccatgcttgcctctcccgagattcgaccctctcaattgctgaagcgctccaaacagaactccctcgagtctcccaagaagcgccagaataagtacatggagacccgcaacgccactgtaactaagactccttttaactcttacaatgtggtgacctgcacaatgaaggagaacacccagtgccagctcgagcctgcattccaggccttcttcttgatttggtgcttcctcccatcctttccttttaatccacagtatcaggcacaaaagctcatggactag

SEQ ID NO: 94078 - DNA, 372 bp, Artificial Sequence
  derived and/or modified sequence
atggccgagcccagcgccgccacccagagccacagcatcagcagcagttcctttggagcagaacctagcgcacccggtggaggcggctctcctggtgcatgcccagccctaggtacaaagtcatgttcttctagttgcgcagtccacgacctcatcttttggagggacgttaagaagactgggttcgtgtttgggactacactaataatgttgctgagcctcgcggcttttagcgttatcagcgttgtaagctatctcatcttagcactgctgagtgtcacgatttcatttcggatatataagagcgtgatccaagccgtgcagaaatccgaagagggtcacccatttaattggctgtccagttgcggatag

SEQ ID NO: 94079 - DNA, 645 bp, Artificial Sequence
  derived and/or modified sequence
atggccgagccatcagccgctacccagtctcacagtatatctagctcaagtttcggtgcagagccatctgcacctgggggtggtgggtcccctggcgcatgtcccgcacttggaacaaaaagctgcagtagcagctgcgctgtacatgatctgatcttctggcgcgatgtgaagaaaactggcttcgtgttcgggaccaccctgattatgctgctgtctctagctgctttctctgtgataagtgtagtctcctacttgatcttagctctcctctccgtgacaatctcatttagaatctacaagtctgtgatccaagcagttcagaagtccgaagagggacacccatttaagccacgacttatcactatgttagccagccctgagattcgcccttctcaactgctaaagcgcagcaaacagaatagccttgaatcccccaagaagcggcagaataaatacatggagacacgaaacgccaccgtgaccaagacaccgtttaactcgtacaatgtcgtaacctgtactatgaaggagaacacacaatgccagttggagcctgccttccaggcgttcttccttatttggtgtttcttgcctagcttcccctttaatccccagtaccaggcacagaaactgatggactag

SEQ ID NO: 94080 - DNA, 372 bp, Artificial Sequence
  derived and/or modified sequence
atggctgagcctagtgcggcaacccagtcacattccatctcatcctcttcatttggggcagagcctagcgcccctgggggtggcggaagccccggagcctgtccagctctcggcaccaagtcatgctcgtccagttgcgcagtccatgaccttatcttttggcgtgatgtcaaaaaaaccgggttcgtattcgggaccacactgattatgctgttgtccctggctgcattttccgtaatctccgttgtgtcatacctaattctggcattgctctccgtgaccatttcctttcgaatctacaagagcgtgattcaggcggttcaaaaaagcgaggaaggacatcccttcaactggttgagctcctgcggctag

SEQ ID NO: 94081 - DNA, 1407 bp, Artificial Sequence
  derived and/or modified sequence
ttcccctccctctctcccgccccgtatctcttttcacccttctcccaccctcgctcgcgtagccatggcggagccgtcggcggccactcagtcccattccatctcctcgtcgtccttcggagccgagccgtccgcgcccggcggcggcgggagcccaggagcctgccccgccctggggacgaagagctgcagctcctcctgtgcggtgcacgatctgattttctggagagatgtgaagaagactgggtttgtctttggcaccacgctgatcatgctgctttccctggcagctttcagtgtcatcagtgtggtttcttacctcatcctggctcttctctctgtcaccatcagcttcaggatctacaagtccgtcatccaagctgtacagaagtcagaagaaggccatccattcaaacccagattgatcactatgttggcatcgcccgagatcagaccaagtcaattgttgaaaagatccaagcaaaactccctggaatcgccaaaaaaaaggcagaataagtacatggaaaccagaaatgcaacagttactaaaacaccatttaatagttataacgtcgttacttgtactatgaaggaaaatactcagtgtcagcttgagcctgcattccaagctttttttttaatttggtgttttctcccatcctttccctttaaccctcagtatcaagcacaaaaattgatggactgataaaagaactatcttagaactcagaagaagaaagaatcaaattcataggataagtcaataccttaatggtggtagagcctttacctgtagcttgaaaggggaaagattggaggtaagagagaaaatgaaagaacacctctgggtccttctgtccagttttcagcactagtcttactcagctatccattatagttttgcccttaagaagtcatgattaacttatgaaaaaattatttggggacaggagtgtgataccttccttggtttttttttgcagccctcaaatcctatcttcctgccccacaatgtgagcagctacccctgatactccttttctttaatgatttaactatcaacttgataaataacttataggtgatagtgataattcctgattccaagaatgccatctgataaaaaagaatagaaatggaaagtgggactgagagggagtcagcaggcatgctgcggtggcggtcactccctctgccactatccccagggaaggaaaggctccgccatttgggaaagtggtttctacgtcactggacaccggttctgagcattagtttgagaactcgttcccgaatgtgctttcctccctctcccctgcccacctcaagtttaataaataaggttgtacttttcttactataaaataaatgtctgtaactgctgtgcactgctgtaaacttgtt

SEQ ID NO: 94082 - DNA, 992 bp, Artificial Sequence
  derived and/or modified sequence
agtctgtcggagtctgtcctcggagcaggcggagtaaagggacttgagcgagccagttgccggattattctatttcccctccctctctcccgccccgtatctcttttcacccttctcccaccctcgctcgcgtagccatggcggagccgtcggcggccactcagtcccattccatctcctcgtcgtccttcggagccgagccgtccgcgcccggcggcggcgggagcccaggagcctgccccgccctggggacgaagagctgcagctcctcctgtgcggtgcacgatctgattttctggagagatgtgaagaagactgggtttgtctttggcaccacgctgatcatgctgctttccctggcagctttcagtgtcatcagtgtggtttcttacctcatcctggctcttctctctgtcaccatcagcttcaggatctacaagtccgtcatccaagctgtacagaagtcagaagaaggccatccattcaactggctgtcttcatgtggctgatgacctatgttggtgctgtttttaacggaatcacccttctaattcttgctgaactgctcattttcagtgtcccgattgtctatgagaagtacaaggatccaagcaaaactccctggaatcgccaaaaaaaaggcagaataagtacatggaaaccagaaatgcaacagttactaaaacaccatttaatagttataacgtcgttacttgtactatgaaggaaaatactcagtgtcagcttgagcctgcattccaagctttttttttaatttggtgttttctcccatcctttccctttaaccctcagtatcaagcacaaaaattgatggactgataaaagaactatcttagaactcagaagaagaaagaatcaaattcataggataagtcaataccttaatggtggtagagcctttacctgtagcttgaaaggggaaagattggaggtaagagagaaaatgaaagaacacctctgggtccttctgt

SEQ ID NO: 94083 - DNA, 645 bp, Artificial Sequence
  derived and/or modified sequence
atggccgagcccagcgccgccacccagagccacagcatcagcagcagcagcttcggcgccgagcccagcgcccccggcggcggcggcagccccggcgcctgccccgccctgggcaccaagagctgcagcagcagctgcgccgtgcacgacctgatcttctggagagacgtgaagaagaccggcttcgtgttcggcaccaccctgatcatgctgctgagcctggccgccttcagcgtgatcagcgtggtgagctacctgatcctggccctgctgagcgtgaccatcagcttcagaatctacaagagcgtgatccaggccgtgcagaagagcgaggagggccaccccttcaagcccagactgatcaccatgctggccagccccgagatcagacccagccagctgctgaagagaagcaagcagaacagcctggagagccccaagaagagacagaacaagtacatggagaccagaaacgccaccgtgaccaagacccccttcaacagctacaacgtggtgacctgcaccatgaaggagaacacccagtgccagctggagcccgccttccaggccttcttcctgatctggtgcttcctgcccagcttccccttcaacccccagtaccaggcccagaagctgatggactag

SEQ ID NO: 94084 - DNA, 372 bp, Artificial Sequence
  derived and/or modified sequence
atggccgagcccagcgccgccacccagagccacagcatcagcagcagcagcttcggcgccgagcccagcgcccccggcggcggcggcagccccggcgcctgccccgccctgggcaccaagagctgcagcagcagctgcgccgtgcacgacctgatcttctggagagacgtgaagaagaccggcttcgtgttcggcaccaccctgatcatgctgctgagcctggccgccttcagcgtgatcagcgtggtgagctacctgatcctggccctgctgagcgtgaccatcagcttcagaatctacaagagcgtgatccaggccgtgcagaagagcgaggagggccaccccttcaactggctgagcagctgcggctag

SEQ ID NO: 94085 - protein, 129 aa, Artificial Sequence
  derived and/or modified sequence
MAELIQKKLQGEVEKYQQLQKDLSKSMSGRQKLEAQLTENNIVKEELALLDGSNVVFKLLGPVLVKQELGEARATVGKRLDYITAEIKRYESQLRDLERQSEQQRETLAQLQQEFQRAQAAKAGAPGKA

SEQ ID NO: 94086 - protein, 103 aa, Artificial Sequence
  derived and/or modified sequence
MAELIQKKLQGEVEKYQQLQKDLSKSMSGRQKLEAQLTENNIVKEELALLDGSNVVFKLLGPVLVKQELGEARATVGKRLDYITAEIFLRTIPDPGDVPDSFF

SEQ ID NO: 94087 - DNA, 390 bp, Artificial Sequence
  derived and/or modified sequence
atggccgagctgatccagaagaagctgcagggcgaggtggagaagtaccagcagctgcagaaggacctgagcaagagcatgagcggcagacagaagctggaggcccagctgaccgagaacaacatcgtgaaggaggagctggccctgctggacggcagcaacgtggtgttcaagctgctgggccccgtgctggtgaagcaggagctgggcgaggccagagccaccgtgggcaagagactggactacatcaccgccgagatcaagagatacgagagccagctgagagacctggagagacagagcgagcagcagagagagaccctggcccagctgcagcaggagttccagagagcccaggccgccaaggccggcgcccccggcaaggcctag

SEQ ID NO: 94088 - DNA, 312 bp, Artificial Sequence
  derived and/or modified sequence
atggccgagctgatccagaagaagctgcagggcgaggtggagaagtaccagcagctgcagaaggacctgagcaagagcatgagcggcagacagaagctggaggcccagctgaccgagaacaacatcgtgaaggaggagctggccctgctggacggcagcaacgtggtgttcaagctgctgggccccgtgctggtgaagcaggagctgggcgaggccagagccaccgtgggcaagagactggactacatcaccgccgagatcttcctgagaaccatccccgaccccggcgacgtgcccgacagcttcttctag

SEQ ID NO: 94089 - DNA, 390 bp, Artificial Sequence
  derived and/or modified sequence
atggccgagctgattcagaagaagttgcagggtgaggtagagaagtatcagcagctgcagaaggatctcagtaagagcatgtcagggcgtcagaagcttgaagctcagcttacagagaataacatcgttaaagaggagctggctcttctcgacggctctaatgtcgtattcaagttgcttggccccgtgttggtcaagcaggagctgggcgaggcccgagcgaccgttggaaagaggctggactacattaccgcagaaatcaagcggtacgagtcgcagctgagggacctcgagagacagtccgaacagcagagagagacgctagctcagctgcagcaagagttccagagggcccaggccgccaaagccggagctcccggcaaggcctag

SEQ ID NO: 94090 - DNA, 390 bp, Artificial Sequence
  derived and/or modified sequence
atggcggaattaatccagaagaagttgcaaggtgaagtggagaaatatcagcagttgcagaaagatcttagcaaatcgatgagtgggcgtcagaaattggaagcacaattaaccgaaaacaacatcgtcaaggaggagctagcacttttagacggtagcaacgtagtgttcaagcttttgggcccggtcctggttaagcaagaactgggagaggcaagagccactgtcggaaaacgcctggactatattaccgcagagattaagcgatacgagagccagctgcgagaccttgaacggcaatctgagcagcagagagaaacactggcccagctacaacaggagtttcagcgggcacaagccgcaaaggctggggcgcctggaaaagcctag

SEQ ID NO: 94091 - DNA, 390 bp, Artificial Sequence
  derived and/or modified sequence
atggctgagttaattcaaaaaaagctgcagggggaggtggaaaagtaccaacagctgcagaaagacctgtcgaagtccatgagcgggcgacaaaagctggaggctcagctgaccgagaataatatcgtcaaggaggagctcgccctcctggatgggtcaaatgtagtgtttaaactcctggggccagttctagttaagcaagagctgggtgaggccagagcaactgtgggcaagcgactggactacataacagcggagatcaagcgctatgaaagccagctgagagacttagaacgccaatctgaacagcagagagaaactctggctcagctgcagcaagaattccagagggcccaggcagccaaggcaggggcacctggtaaagcatag

SEQ ID NO: 94092 - DNA, 390 bp, Artificial Sequence
  derived and/or modified sequence
atggccgaactgatccaaaagaagctccagggggaggtggagaagtatcagcagctgcagaaggacctgtccaagagcatgtctggcaggcagaaactggaagcgcaacttaccgaaaataatatagtaaaagaggagctagctctcctggacgggtccaatgtggtattcaagctgcttggaccagtactcgtgaaacaggagcttggtgaggccagggcaaccgtcggtaagaggctagactatattaccgccgagattaagagatacgaatcccaactgcgggacttagagcggcagagcgaacaacagcgagagacacttgcccagcttcagcaagaattccagcgcgcccaggccgctaaggccggagcacctggaaaggcctag

SEQ ID NO: 94093 - DNA, 390 bp, Artificial Sequence
  derived and/or modified sequence
atggcagagctgattcagaaaaagcttcagggcgaagtggagaagtaccagcaactgcagaaggacttgagtaagtccatgtctggacggcaaaaactcgaggcgcagctcacagagaataacattgtcaaagaggagcttgctctgttggatggtagcaatgttgtgtttaagcttctaggtcccgtgttggtaaaacaggaactgggcgaggcgcgtgcaacagtcggcaaacgactggattatattactgcagaaataaagcggtatgagtctcagctgagggatcttgagcgacagagcgagcagcagcgcgagactctagcacagcttcagcaggagtttcaaagagctcaggccgcaaaagctggcgccccagggaaagcttag

SEQ ID NO: 94094 - DNA, 390 bp, Artificial Sequence
  derived and/or modified sequence
atggcggagctcattcaaaaaaaactccagggcgaggtcgaaaaataccaacagttgcagaaggatctgtccaagagtatgagtgggaggcagaagctggaagcccagttaactgagaacaacattgtgaaggaggagctcgcattgcttgacgggtcaaacgtcgtcttcaaattgctgggccctgtgcttgtgaaacaagaactcggtgaggctagggctactgtgggtaagcgccttgactacattacggcggagatcaaacggtacgagtcccaacttcgggacttagaacgccagtccgagcagcagcgcgagaccctggcccaactccagcaggagtttcagagagctcaagctgcaaaggcaggcgcgccaggaaaagcctag

SEQ ID NO: 94095 - DNA, 390 bp, Artificial Sequence
  derived and/or modified sequence
atggcggagctgatacagaagaagctccaaggggaggtggagaagtaccagcagttacaaaaggacttgtccaagtccatgtcgggacgccagaagttagaggcccaactgaccgagaataatatagtgaaggaggaattggctctcctggacgggtccaatgtggttttcaagctcttggggcccgttctggtgaaacaggaattgggcgaggcccgcgccacagtggggaaacgcctggactatattaccgcagagataaaacgctacgagtcccagctacgagacctcgagcgccagagcgagcagcaacgcgaaaccctcgcccagttgcagcaagagtttcagagggcccaagcagccaaggccggggctccgggcaaggcgtag

SEQ ID NO: 94096 - DNA, 390 bp, Artificial Sequence
  derived and/or modified sequence
atggcagagctgattcagaaaaagctgcaaggtgaagtggaaaaatatcagcagctgcagaaagacctttctaagtctatgtccggacggcaaaaattagaggctcagttaaccgagaacaacatcgtgaaggaggaattggctttgctggatggctctaacgtggtattcaagctgctgggaccggtactggtcaaacaggagctgggcgaagccagggctaccgtggggaaacgtctggattacataacagcagagatcaaacggtatgaatcacagctgagggatttggaacgacaaagcgagcaacagcgtgagacattggctcagctgcaacaggagttccaacgggcccaagcagctaaggcaggcgcaccagggaaagcctag

SEQ ID NO: 94097 - DNA, 390 bp, Artificial Sequence
  derived and/or modified sequence
atggctgagttgatacagaaaaaattgcagggcgaggtggagaaataccagcagctccagaaagacctgtctaaatctatgagtgggagacagaaactggaggctcagctgactgagaataatattgtcaaagaggagctggcattgcttgacgggagcaatgtggtgtttaaactgctgggccctgtgctggttaagcaggaattgggagaagccagagccacagttgggaaaaggcttgattatattaccgccgagatcaagcgttatgagtctcaactgagagatttggagagacagtctgagcagcagagggagactctggctcagctgcagcaggagttccagcgggcccaggccgcaaaggccggggctcccggaaaagcatag

SEQ ID NO: 94098 - DNA, 390 bp, Artificial Sequence
  derived and/or modified sequence
atggcagagcttatccagaaaaagctgcaaggtgaagttgagaaatatcaacaactgcagaaggacctaagcaagtcaatgtcgggcaggcagaagctggaagcccaactcacagaaaataatatcgtgaaggaggagttggcactcctcgatggctctaacgtggtttttaagctcttgggtccagtcttagtaaagcaggagctgggagaggcacgcgcgacagtgggtaagagactggactacatcacagctgagataaaacggtacgaatcgcagctccgcgacctggagcgacaatcagaacagcagcgggaaacgttggcgcagctccagcaagagtttcagcgggctcaagctgccaaggcaggtgcgccagggaaggcatag

SEQ ID NO: 94099 - DNA, 390 bp, Artificial Sequence
  derived and/or modified sequence
atggccgaacttatacagaaaaagctgcagggtgaggtagagaagtatcaacagctgcagaaagacttatcaaagtctatgagcggacgccagaagctggaggcccaactgacagaaaataatattgtgaaggaagagctggccctgctggacgggtccaacgtggtctttaagctgctgggtcctgttctggtgaagcaggagctcggcgaagcaagggccaccgtcggaaagcgcttggactatatcacagcagaaattaaacggtacgagtcacagctgagggacctggagcggcagagtgaacagcagagggaaacattggcacagcttcagcaggaattccagagggcccaggccgccaaggctggagctccgggcaaagcttag

SEQ ID NO: 94100 - DNA, 390 bp, Artificial Sequence
  derived and/or modified sequence
atggccgaactgatacagaagaaattgcagggggaggtggaaaaataccaacagctgcagaaggatctgtcaaagagtatgtcggggcgccagaagttagaagctcagctgacagaaaataatatcgttaaagaggagcttgcccttctggacggaagcaacgtggtgttcaagctgctgggaccagtgctggttaagcaggagttgggagaagcaagggctacagttggaaagcgacttgactatattactgcggagatcaagcgttacgagtcccagcttagggatttagaaaggcagagcgaacagcagcgggaaactctcgctcaattacaacaggagttccaaagggcacaggccgcaaaagccggagctccaggaaaagcgtag

SEQ ID NO: 94101 - DNA, 390 bp, Artificial Sequence
  derived and/or modified sequence
atggccgagctcatacaaaagaaattacagggcgaggtggagaaataccaacagctgcaaaaagatcttagcaagtcaatgagtggaaggcagaagcttgaggcacagctgaccgagaacaatatcgtcaaggaggagttggcccttttggatggcagcaacgtcgtgttcaagctgctgggccctgtgttggtgaaacaggaactaggggaagcccgagccaccgtagggaagcgattagattacattaccgcagagataaaaaggtatgaaagccagctgcgagacctcgagcgccagtcagagcagcagagagaaactctggcacagttacagcaagagttccagagagctcaggctgcgaaagccggtgccccaggaaaagcatag

SEQ ID NO: 94102 - DNA, 390 bp, Artificial Sequence
  derived and/or modified sequence
atggccgagctaattcagaagaagctgcaaggagaagtcgagaagtaccagcagctacaaaaggacttgtccaagtcaatgtctggcaggcagaaactcgaggcccagctgaccgaaaacaatatcgtcaaagaagaacttgcattgttggacggttccaatgtcgttttcaaactcctcggacccgtgttagtcaaacaggagttgggcgaggccagggctaccgtagggaaacgcctcgattacattaccgccgagatcaagagatacgagagccagctgcgagatttagaacgtcagagcgaacagcaaagagaaacactcgcacagctccagcaggaatttcagagagctcaggccgcgaaggcaggcgcgccgggcaaagcttag

SEQ ID NO: 94103 - DNA, 390 bp, Artificial Sequence
  derived and/or modified sequence
atggccgaactcatccagaagaagctccagggagaagtggagaaataccaacagctgcaaaaagatctgtctaagtccatgagtgggcgccagaaattagaagcgcaactgaccgagaacaacatagtcaaagaggaactggctctcctcgatggctcaaacgtagtattcaagttactcggaccagtcctggttaagcaggaattgggagaggcccgtgcaactgtcggaaagcgactggattatatcacggcggaaatcaaaagatacgagagtcagctgagagatctagagaggcaaagcgagcaacagcgcgagacattagcacagttacagcaggaattccaaagggctcaagccgcgaaggcgggtgcaccagggaaggcttag

SEQ ID NO: 94104 - DNA, 390 bp, Artificial Sequence
  derived and/or modified sequence
atggctgagttgatccagaaaaagttacagggggaagttgaaaaatatcaacagctccagaaggacctgagcaagtcaatgtccgggcgccagaaactggaggctcagctcacggaaaacaatatcgtaaaggaggagctagctttactcgatggcagtaacgtggtgtttaaactcctcggcccggtgctcgtaaaacaggagttaggtgaagctagggctactgttggaaagcggctggattacattactgccgaaattaagcggtatgaatcccaactgagggacctggagcgacagagcgaacagcaacgagagacactggcacaactgcagcaggaattccaaagggcccaggccgcgaaggccggagcccccggaaaggcatag

SEQ ID NO: 94105 - DNA, 312 bp, Artificial Sequence
  derived and/or modified sequence
atggcagaactgattcagaagaagctacagggcgaggtggaaaagtaccaacaactgcagaaggacttgagcaaatcaatgtccggtcgccagaagctggaggcccagctgaccgagaacaacattgtgaaggaggagcttgcacttttagacgggagcaacgtcgtttttaaactgttaggccctgtgttagtgaagcaggaattgggagaagcgagggccactgtggggaagcgcttggattacattactgcggaaatctttcttcggactataccagatcctggcgacgttcctgactcctttttctag

SEQ ID NO: 94106 - DNA, 312 bp, Artificial Sequence
  derived and/or modified sequence
atggcagagttaattcagaagaagctgcaaggcgaagtggagaaatatcagcagctgcagaaggacctgagtaagtctatgagcggccgtcaaaagctggaagctcagcttactgagaacaacatagtaaaagaggagcttgcacttctcgacggctccaacgtcgtgttcaagctactaggacctgtgctggttaagcaagagctcggagaggcccgagcaacagttggaaagcggttggattacatcacagctgaaatcttcctgcgcactatcccagacccaggggacgttcccgacagcttcttctag

SEQ ID NO: 94107 - DNA, 312 bp, Artificial Sequence
  derived and/or modified sequence
atggctgagttaatccagaagaaactgcaaggcgaggtagagaagtaccaacagttgcagaaagacttgtcgaagtcaatgagtgggcggcaaaaactcgaggcccagcttacagaaaataacatcgtcaaggaagagttggcattgctggatggatcaaatgtagtctttaaactgctcggaccagttctagttaagcaggagctgggagaggcccgggcaaccgtgggaaaaaggctcgattacattaccgctgaaatcttcctgcgaactatcccagacccgggcgacgtcccagactcttttttctag

SEQ ID NO: 94108 - DNA, 312 bp, Artificial Sequence
  derived and/or modified sequence
atggcagagctgatccagaagaaactgcagggtgaagttgagaaatatcagcagctgcagaaggacctgagtaagagcatgagcggacgacaaaagctggaagctcagcttacagagaataacattgttaaggaagaactcgcgttgctcgacggttccaacgtggtgtttaagttactcggccccgtcttggttaagcaagagttgggagaagcccgcgcaactgttggcaagcggctcgactacattacagctgagattttcttaagaaccatcccagatcctggagatgtccccgatagtttcttctag

SEQ ID NO: 94109 - DNA, 312 bp, Artificial Sequence
  derived and/or modified sequence
atggccgagctgatacagaagaagttacaaggagaggtggagaagtatcaacagctgcagaaagatctatcaaaatccatgtcaggccgccagaagttggaggcccagctaacagaaaataacattgtcaaggaggaactagccctcttagacggaagcaacgtcgtgtttaaacttctcgggccagttcttgtgaaacaggagctgggtgaagcccgagctactgtgggcaagagactagattacattacagcagaaatttttttgcgtacgatcccagatccaggagacgtgccagattcatttttctag

SEQ ID NO: 94110 - DNA, 390 bp, Artificial Sequence
  derived and/or modified sequence
atggcagagctgattcagaaaaaattgcagggtgaggtggaaaaatatcaacagcttcaaaaagatttgagcaagtcaatgagtggacggcaaaagctggaagcccagctcacagaaaataatatcgtgaaggaggagttagccctactagatggcagcaacgttgtcttcaaactccttggtccagtgctggtgaaacaagagttgggggaggcccgtgcaactgttggcaaacgtctcgactacataaccgctgagataaagagatatgagagccagctccgagatctggaacgtcagtcagaacagcagagggagacgctggcccagctacaacaagaatttcagagggctcaggccgccaaagcaggggctccgggcaaagcgtag

SEQ ID NO: 94111 - DNA, 390 bp, Artificial Sequence
  derived and/or modified sequence
atggccgagttaattcagaagaagctccagggagaggttgagaagtaccaacaactgcaaaaggaccttagcaaaagcatgtccggtagacaaaaattagaagcccaattaaccgagaacaatattgtaaaggaggaacttgccctcctcgatggtagtaatgtggtttttaagctcctggggcccgtgctcgttaaacaggaactgggggaagccagagccacagtaggtaaacgcctcgactacattaccgctgagatcaagaggtatgaaagtcaactgagggacttagagcgtcagtcagagcaacagagggaaaccctggcccagctgcagcaggagttccaaagggcgcaggctgcaaaggctggggcacctggaaaagcctag

SEQ ID NO: 94112 - DNA, 390 bp, Artificial Sequence
  derived and/or modified sequence
atggctgaactcattcagaagaagctccagggggaggtcgaaaagtatcagcaactccagaaggacctctctaaatctatgagtgggagacagaagctagaagcccagctcaccgagaacaacattgtgaaagaagagcttgccctgctggacggatctaatgtcgtctttaagctgttaggtccagttttagtgaaacaggagcttggcgaggccagggccacagtggggaagcggctggactacattacagccgaaatcaaaagatatgaatcccagctccgagacctggagagacagtctgagcagcagcgcgaaacactggcccagttgcagcaggaattccaacgtgcccaagccgctaaggcaggcgcccctggaaaagcctag

SEQ ID NO: 94113 - DNA, 390 bp, Artificial Sequence
  derived and/or modified sequence
atggcagaactcattcaaaaaaagttgcaaggagaagtggaaaaataccagcagctgcaaaaggatctctccaaatctatgtctggacgtcagaagctcgaagctcagctgaccgagaataacattgtcaaggaagaactagccctgcttgacgggagcaacgtcgtctttaaactgctcggccccgtcctggtgaaacaggagctaggtgaggcaagagccaccgtcgggaagcggctcgattacatcaccgcagagatcaagaggtacgaaagccagctgagggatctagagaggcaatccgaacagcagcgcgagacattggcccagttgcaacaggagtttcagagagcacaggctgccaaagccggggcaccaggcaaggcatag

SEQ ID NO: 94114 - DNA, 740 bp, Artificial Sequence
  derived and/or modified sequence
gggtttattactactgaaggaagaacgtgagtaggttaggatttcggttgagaggcttggggtcttgcgtttcgcccaccatctcctggggacagggtggagtcgatatccgggacgggggggaggttgcggtgcccctcagggctacctctcaagagtgctatcatttccgcaggccagatcagaaaagggagctcaggtaccttccagagagtgagacccagcgcccttgtctcgcacccagtaggctttcatccccgccatggcggagctgatccagaagaagctacagggagaagtggagaaatatcaacagctacagaaggacttaagtaaatccatgtcggggaggcagaaacttgaagcacaactaacagaaaataatatcgtgaaagaggaactggccctgctggatgggtccaacgtggtctttaaacttctgggtccggtgctagtcaaacaggagctgggggaggctcgggccacagtagggaagaggctggactatatcacagctgaaattaagcgatacgaatcccagcttcgggatcttgagcggcagtcagagcaacagagggagacccttgctcagctgcagcaggagttccagcgggcccaggcagcaaaggcaggggctcctggcaaggcctgaccccatggtggggggaggggaggggaggggagggaatgaggcagctctaggatctatactgtagctaataaaatgtaaaaacacctgg

SEQ ID NO: 94115 - DNA, 581 bp, Artificial Sequence
  derived and/or modified sequence
attactactgaaggaagaacgtgagtaggccagatcagaaaagggagctcaggtaccttccagagagtgagacccagcgcccttgtctcgcacccagtaggctttcatccccgccatggcggagctgatccagaagaagctacagggagaagtggagaaatatcaacagctacagaaggacttaagtaaatccatgtcggggaggcagaaacttgaagcacaactaacagaaaataatatcgtgaaagaggaactggccctgctggatgggtccaacgtggtctttaaacttctgggtccggtgctagtcaaacaggagctgggggaggctcgggccacagtagggaagaggctggactatatcacagctgaaattaagcgatacgaatcccagcttcgggatcttgagcggcagtcagagcaacagagggagacccttgctcagctgcagcaggagttccagcgggcccaggcagcaaaggcaggggctcctggcaaggcctgaccccatggtggggggaggggaggggaggggagggaatgaggcagctctaggatctatactgtagctaataaaatgt

SEQ ID NO: 94116 - DNA, 521 bp, Artificial Sequence
  derived and/or modified sequence
gtttattactactgaaggaagaacgtgagtagatcagaaaagggagctcaggtaccttccagagagtgagacccagcgcccttgtctcgcacccagtaggctttcatccccgccatggcggagctgatccagaagaagctacagggagaagtggagaaatatcaacagctacagaaggacttaagtaaatccatgtcggggaggcagaaacttgaagcacaactaacagaaaataatatcgtgaaagaggaactggccctgctggatgggtccaacgtggtctttaaacttctgggtccggtgctagtcaaacaggagctgggggaggctcgggccacagtagggaagaggctggactatatcacagctgaaattaagcgatacgaatcccagcttcgggatcttgagcggcagtcagagcaacagagggagacccttgctcagctgcagcaggagttccagcgggcccaggcagcaaaggcaggggctcctggcaaggcctgaccccatggtggggggag

SEQ ID NO: 94117 - DNA, 390 bp, Artificial Sequence
  derived and/or modified sequence
atggccgagctgatccagaagaagctgcagggcgaggtggagaagtaccagcagctgcagaaggacctgagcaagtccatgagcggccggcagaagctggaggcccagctgacagagaacaacatcgtgaaggaggagctggccctgctggatggcagcaatgtggtgttcaagctgctgggccctgtgctggtgaagcaggagctgggggaggcccgggccaccgtgggcaagaggctggactacatcacagctgagatcaagagatatgagagccagctgcgggacctggagcggcagagcgagcagcagcgggagaccctggcccagctgcagcaggagttccagagggcccaggccgccaaggccggggcccctgggaaggcctag

SEQ ID NO: 94118 - DNA, 312 bp, Artificial Sequence
  derived and/or modified sequence
atggccgagctgatccagaagaagctgcagggcgaggtggagaagtaccagcagctgcagaaggacctgagcaagtccatgagcggccggcagaagctggaggcccagctgacagagaacaacatcgtgaaggaggagctggccctgctggatggcagcaatgtggtgttcaagctgctgggccctgtgctggtgaagcaggagctgggggaggcccgggccaccgtgggcaagaggctggactacatcacagctgagatcttcctgcggaccatcccagaccctggagatgtgcctgacagcttcttctag

SEQ ID NO: 94119 - DNA, 884 bp, Artificial Sequence
  derived and/or modified sequence
atcttgagtgagggcacgctctccttagaggggcggaacagtttttggcaccttatcgcgagcggcagcttatgcaagagtgatttaaaaaagaaaggcaggtccggagccaggggctaagtagcggtgcggtttctttttctggattagtttccccatcttgcctaaaaatgtcctagtctagtctttttagcagaactccactccctaaacatgtcagaactacacttcccatcaagggtcagaaagaaacttccggcacagtcttttcccagcattccttgtttacttccgggtttattactactgaaggaagaacgccagatcagaaaagggagctcaggtaccttccagagagtgagacccagcgcccttgtctcgcacccagtaggctttcatccccgccatggcggagctgatccagaagaagctacagggagaagtggagaaatatcaacagctacagaaggacttaagtaaatccatgtcggggaggcagaaacttgaagcacaactaacagaaaataatatcgtgaaagaggaactggccctgctggatgggtccaacgtggtctttaaacttctgggtccggtgctagtcaaacaggagctgggggaggctcgggccacagtagggaagaggctggactatatcacagctgaaattaagcgatacgaatcccagcttcgggatcttgagcggcagtcagagcaacagagggagacccttgctcagctgcagcaggagttccagcgggcccaggcagcaaaggcaggggctcctggcaaggcctgaccccatggtggggggaggggaggggaggggagggaatgaggcagctctaggatctatactgtagctaataaaatgtaaaaacacctgg

SEQ ID NO: 94120 - DNA, 390 bp, Artificial Sequence
  derived and/or modified sequence
atggccgagctgatccagaagaagctgcagggcgaggtggagaagtaccagcagctccagaaggaccttagtaaatccatgtccgggagacagaagcttgaggcccagcttaccgaaaacaatatcgtaaaggaggaactcgcgctgctcgacgggagcaacgtggtgttcaaactgctgggaccagtgctggtgaagcaggaactgggcgaggcccgagctaccgtgggtaagaggctggactacattaccgccgagatcaagaggtatgagtcccaactaagggatctcgaacggcaaagtgaacaacaaagagagacactggcccagctgcaacaagagtttcaaagagctcaagcagccaaagccggagcgccaggcaaggcatag

SEQ ID NO: 94121 - DNA, 390 bp, Artificial Sequence
  derived and/or modified sequence
atggccgagctgatccagaagaagctgcagggcgaggtggagaagtaccagcagttgcagaaagatttatccaagtccatgtctggacgacagaagctggaggcccagctgaccgaaaacaacatcgtaaaagaggagctggccctgttggacggatctaacgtggtttttaaacttctcggccccgtactggtgaaacaggagcttggggaggccagggcaacagtcggaaagagattggactatattacagccgaaatcaagcgctatgaatctcagcttagggatcttgagcggcaatcagaacaacagcgggaaaccctcgcccagcttcagcaggagttccagagggcacaggcagctaaagccggggcacccggaaaagcatag

SEQ ID NO: 94122 - DNA, 390 bp, Artificial Sequence
  derived and/or modified sequence
atggccgagctgatccagaagaagctgcagggcgaggtggagaagtatcaacaacttcagaaggatctctcaaaaagtatgagtggcagacagaaacttgaagcacagctcaccgagaataatatcgtgaaggaggagcttgccctgttggatggctctaacgtggtgttcaagctgctcgggccggttctcgtaaagcaagagctgggtgaggctagggcaactgtcgggaagagactcgactatataacagctgagattaagcgttacgaatcacaactgagggatctggaacgccaatcagagcaacagcgagagactctggcccagctccagcaggagttccaacgagcccaggctgctaaggccggggctcctggaaaggcttag

SEQ ID NO: 94123 - DNA, 390 bp, Artificial Sequence
  derived and/or modified sequence
atggccgagctgatccagaagaagctgcagggcgaggtggagaagtatcagcagctgcagaaagacctctccaaaagcatgtcaggccggcaaaagctcgaggctcagctcaccgagaacaacatcgtcaaagaggagctagctctgttggacgggtccaatgtggtgtttaagctgctgggcccagtgctggtcaagcaggaactcggagaggccagggctactgtagggaaaagactggattatattaccgcagagattaagcgatatgagtcgcagttgcgtgaccttgaacgacagtccgaacagcagcgggaaactctcgctcagttgcaacaggagttccaaagggcgcaggctgccaaagccggtgctcccggaaaggcttag

SEQ ID NO: 94124 - DNA, 390 bp, Artificial Sequence
  derived and/or modified sequence
atggccgagctgatccagaagaagctgcagggcgaggtggagaagtaccagcagctccagaaagatctgagcaagtctatgtcaggacgccaaaaactagaggctcagctcactgaaaacaacattgtgaaggaggaattagccctcctcgatggcagcaatgtcgtattcaagctgctgggtcccgtgctggtgaaacaggagttgggagaagcccgcgccaccgtgggcaagcgactggactatattaccgcagagattaaaagatatgagtctcagttgcgagacctggaaaggcagagtgagcagcaacgcgagacgctagctcagcttcagcaagagtttcagcgggcccaggccgcaaaggccggagctccaggcaaggcctag

SEQ ID NO: 94125 - DNA, 390 bp, Artificial Sequence
  derived and/or modified sequence
atggccgagctgatccagaagaagctgcagggcgaggtggagaagtaccaacagctccagaaagacctatctaaatctatgtcaggacgccaaaagctggaagctcagctgacggaaaacaacattgtaaaggaggaattggcactgcttgatggttcaaatgtagtgttcaagctcctggggcctgtgttagtgaagcaggagctgggagaagcacgggctacagttggcaaacgtctagactacataacggccgagatcaaaagatacgagtcccaacttcgggatcttgaacggcagagcgaacagcagcgagaaacacttgcccaactgcagcaagagttccagagagctcaggccgctaaggctggggcccctggaaaggcctag

SEQ ID NO: 94126 - DNA, 390 bp, Artificial Sequence
  derived and/or modified sequence
atggccgagctgatccagaagaagctgcagggcgaggtggagaagtaccaacagttacaaaaagacctgtcaaagagcatgagcgggcgccagaaattggaagcccagctcacggagaacaatattgtcaaggaggagctcgctctcttggacggtagcaacgtggtctttaaattgttaggacccgttcttgtgaagcaggaattgggtgaggcacgggcaaccgttggcaagaggttggattacattaccgctgagattaaaaggtatgaaagccagttacgagatctcgaacgccaatccgagcagcagagggagaccttggcccaactgcaacaggaattccaacgcgcccaggctgctaaagcaggggcgcctggcaaagcttag

SEQ ID NO: 94127 - DNA, 390 bp, Artificial Sequence
  derived and/or modified sequence
atggccgagctgatccagaagaagctgcagggcgaggtggagaagtaccagcagctgcagaaggacctttccaagtccatgagcgggaggcagaagctagaagcccagctgaccgagaataacatcgtcaaagaggagctggccctgttagatgggtccaatgtagtgttcaaactgctggggcccgttttagtgaaacaggagctgggggaggcgcgcgccacagttggcaaacggctcgattatattacagccgaaataaaacgctacgaaagccaacttcgcgacctggagcggcagtctgagcagcagagagaaacactcgcccagctccaacaggagttccagcgcgctcaggccgcgaaagccggtgcacctggtaaggcctag

SEQ ID NO: 94128 - DNA, 884 bp, Artificial Sequence
  derived and/or modified sequence
atcttgagtgagggcacgctctccttagaggggcggaacagtttttggcaccttatcgcgagcggcagcttatgcaagagtgacttaaaaaagaaaggcaggtccggggccaggggctaagtagcggtgcggtttctttttctggattagtttccccatcttgcctaaaaatgtcctagtctagtctttttagcagaactccactccctaaacatgtcagaactacacttcccatcaagggtcagaaagaaacttccggcacagtcttttcccagcattccttgtttacttccgggtttattactactgaaggaagaacgccagatcagaaaagggagctcaggtaccttccagagagtgagacccagcgcccttgtctcgcacccagtaggctttcatccccgccatggcggagctgatccagaagaagctacagggagaagtggagaaatatcaacagctacagaaggacttaagtaaatccatgtcggggaggcagaaacttgaagcacaactaacagaaaataatatcgtgaaagaggaactggccctgctggatgggtccaacgtggtctttaaacttctgggtccggtgctagtcaaacaggagctgggggaggctcgggccacagtagggaagaggctggactatatcacagctgaaattaagcgatacgaatcccagcttcgggatcttgagcggcagtcagagcaacagagggagacccttgctcagctgcagcaggagttccagcgggcccaggcagcaaaggcaggggctcctggcaaggcctgaccccatggtggggggaggggaggggaggggagggaatgaggcagctctaggatctatactgtagctaataaaatgtaaaaacacctgg

SEQ ID NO: 94129 - DNA, 390 bp, Artificial Sequence
  derived and/or modified sequence
atggccgagctgatccagaagaagctgcagggcgaggtggagaagtatcagcagttacagaaggacttgagtaagtctatgagcggcaggcaaaaactggaggcccagctgactgagaataacatcgtcaaagaagaactggcgctcctcgatggtagcaacgtcgtgttcaaactgctcggccctgtgctcgtaaaacaggagctcggggaggcccgagcaactgttggcaaaagactcgattacattacggctgaaattaagaggtacgaatcacagctccgcgacttggagcgccaatcggagcagcagagagagacattggcacaactgcagcaggaatttcagcgagcccaggccgctaaggccggcgctccagggaaagcttag

SEQ ID NO: 94130 - DNA, 390 bp, Artificial Sequence
  derived and/or modified sequence
atggccgagctgatccagaagaagctgcagggcgaggtggagaagtatcagcagctgcagaaggatctaagtaaatctatgagcggccgccagaaattggaggcacagctcaccgaaaataatattgtgaaagaagagcttgctctactcgacggatctaacgtcgtttttaaattgttgggccctgtgctcgtgaagcaggagcttggggaagcgagggctaccgtcggcaagcggttggactacataaccgcagagatcaaacgctacgagagccagctccgagatctggagagacagtcagaacagcagagagagaccctggctcagttgcaacaagagttccagcgcgcccaggccgcaaaggccggcgctcctggcaaagcttag

SEQ ID NO: 94131 - DNA, 390 bp, Artificial Sequence
  derived and/or modified sequence
atggccgagctgatccagaagaagctgcagggcgaggtggagaagtatcagcagttacagaaagatctgtccaaaagtatgtccggacggcaaaaactagaggctcaactgaccgaaaataatatcgtcaaggaggaattggctcttctcgacgggtccaatgttgttttcaaactgctggggcccgtactggtgaagcaggagctaggtgaggcgcgggctactgtagggaagagattggactatatcactgcagaaatcaagagatatgagagtcagctcagagatctggaacgacagtctgagcagcagagagaaactttggcccagttgcagcaagaattccagagagcccaggctgctaaggctggggcccccggaaaagcatag

SEQ ID NO: 94132 - DNA, 390 bp, Artificial Sequence
  derived and/or modified sequence
atggccgagctgatccagaagaagctgcagggcgaggtggagaagtaccagcagctccaaaaggacctaagcaaatccatgagcggtagacagaagttggaggctcagctgacagaaaacaacatcgtgaaggaagaactggcattactggatggttccaatgtagtttttaagctgctcgggccagtgttggtcaagcaggaactcggcgaggctcgcgctactgtggggaaacggctcgattacatcacagccgagattaagaggtatgagtctcagctccgggacctggaaaggcagagcgaacaacagcgtgaaacactcgcccaactccaacaggaatttcagcgcgcccaggcagctaaggcgggagcgccgggcaaggcgtag

SEQ ID NO: 94133 - DNA, 390 bp, Artificial Sequence
  derived and/or modified sequence
atggccgagctgatccagaagaagctgcagggcgaggtggagaagtatcaacaacttcagaaggatctgtcaaaatctatgagcggcaggcagaaactggaagcccagctgaccgaaaacaatattgtgaaggaggagttagccctcctggatggttccaatgtcgtctttaaactgctgggcccagtactcgtcaagcaagagttgggtgaagcacgggctaccgtcggcaagcgcctggattacataacagccgagatcaaacgctatgaatctcaattacgcgatctcgaacgacagtccgagcaacagagagagactttggcccaacttcaacaagagtttcagcgggcccaggctgcaaaggctggcgcccccgggaaagcctag

SEQ ID NO: 94134 - DNA, 390 bp, Artificial Sequence
  derived and/or modified sequence
atggccgagctgatccagaagaagctgcagggcgaggtggagaagtatcaacagttacaaaaagatctatcaaaaagtatgtctgggaggcagaaactggaggcgcagctcaccgaaaataatatcgtgaaggaagagctcgccctgcttgatggctccaacgtagtctttaagctgctgggacccgttcttgtgaagcaagaattgggcgaggctagggctacggtgggaaagcgcctggattacatcacagccgagatcaagcgctacgagagtcagctacgagacctggaaaggcagtccgagcaacagagagagaccctggctcagttacagcaggagtttcaaagggcacaggctgcaaaggctggggcaccgggaaaagcctag

SEQ ID NO: 94135 - DNA, 390 bp, Artificial Sequence
  derived and/or modified sequence
atggccgagctgatccagaagaagctgcagggcgaggtggagaagtatcagcagctgcagaaggacttgtctaagtccatgtcaggacggcagaagctcgaagcccaactcaccgaaaataacatcgtaaaagaagagttagctctgctcgatgggtcgaatgttgtgttcaaactcctgggtcctgtgttggttaaacaggaactcggcgaggctagagctacagtaggaaagaggctagactatatcacagccgaaattaaacgctatgaaagccagcttagagacctggaaaggcaatcagaacagcagagagagaccctggcccagctgcagcaagaattccaaagagcccaggccgcgaaggcaggagccccaggtaaagcatag

SEQ ID NO: 94136 - DNA, 390 bp, Artificial Sequence
  derived and/or modified sequence
atggccgagctgatccagaagaagctgcagggcgaggtggagaagtaccagcagttgcagaaggacctgtctaagtctatgagcggccgccagaagctggaagcacagctgaccgagaacaacatagtaaaagaagagctggccctgctcgatggctctaacgttgtatttaagctcctggggccagtgcttgtaaaacaggaattgggggaggcccgcgccactgtgggtaagcgactggattatatcactgccgagataaagaggtacgaatcacagctacgggatttggaacgacaaagtgagcagcagcgtgagacccttgcccagcttcagcaagaatttcaaagggcgcaagcggcgaaggctggggcccctggaaaagcctag

SEQ ID NO: 94137 - DNA, 312 bp, Artificial Sequence
  derived and/or modified sequence
atggccgagctgatccagaagaagctgcagggcgaggtggagaagtaccagcagctgcagaaggatctctcaaaatcaatgagtggcaggcagaaattggaggcacagctcacggagaataacattgtaaaggaggaactcgccctcctggacggtagtaacgtcgtattcaaactccttggccctgtgctcgtcaaacaggaactcggagaagcacgggctaccgtcgggaagcgactggactatataactgctgagatcttcctcagaacaatacccgatccaggcgatgtccctgacagcttcttttag

SEQ ID NO: 94138 - DNA, 312 bp, Artificial Sequence
  derived and/or modified sequence
atggccgagctgatccagaagaagctgcagggcgaggtggagaagtaccaacagctgcagaaggacttgtcgaagtcaatgtcagggagacagaagctggaggctcaattaacagagaataatatagtcaaagaggagttggccctcctggacggatcaaacgtggtgtttaaattactgggccccgtgttagtgaagcaggaattgggcgaggcccgggctaccgtgggcaaacggttagattatattaccgcagaaattttcctgcgcactatcccagatccaggagatgtccctgactcttttttctag

SEQ ID NO: 94139 - DNA, 312 bp, Artificial Sequence
  derived and/or modified sequence
atggccgagctgatccagaagaagctgcagggcgaggtggagaagtatcagcagcttcaaaaggacctgtcaaagagcatgtctggccgtcagaagctggaggcccaactgacggaaaataacatcgtgaaagaggagttggccctgctagacggttctaacgttgtttttaagctgctgggccccgtgctggtcaagcaagagcttggagaagctagggccacagtcggcaaaagattggattatattaccgccgaaatcttcctgcgaaccattcccgaccctggcgacgtgcctgattcttttttttag

SEQ ID NO: 94140 - DNA, 312 bp, Artificial Sequence
  derived and/or modified sequence
atggccgagctgatccagaagaagctgcagggcgaggtggagaagtatcagcaattgcagaaggatctctctaagagtatgtcggggagacagaagttggaggctcagctgacagagaataatatagtgaaggaagagttggcacttttggacgggtcaaatgtggtttttaagctgctggggcccgtactcgttaagcaggaacttggcgaagccagggccacagtaggcaaacgtctggactatataacagccgagatctttctgcgcaccattccagaccccggggatgtgcccgactctttcttctag

SEQ ID NO: 94141 - DNA, 312 bp, Artificial Sequence
  derived and/or modified sequence
atggccgagctgatccagaagaagctgcagggcgaggtggagaagtaccagcaactgcaaaaggacctttccaaaagtatgtcgggaagacagaagctggaggcacagctcacagagaataatattgtgaaggaagaattagcgctgctggatgggtctaatgtcgtgttcaagctcctcggccccgtccttgttaaacaagagctcggcgaagcaagggcaaccgtgggaaagcggctggactatataacagctgaaattttcctgcgcacaatcccggatcccggggacgttcctgactcgtttttctag

SEQ ID NO: 94142 - DNA, 390 bp, Artificial Sequence
  derived and/or modified sequence
atggccgagctgatccagaagaagctgcagggcgaggtggagaagtatcagcaactccagaaggacctgtctaagtcaatgagtggccgtcagaaacttgaagctcagctgactgagaacaacatcgttaaagaagaactggctcttctggatggctccaacgtggtctttaagttgttggggccagtccttgtcaagcaggagttgggcgaagcacgggctacagtcggcaagaggctcgactacatcacagccgagataaaacggtatgaatcacagctgagagatcttgaacggcaatctgagcagcagcgtgaaacacttgctcagttacagcaagagtttcagagagcccaggcagccaaagccggggcacctgggaaggcgtag

SEQ ID NO: 94143 - DNA, 390 bp, Artificial Sequence
  derived and/or modified sequence
atggccgagctgatccagaagaagctgcagggcgaggtggagaagtaccagcagctccagaaagatctttccaagtccatgagcggcaggcaaaagctcgaggcccagctgaccgagaataatatcgtgaaggaggagcttgcactgctggacggttctaatgtggtctttaagcttctgggtcctgtgctggtcaaacaggaattaggggaggccagagcaacagtggggaagcgcctagattacattactgccgagattaagagatatgaatcccagctccgggatcttgaacggcagtccgagcagcagagagagaccctggcgcagttacagcaggaattccaacgggcacaggccgctaaagcaggtgctccaggcaaggcatag

SEQ ID NO: 94144 - DNA, 390 bp, Artificial Sequence
  derived and/or modified sequence
atggccgagctgatccagaagaagctgcagggcgaggtggagaagtatcagcagctgcagaaagacctttctaagtccatgtctggaagacagaagttggaggctcaactcaccgaaaataacatcgtgaaggaggagctagccctcctggatggatccaacgttgtgtttaaacttctgggtcccgtgctggtgaagcaagagctgggtgaagccagagccacggttgggaagaggctggattacatcactgcagagatcaagagatacgaatcacagctccgggatctagaaagacagagcgaacagcagagagaaacactagcacagttgcaacaagaattccaaagggcccaggcagctaaagcgggggctccaggtaaggcgtag

SEQ ID NO: 94145 - DNA, 390 bp, Artificial Sequence
  derived and/or modified sequence
atggccgagctgatccagaagaagctgcagggcgaggtggagaagtatcagcaattacaaaaagatctttcaaaatcaatgtctggccggcagaagctcgaggcacagctcaccgaaaataatattgtcaaggaggagctggcactattagatgggtcaaacgtggttttcaagctgctggggcccgtgttggtgaaacaggagctaggtgaggcaagagctacagtcggcaagcggctggattacatcactgctgaaataaagcgctatgaatctcaactgagagacctggaacgacagagtgagcaacagcgcgagacactggcacagctccagcaagagtttcagcgtgcccaggccgcaaaggccggcgctcccggtaaggcttag

SEQ ID NO: 94146 - DNA, 390 bp, Artificial Sequence
  derived and/or modified sequence
atggcagagctgattcagaaaaagctgcagggcgaagttgaaaaataccaacagctacagaaagatctgagcaagtctatgtcggggaggcaaaaacttgaagcccagcttacagaaaataacattgtgaaggaagagcttgcgctactagatggatccaatgtcgtgttcaagttgctgggccctgtgctggttaaacaggagctgggcgaggctcgagctactgtgggaaaacggctggattacatcacggcggagatcaagcggtatgaatcccagctcagggacctcgaaaggcagtccgagcagcagagagagaccctggcacagctgcagcaggaatttcagagggctcaggccgctaaggccggtgctccaggcaaggcatag

SEQ ID NO: 94147 - DNA, 390 bp, Artificial Sequence
  derived and/or modified sequence
atggccgagctcatccaaaagaaattgcagggcgaagtggagaagtaccagcagctgcagaaagacttaagcaaatcgatgtccgggcgacagaagctggaggctcagctgaccgagaataacatagttaaggaggagctcgccttgttggatgggtcaaatgttgtgttcaagctactgggccctgttcttgtgaagcaggaactgggcgaggctcgcgctactgttggaaagcgcctggactacatcaccgcggaaataaagaggtacgagtcccagcttagggatctcgagagacagtcagaacaacagcgggagacgcttgcccagctgcagcaagagtttcagcgcgcacaggcagcaaaggctggggcacccggaaaagcctag

SEQ ID NO: 94148 - DNA, 390 bp, Artificial Sequence
  derived and/or modified sequence
atggccgaactcatccaaaagaaactgcagggggaagttgagaagtatcagcagctgcagaaagaccttagtaagagtatgagcggtcggcagaaactggaggctcaacttaccgagaacaacatagtaaaggaggagcttgcattgctggacggatccaacgttgttttcaaactacttggacctgtgctcgtcaagcaagagctaggggaagcccgagccactgtagggaagcgcctggattatattactgcagagataaaacgatatgagagccaactcagagatttggaaagacagagcgaacagcaacgcgagaccttggcacagctacagcaggagtttcagagagctcaggctgccaaggcaggcgcacctggtaaggcctag

SEQ ID NO: 94149 - DNA, 390 bp, Artificial Sequence
  derived and/or modified sequence
atggcagagctgattcagaagaaactacaaggtgaagtggagaagtaccagcagcttcagaaagatctgtccaaatcaatgtcaggcagacaaaagttggaagcccagctgaccgagaataacattgtgaaggaggagctggcactgctcgacgggagcaatgtcgtgtttaagctcttgggccctgtgctggtgaaacaggaattaggagaggctcgggctaccgtgggcaaacggctagactacattaccgccgaaatcaagcgatatgagtcccaattgagggatttagagcgacagtctgaacagcaaagggaaaccctcgctcaacttcagcaagagtttcaaagagctcaagcagccaaggcaggcgcacctggcaaggcatag

SEQ ID NO: 94150 - DNA, 390 bp, Artificial Sequence
  derived and/or modified sequence
atggccgagttaatacagaaaaaattgcaaggagaggtcgagaaataccaacagctgcaaaaggatttgtccaaatcaatgagcggccgtcagaagctggaggctcagctgacggagaacaacattgttaaagaagagttggcattgctggatggatccaacgtggtcttcaagcttctgggccctgtgctagtcaaacaagagctgggagaagccagggcgaccgtgggaaaacgactggactatataactgcagaaattaaaaggtatgaaagtcaactgcgagatctggaacgccagtccgagcaacagcgcgagacgttggcccagctgcagcaggagttccagagggctcaggccgcaaaggccggagcccctggaaaggcatag

SEQ ID NO: 94151 - DNA, 390 bp, Artificial Sequence
  derived and/or modified sequence
atggccgagttgatccagaaaaagctacagggtgaggtggaaaagtaccaacagctgcagaaggatctctctaaatcaatgagtgggcgacagaaactggaggcccaactgacagaaaacaacatcgtgaaggaggaactggctctgcttgacggaagcaacgtggtgtttaagctgctcggacccgtccttgtgaagcaggagctgggtgaagcgcgtgccacagtgggcaaaaggctcgactacatcacggccgaaatcaagcggtacgagagccagctgcgtgatctggaaaggcaatccgaacagcagcgggagaccctggcccagttgcaacaagagttccagagagcacaagccgcaaaagcgggtgcgcctgggaaggcatag

SEQ ID NO: 94152 - DNA, 390 bp, Artificial Sequence
  derived and/or modified sequence
atggctgagctgattcagaaaaagctccagggggaggtggagaaatatcagcaacttcaaaaggacctgtcaaaatccatgagtggccgacagaagctcgaggcccagcttacagagaacaacattgtcaaagaggaactggctttattagatggctctaacgtcgtgttcaagttgctcggcccagtgcttgttaaacaggagctgggagaagcccgtgccactgttggaaaaagactggattatataaccgccgaaatcaaacggtacgagagtcagttacgtgatcttgagcgacagtccgagcaacaacgtgagactctcgcccagctacagcaagagttccagagggcacaggcagccaaagccggagccccaggaaaggcctag

SEQ ID NO: 94153 - DNA, 390 bp, Artificial Sequence
  derived and/or modified sequence
atggcggaactcatccagaaaaaactgcagggcgaggtggagaagtatcaacagctccagaaagatttgtctaagagcatgtccggcagacagaagcttgaagcccagttgacagaaaataacatcgttaaagaggaactggctctgctcgacggctcaaacgtcgtgtttaagctgctaggcccagtgttagtgaagcaggagctcggcgaggcacgggctacagttggcaagcgtctcgattacatcacagcagagattaaaaggtatgagtcacagctacgagatctggaacgccagtcggagcagcaacgcgaaacccttgcccagttgcaacaagagtttcagcgtgctcaagcagcaaaggctggagctcctggaaaagcgtag

SEQ ID NO: 94154 - DNA, 390 bp, Artificial Sequence
  derived and/or modified sequence
atggccgagctgatacaaaagaaactccagggtgaagtcgaaaaatatcagcagctgcagaaggacctatccaagagcatgtccggcaggcagaaattggaggcgcagctgaccgaaaacaatattgttaaggaggaattggcactgctggatggatcaaatgtcgtgtttaagctcttgggaccagtgttggtgaagcaggagctgggcgaagctcgcgctaccgtcggaaagaggctcgactatatcaccgccgagatcaagcggtacgaatctcagctccgtgacctcgagcgtcaatctgagcagcagcgcgaaacacttgcacagcttcagcaagagtttcagcgtgcccaggcagccaaagcaggtgcgccaggaaaggcttag

SEQ ID NO: 94155 - DNA, 390 bp, Artificial Sequence
  derived and/or modified sequence
atggccgagcttattcagaagaaactccaaggggaggtggaaaagtaccagcagctgcaaaaggacctcagcaaatctatgtctggaaggcaaaagctggaggcacagctgactgagaataacatcgtaaaagaggagctggctctgcttgatggaagcaacgtggtgtttaagctcctcggaccagtgctggtcaaacaggaactaggcgaagcccgtgctacagtcgggaagagactggattacatcacagcagagattaagcgttatgagagtcaactgcgcgatttagaaaggcagagcgagcaacagcgcgaaacacttgctcagctacagcaggaatttcagagggcccaggcagccaaagctggagcacctgggaaagcctag

SEQ ID NO: 94156 - DNA, 390 bp, Artificial Sequence
  derived and/or modified sequence
atggcagaactcatacagaaaaagttacagggtgaagtggaaaaatatcagcagctgcaaaaagacctctcaaaatcgatgagtggtcgtcagaagcttgaagctcagctaacagagaataacatcgtgaaggaagagttggctctgctcgatggatccaacgtggtgtttaagcttctgggtcccgtccttgttaagcaggaactgggagaggcccgtgcaaccgtaggtaagcggttagactatattaccgcggaaataaaacggtacgaaagtcagctgcgggatctggagcgtcagtcagagcaacaaagagagactcttgcccagttacagcaggagttccaacgggctcaagctgccaaggctggtgctccaggcaaagcttag

SEQ ID NO: 94157 - DNA, 390 bp, Artificial Sequence
  derived and/or modified sequence
atggccgaactgatccagaaaaagttgcagggcgaagtggagaaatatcagcagctgcagaaagatttatcaaaatctatgagtggaaggcaaaaattagaagcccagctaacagagaacaatattgtaaaggaagagcttgccctgcttgacgggagtaacgtggttttcaaattactggggccagtgcttgtgaagcaagagctgggggaggcccgtgcaaccgtgggaaaacgcctggattatatcacagctgagattaaaagatatgagagtcaactccgcgacctggagcgccaatctgagcagcagcgagagacactggcccaactgcaacaggagttccagcgcgctcaggctgcgaaggccggagcgccagggaaggcttag

SEQ ID NO: 94158 - DNA, 390 bp, Artificial Sequence
  derived and/or modified sequence
atggctgaattaatccaaaagaaattgcagggtgaagtggagaagtaccaacagctgcaaaaagacctttctaaatccatgagtggacggcaaaagctcgaagcccaactgacagagaacaacattgtcaaagaggagttggccctgcttgacggtagtaacgtcgtgttcaagctgctgggccctgtcctggttaaacaggagctgggagaggcccgagcgacagtgggtaagaggctcgattatattactgccgagattaagcggtacgagagtcaattacgagatctggagagacagtcagagcagcagcgtgaaactttggcgcagttgcagcaggagttccagcgggctcaggccgctaaagccggtgcaccgggaaaggcttag

SEQ ID NO: 94159 - DNA, 390 bp, Artificial Sequence
  derived and/or modified sequence
atggctgaactaatccagaaaaagctgcagggcgaggtggagaaatatcagcagctacagaaggacttgagtaaatctatgagcggaaggcaaaagctggaggctcagctgaccgaaaacaatatcgtaaaggaagagctggccctgctagacggctccaacgttgtttttaagcttctcgggccagttctggtcaagcaggagctcggagaggcccgagcaacagtcggaaaacgcctggactacattaccgcagagatcaagcggtatgagtcccaactgagggacctggagagacagagcgagcagcaaagggagactttggcacaacttcaacaagagttccagagagcccaggccgcaaaggccggtgctccgggaaaggcgtag

SEQ ID NO: 94160 - DNA, 390 bp, Artificial Sequence
  derived and/or modified sequence
atggccgagctgatccagaaaaaacttcagggggaggttgagaaataccagcagctgcaaaaagacctctccaaatctatgtcgggccgtcagaagctggaagcccagcttactgagaataacatcgtgaaggaggagctggccctcctagacggaagcaacgtcgtgttcaagttgctcggtcccgtgctggtaaagcaggagttaggcgaagcgagggcaaccgtcggtaagcgactcgattacattactgcagaaatcaagagatatgagtctcagctcagagatctggaaagacagagcgaacagcaacgggagaccctggcacagctccagcaggagttccagcgagctcaggccgcaaaggcaggggcacccggaaaagcatag

SEQ ID NO: 94161 - DNA, 390 bp, Artificial Sequence
  derived and/or modified sequence
atggcagaattaattcagaaaaaactccagggggaggtggagaagtaccagcagttgcagaaggatctgagcaagagtatgtccggcagacagaagctggaggcccagctcacagaaaacaatattgtgaaagaggagttggccctcctggatggctcgaacgttgtgtttaagctgctgggtccagtcctcgtgaaacaggaactgggcgaagctcgcgctacagtgggaaaaagattggattacatcaccgcagagataaaacgatacgaaagtcaactcagggacctcgagagacagagcgaacagcagcgcgaaacattggcacaactgcagcaagaattccagcgggcacaggcagcaaaggccggagcacctggcaaggcctag

SEQ ID NO: 94162 - DNA, 312 bp, Artificial Sequence
  derived and/or modified sequence
atggcggaacttatccagaagaagctgcagggcgaagttgagaaatatcagcagctgcagaaagacttatcaaagtctatgagtggacgtcagaagctagaagcccagttgacagagaacaacatagttaaggaggaattggcgctgctagatggctcaaacgttgtgttcaaactgctgggacccgtgctcgtgaagcaagaactaggagaagcccgtgcgacggtggggaaacggctggattacatcacagccgagattttcttgcgtacaatcccagatcctggggatgtcccagactcctttttttag

SEQ ID NO: 94163 - DNA, 312 bp, Artificial Sequence
  derived and/or modified sequence
atggccgaactgatccagaaaaaactgcagggtgaagtagagaaataccagcaactgcagaaagacctttctaaatcgatgagcggccgacagaagctggaagctcagttaacggaaaacaatattgtcaaagaggagctggcactgttagacggtagcaacgtggtgtttaagctgctgggacctgtactggtgaagcaggagctgggtgaggcacgggctacagtgggtaaacgcctcgactacattacagcagaaattttcctgcgcacgatcccagatcccggtgatgtgccagattcattcttttag

SEQ ID NO: 94164 - DNA, 312 bp, Artificial Sequence
  derived and/or modified sequence
atggccgagcttattcagaagaaattgcaaggggaagtcgaaaaatatcagcagttgcaaaaagaccttagcaagagcatgtccggtcgccagaaactcgaggcccagctgactgagaataatatcgtgaaagaagagttggcactgttggacgggtcaaacgtggtattcaaactcctagggcctgttctggtaaagcaggaactgggggaggcgagggcaactgtgggaaaaagactggactacattaccgccgagattttcttgagaaccatccctgacccgggagacgtgcccgattcattcttctag

SEQ ID NO: 94165 - DNA, 312 bp, Artificial Sequence
  derived and/or modified sequence
atggcagagctgatccagaagaaattgcagggcgaagtggagaagtaccagcagttacaaaaggacttgtctaaatccatgtcgggccgtcagaaactggaggctcagcttacagagaacaatatcgtgaaggaagagttggccctcctggacggtagtaacgtggtgttcaaactacttggacctgtactcgtgaaacaggaactcggcgaagctcgggctaccgtgggcaaacggctggactacatcacagctgagatctttttgagaacaatccccgaccctggggacgttcctgactcattcttctag

SEQ ID NO: 94166 - DNA, 312 bp, Artificial Sequence
  derived and/or modified sequence
atggctgaactcatccagaaaaaactgcaaggcgaggtggagaagtatcagcagttacagaaggacctgagtaaatcaatgtcaggccgacagaagctggaggctcaactcacagagaataatatagtgaaggaggagttagctcttctggatggctctaacgtagtttttaaactgttaggcccagttttggtgaagcaagagttgggtgaagcgagagccaccgtggggaagcgcttggattatattaccgccgagatattcctgcgtaccataccggaccctggcgacgttcccgatagcttcttttag

SEQ ID NO: 94167 - DNA, 884 bp, Artificial Sequence
  derived and/or modified sequence
atcttgagtgagggcacgctctccttagaggggcggaacagtttttggcaccttatcgcgagcggcagcttatgcaagagtgacttaaaaaagaaaggcaggtccggagccaggggctaagtagcggtgcggtttctttttctggattagtttccccatcttgcctaaaaatgtcctagtctagtctttttagcagaactccactccctaaacatgtcagaactacacttcccatcaagggtcagaaagaaacttccggcacagtcttttcccagcattccttgtttacttccgggtttattactactgaaggaagaacgccagatcagaaaagggagctcaggtaccttccagagagtgagacccagcgcccttgtctcgcacccagtaggctttcatccccgccatggcggagctgatccagaagaagctacagggagaagtggagaaatatcaacagctacagaaggacttaagtaaatccatgtcggggaggcagaaacttgaagcacaactaacagaaaataatatcgtgaaagaggaactggccctgctggatgggtccaacgtggtctttaaacttctgggtccggtgctagtcaaacaggagctgggggaggctcgggccacagtagggaagaggctggactatatcacagctgaaattaagcgatacgaatcccagcttcgggatcttgagcggcagtcagagcaacagagggagacccttgctcagctgcagcaggagttccagcgggcccaggcagcaaaggcaggggctcctggcaaggcctgaccccatggtggggggaggggaggggaggggagggaatgaggcagctctaggatctatactgtagctaataaaatgtaaaaacacctgg

SEQ ID NO: 94168 - DNA, 390 bp, Artificial Sequence
  derived and/or modified sequence
atggctgaactgatacagaagaaattgcagggggaggtggaaaaataccagcagttacaaaaggacctgagtaagagcatgtccggaaggcagaagctagaagcacagcttaccgagaacaacatagttaaagaagagctcgcactcctggacggatccaacgtggtctttaagctgttgggacctgtactggttaaacaagagctgggtgaggctcgcgcaacagttggcaagagattagactacattaccgccgaaattaagagatacgaatcacagttacgcgaccttgaacgacagtccgaacagcagcgggagacactcgctcagttgcagcaggagttccagagggcccaggcagcaaaagccggtgccccagggaaagcgtag

SEQ ID NO: 94169 - DNA, 390 bp, Artificial Sequence
  derived and/or modified sequence
atggcagaattaatccaaaagaagttgcagggtgaagtggaaaaatatcagcaactgcaaaaggatctatcaaagtctatgagtggacggcaaaaactcgaggcacagctgaccgagaacaatatagtcaaggaagaattggccttgcttgacggttccaatgtggtctttaagcttcttggaccagtcctcgtaaaacaggagttaggagaggcacgggcaacagtggggaagcggctggactacataacagcagagatcaagcgctacgaatctcagcttagggatctagagcgccagagcgaacagcagagggagacgctggcccagcttcagcaggaatttcagcgcgctcaggccgcaaaagctggcgcacctggcaaggcctag

SEQ ID NO: 94170 - DNA, 390 bp, Artificial Sequence
  derived and/or modified sequence
atggctgagctaatccagaaaaagctgcagggggaggtcgagaagtatcagcaactgcagaaagacctgagcaaaagcatgagcggcagacaaaagctagaggcacagcttaccgagaacaatatcgtgaaggaggaactggccctgctcgacggctctaatgtggtttttaagttgctggggccagttctcgttaaacaggaactcggagaagcacgtgcaaccgtggggaagcgactggactacatcactgcggaaataaagaggtatgaatcgcagctccgcgacttagagagacagtctgaacagcaacgggaaaccctggcacagctgcaacaggagtttcagcgggctcaggccgcaaaagccggtgccccaggtaaagcatag

SEQ ID NO: 94171 - DNA, 390 bp, Artificial Sequence
  derived and/or modified sequence
atggcagagttaattcagaagaagttacagggggaagttgagaaatatcagcaactccagaaggacctgtctaaaagtatgtccggaagacagaaattggaagcccagctcactgagaacaacatcgttaaggaagagttggctctactcgatgggagtaatgtcgtttttaaactgttgggaccagtccttgtcaagcaggagctgggagaagcacgggcaacagtaggtaagcgccttgactacatcacagctgagatcaagcgttacgagtctcagctgcgggatctggaaagacaatcggagcagcagcgcgaaaccttggcccagttgcagcaggaatttcagcgtgctcaggccgctaaagcaggcgcaccaggtaaggcttag

SEQ ID NO: 94172 - DNA, 1915 bp, Artificial Sequence
  derived and/or modified sequence
atcagaaaagggagctcaggtaccttccagagagtgagacccagcgcccttgtctcgcacccagtaggctttcatccccgccatggcggagctgatccagaagaagctacagggagaagtggagaaatatcaacagctacagaaggacttaagtaaatccatgtcggggaggcagaaacttgaagcacaactaacagaaaataatatcgtgaaagaggaactggccctgctggatgggtccaacgtggtctttaaacttctgggtccggtgctagtcaaacaggagctgggggaggctcgggccacagtagggaagaggctggactatatcacagctgaaatatttctgaggacaatcccagacccaggagatgttccagactcatttttctgatattcagagagggcaagagtcttggcctatgtcacacagcagagtccaggactccagaactccaacctagcactctggccagaaagtcagccagaggaaggaaaactgggaatgaagagtcagaggtgagaagctaaagtcatgatctcaccaagggatcaagaggtcgatattggcggcttgtgacggtaaacacggcaccatcctcctcctcatcccagacggacacaggggcctggaggagcaaggaaggggaagtcagacagttccacaccaccccccattgccctcagccttcaccccaggccctgctcctccctctgtacccctcacctgtggtggcagggcatagtaccagcgagtgcgaggaagggttgggggagctggtgaccccaggtctcccccactggggcccagacagccccaccccagccgcctcagggccccggtggagtcgaaggggctgcagtggaggcgtggatggagtacaggaattctgatcctggagacccccaaagccccttctccccagagctgaacccacacacgacagagaagcagggtacaaagggcaggagagggaagcgagaggcagcaagccagaggcagcgactaggggtagctgaaacctcagtccaggcactgccgcatgccccgcccctcccggccaaggactataccagcccagagaattagtctttttcaggacccctttcaccctggtccctcgggtagcgcctccactatctcagccctaagggacccccgaaggtagcagctccaatcccagtacaggaaggaaaaggggaagtgggatgatagggggttgggggcggtagactcagagagtcacgtggccccagcccctcccccgaccgatcccgaaaaaccagccctgccagtcaacctgccctcacctaggatctggacctaggagtttagggcctcggggccccaaatccaaattctggcccctcctgaggcccgaaatcctgctcctggccaccaccattaatccctaatgaaaacagatgaccactctctacccaccctaggatctttcctccaggtcccagaaccgtggcttcccggcctctacccaggaccggggcggggcgggggggcggggggaagggggagagagggaaggaggggtcacgaaatctgagggttccctccccaatcccagagtcagaggagctggttactgtggaaacaaacccctccccgccaaacaaaaacaaggagggagacagggaccaagacacgactgctcagagaggtaggcacactcaggcaggcagaggtggagggccaaagacccgcagggacaggacagccagccagaagttccaggcaggaacagggcaggttcctgcgggcaggtcctgagtcacactgacagagaaccacggagacgccaggactccccgcagcagagaaacgggccgacacccagggaggcgcgagaataactgaggcaaggaggaggagatgtagggacccagagacaagagaaaa

SEQ ID NO: 94173 - DNA, 1917 bp, Artificial Sequence
  derived and/or modified sequence
agatcagaaaagggagctcaggtaccttccagagagtgagacccagcgcccttgtctcgcacccagtaggctttcatccccgccatggcggagctgatccagaagaagctacagggagaagtggagaaatatcaacagctacagaaggacttaagtaaatccatgtcggggaggcagaaacttgaagcacaactaacagaaaataatatcgtgaaagaggaactggccctgctggatgggtccaacgtggtctttaaacttctgggtccggtgctagtcaaacaggagctgggggaggctcgggccacagtagggaagaggctggactatatcacagctgaaatatttctgaggacaatcccagacccaggagatgttccagactcatttttctgatattcagagagggcaagagtcttggcctatgtcacacagcagagtccaggactccagaactccaacctagcactctggccagaaagtcagccagaggaaggaaaactgggaatgaagagtcagaggtgagaagctaaagtcatgatctcaccaagggatcaagaggtcgatattggcggcttgtgacggtaaacacggcaccatcctcctcctcatcccagacggacacaggggcctggaggagcaaggaaggggaagtcagacagttccacaccaccccccattgccctcagccttcaccccaggccctgctcctccctctgtacccctcacctgtggtggcagggcatagtaccagcgagtgcgaggaagggttgggggagctggtgaccccaggtctcccccactggggcccagacagccccaccccagccgcctcagggccccggtggagtcgaaggggctgcagtggaggcgtggatggagtacaggaattctgatcctggagacccccaaagccccttctccccagagctgaacccacacacgacagagaagcagggtacaaagggcaggagagggaagcgagaggcagcaagccagaggcagcgactaggggtagctgaaacctcagtccaggcactgccgcatgccccgcccctcccggccaaggactataccagcccagagaattagtctttttcaggacccctttcaccctggtccctcgggtagcgcctccactatctcagccctaagggacccccgaaggtagcagctccaatcccagtacaggaaggaaaaggggaagtgggatgatagggggttgggggcggtagactcagagagtcacgtggccccagcccctcccccgaccgatcccgaaaaaccagccctgccagtcaacctgccctcacctaggatctggacctaggagtttagggcctcggggccccaaatccaaattctggcccctcctgaggcccgaaatcctgctcctggccaccaccattaatccctaatgaaaacagatgaccactctctacccaccctaggatctttcctccaggtcccagaaccgtggcttcccggcctctacccaggaccggggcggggcgggggggcggggggaagggggagagagggaaggaggggtcacgaaatctgagggttccctccccaatcccagagtcagaggagctggttactgtggaaacaaacccctccccgccaaacaaaaacaaggagggagacagggaccaagacacgactgctcagagaggtaggcacactcaggcaggcagaggtggagggccaaagacccgcagggacaggacagccagccagaagttccaggcaggaacagggcaggttcctgcgggcaggtcctgagtcacactgacagagaaccacggagacgccaggactccccgcagcagagaaacgggccgacacccagggaggcgcgagaataactgaggcaaggaggaggagatgtagggacccagagacaagagaaaa

SEQ ID NO: 94174 - protein, 283 aa, Artificial Sequence
  derived and/or modified sequence
MAAAPQAPGRGSLRKTRPLVVKTSLNNPYIIRWSALESEDMHFILQTLEDRLKAIGLQKIEDKKKKNKTPFLKKESREKCSIAVDISENLKEKKTDAKQQVSGWTPAHVRKQLAIGVNEVTRALERRELLLVLVCKSVKPAMITSHLIQLSLSRSVPACQVPRLSERIAPVIGLKCVLALAFKKNTTDFVDEVRAIIPRVPSLSVPWLQDRIEDSGENLETEPLESQDRELLDTSFEDLSKPKRKLADGRQASVTLQPLKIKKLIPNPNKIRKPPKSKKATPK

SEQ ID NO: 94175 - protein, 167 aa, Artificial Sequence
  derived and/or modified sequence
MAAAPQAPGRGSLRKTRPLVVKTSLNNPYIIRWSALESEDMHFILQTLEDRLKAIGLQKIEDKKKKNKTPFLKKESREKCSIAVDISENLKEKKTDAKQQVSGWTPAHVRKQLAIGVNEVTRALERRELLLVLVLTLLPRLECSGVIPAHCNPASWVQAILLPQPPE

SEQ ID NO: 94176 - protein, 169 aa, Artificial Sequence
  derived and/or modified sequence
MAAAPQAPGRGSLRKTRPLVVKTSLNNPYIIRWSALESEDMHFILQTLEDRLKAIGLQKIEDKKKKNKTPFLKKESREKCSIAVDISENLKEKKTDAKQQVSGWTPAHVRKQLAIGVNEVTRALERRELLLVLVCKSVKPAMITSHLIQLSLSRSVPACQVPRLSERIA

SEQ ID NO: 94177 - DNA, 852 bp, Artificial Sequence
  derived and/or modified sequence
atggccgctgccccacaggcccctgggagaggcagcctgaggaaaactcgccccctcgtagttaaaacgagtctgaataatccctacattatcaggtggtccgccttggaatccgaagatatgcacttcatactgcaaaccctcgaagataggttgaaagctattggcctgcagaaaattgaagacaaaaaaaagaagaacaaaacaccattcttgaaaaaagaaagccgagagaagtgcagtatcgctgtcgacatatctgagaaccttaaggaaaagaaaacggatgctaagcagcaagtgtccgggtggacccccgctcatgtccggaagcaactcgctatcggcgtaaatgaggtgacccgcgccctagagcggagagagctgcttttagtgctagtctgtaaaagtgttaagccggcaatgatcacttcccatttgatccaactctctctgtcacgaagcgtacccgcttgccaggttccaagacttagtgagcggatcgcccctgtgatcggcttgaaatgcgtgcttgcactagcctttaagaaaaacacaaccgatttcgtggatgaagtgagggctataatccccagggtgccgtcgctgtccgtgccttggctgcaggaccgcatcgaggattctggcgagaacctcgagacagagccactggaaagccaggatcgtgagttactcgacactagcttcgaagacctgtccaagccgaaaagaaaacttgcagacggaaggcaggcttcagtcacactacaacctttgaaaatcaagaagcttatacctaatcctaacaaaattcgcaaaccccccaaatctaagaaagcgaccccaaagtag

SEQ ID NO: 94178 - DNA, 504 bp, Artificial Sequence
  derived and/or modified sequence
atggcagccgccccccaggccccaggtcgaggatctctacggaaaacccggcccctggtcgtgaaaacctctctcaacaacccctacatcattcgctggtcagccctagagagcgaggatatgcacttcattttacaaaccctagaagaccgactcaaagctattggcctacagaagatcgaagacaaaaagaagaaaaacaagaccccttttctgaagaaagagtcgcgcgagaaatgttctattgcggtggatatttcagagaacctgaaggaaaagaagactgatgccaaacagcaggtttccggatggacacccgctcacgtgcggaagcagctagcaatcggtgtgaatgaggtgacacgagcactagaaagaagggaactcctgctcgttctagtgctgacactgctcccccggctagagtgttctggggtgatcccagcacactgcaacccagcctcttgggtgcaggcgattctgctgccgcagccgccggaatag

SEQ ID NO: 94179 - DNA, 852 bp, Artificial Sequence
  derived and/or modified sequence
atggcggcagcaccccaggcacccggtagaggctccctgcgtaaaacaaggccacttgtggtgaagacgagcttaaataacccttacattattagatggtcagcactcgagagcgaagatatgcacttcattctgcagacactcgaagatcgcctgaaggccatagggctgcagaagattgaagacaagaagaaaaagaataagacacccttcctgaagaaagagtcgcgggaaaagtgctccatcgctgtagacattagcgaaaacttaaaagagaagaagacggacgctaagcagcaagtgagcggatggacgcccgcacacgtgcgaaagcagctagccatcggggttaacgaggtgaccagggctctcgagcgcagggaattgctgctagtgctggtgtgcaagtcagtcaaacctgcgatgattaccagccatctgatccagctgagcttgtcacggtctgtgccagcctgtcaggtccctcgcctctctgaaaggatagcccccgtgatcggattgaagtgtgtgctggcactggccttcaaaaaaaacactactgactttgtggatgaagtgcgcgcaatcattccccgcgtgccttccctttccgtgccctggctccaggaccggattgaagatagtggggagaacctagaaaccgagcccctcgagtcccaggatcgggaactgttagacaccagcttcgaagacctgtctaagcccaaaagaaaattagcagatggtagacaagcctctgtgactctgcaaccattgaaaataaaaaagctcataccaaaccccaacaagattcggaagccacccaagagcaaaaaagccacaccgaaatag

SEQ ID NO: 94180 - DNA, 852 bp, Artificial Sequence
  derived and/or modified sequence
atggccgctgcccctcaagcgccaggccgtggctctctaaggaaaactcggcctttagtcgtgaaaacatctctgaacaacccctacattatacggtggtccgcgctggagtccgaggacatgcattttattctccagaccctcgaagacaggctcaaggctatcggcctgcagaaaatcgaagacaaaaaaaaaaagaacaaaacacctttcctcaagaaagagtcaagggagaaatgtagtattgccgtagacatttcagaaaatcttaaggagaaaaagactgacgctaaacagcaagtctccggatggactcccgcccacgtgcgcaaacagctggctatcggcgtcaatgaggtgactcgcgcactggagagacgcgaactgttacttgtgctggtgtgcaaatccgtaaagcccgcaatgattacaagccatttgatccagctgagcctttcccgctctgttcccgcttgtcaggttcccagactgtctgaacggatcgccccagtgatcgggttgaagtgcgtattagcactggcctttaagaagaacacaaccgacttcgtggatgaagtacgggctatcatccctagagttccctccctgagtgtcccctggctacaggaccgcatcgaggattctggcgaaaatctggagacagaacctctggagtctcaggatagggagctcttggataccagctttgaggacctgagtaaacctaaacgaaagctcgcagatgggcgccaggcatctgtgaccctgcagcctctgaagatcaagaagttaattcctaacccaaataaaatccgcaagcctcctaagagtaagaaagctacccctaagtag

SEQ ID NO: 94181 - DNA, 510 bp, Artificial Sequence
  derived and/or modified sequence
atggctgccgcacctcaggctccaggccgagggagcttaagaaaaaccagacccctcgttgtgaaaaccagtctcaacaatccgtacataataaggtggtctgcactggaaagcgaagatatgcactttatacttcaaacgttagaggataggctcaaagcaatcggactccagaagatcgaagacaaaaaaaagaagaacaaaactcctttcctgaaaaaagagtctagggagaaatgttcaattgccgtggatattagcgaaaatttaaaagagaaaaaaactgacgctaagcaacaggtgagcggttggacacccgcccatgtgaggaaacagctggcaattggcgtcaacgaagtaactagagccctggaaaggagagagctgttgctcgtcctcgtctgtaaatctgttaaacctgctatgataactagccatttaatacaactgtccctctccagatccgtgcccgcatgccaggtgccacgcttgagcgaacggatcgcctag

SEQ ID NO: 94182 - DNA, 852 bp, Artificial Sequence
  derived and/or modified sequence
atggctgctgccccccaggcccctggccggggcagcctgaggaagacccggcccctggtggtgaagaccagcctgaacaacccctacatcatccgctggagcgccctggagagcgaggacatgcacttcatcctgcagaccctggaggaccggctgaaggccatcggcctgcagaagattgaggacaagaagaagaagaacaagacccccttcctgaagaaggagagccgggagaagtgcagcattgctgtggacatcagcgagaacctgaaggagaagaagacagatgccaagcagcaggtgtctggctggaccccagcccacgtgaggaagcagctggccatcggcgtgaatgaggtgacccgggccctggagcggcgggagctgctgctggtgctggtgtgcaagtctgtgaagccagccatgatcaccagccacctgatccagctgagcctgagccgctctgtgcctgcctgccaggtgccccggctgtctgagcgcatcgcccctgtgattggcctgaagtgtgtgctggccctggccttcaagaagaacaccacagactttgtggatgaggtgcgggccatcatcccccgggtgcccagcctgtctgtgccctggctgcaggacagaattgaagattctggagagaacctggagacagagcccctggagagccaggaccgggagctgctggacaccagctttgaggacctgagcaagcccaagaggaagctggctgatggccggcaggcctctgtgaccctgcagcccctgaagatcaagaagctgatccccaaccccaacaagatcaggaagccacccaagagcaagaaggccacccccaagtag

SEQ ID NO: 94183 - DNA, 504 bp, Artificial Sequence
  derived and/or modified sequence
atggctgctgccccccaggcccctggccggggcagcctgaggaagacccggcccctggtggtgaagaccagcctgaacaacccctacatcatccgctggagcgccctggagagcgaggacatgcacttcatcctgcagaccctggaggaccggctgaaggccatcggcctgcagaagattgaggacaagaagaagaagaacaagacccccttcctgaagaaggagagccgggagaagtgcagcattgctgtggacatcagcgagaacctgaaggagaagaagacagatgccaagcagcaggtgtctggctggaccccagcccacgtgaggaagcagctggccatcggcgtgaatgaggtgacccgggccctggagcggcgggagctgctgctggtgctggtgctgaccctgctgccccggctggagtgcagcggggtcatcccagcccactgcaacccagcctcctgggtgcaggccatcctgctgccccagcccccagagtag

SEQ ID NO: 94184 - DNA, 510 bp, Artificial Sequence
  derived and/or modified sequence
atggctgctgccccccaggcccctggccggggcagcctgaggaagacccggcccctggtggtgaagaccagcctgaacaacccctacatcatccgctggagcgccctggagagcgaggacatgcacttcatcctgcagaccctggaggaccggctgaaggccatcggcctgcagaagattgaggacaagaagaagaagaacaagacccccttcctgaagaaggagagccgggagaagtgcagcattgctgtggacatcagcgagaacctgaaggagaagaagacagatgccaagcagcaggtgtctggctggaccccagcccacgtgaggaagcagctggccatcggcgtgaatgaggtgacccgggccctggagcggcgggagctgctgctggtgctggtgtgcaagtctgtgaagccagccatgatcaccagccacctgatccagctgagcctgagccgctctgtgcctgcctgccaggtgccccggctgtctgagcgcatcgcctag

SEQ ID NO: 94185 - DNA, 852 bp, Artificial Sequence
  derived and/or modified sequence
atggccgccgccccccaggcccccggccggggcagcctgcggaagaccaggccactggtggtgaaaacctcccttaacaacccttatatcatccgatggagtgcgctggagtccgaggatatgcatttcatcctgcagaccctggaggatcggttgaaggcaatcgggttgcaaaagatcgaggacaaaaagaaaaagaacaaaacccccttcctcaaaaaggaatccagagaaaaatgctcaattgccgtggatattagcgaaaatctgaaggagaagaagacagatgccaaacagcaggtgtcaggttggactcctgcccacgtccgcaagcagctcgctatcggggtgaacgaggtaacgcgggctctggagcgccgcgaactgttgctagtcctggtgtgcaagtcggtaaaaccagcaatgattacgagtcacttgatacagctgagtttgagccgctccgtgcctgcttgtcaggtgccacgactgagcgaacgcattgctccagtgatagggctcaaatgtgtgctcgccctcgcttttaaaaaaaatactactgacttcgtagacgaagtgagagctatcatcccacgggtgcctagcctgagcgtgccctggttacaggaccgaattgaggacagcggcgaaaacctggaaacggagccattggagagtcaagatagggagctcctcgatacctcctttgaggatctgtctaaacccaaaagaaagctcgctgacggtagacaagcatccgtgaccctacaaccccttaagatcaaaaagctgattcccaatcctaataagattcgaaagcccccaaaatcaaagaaagcgacacctaaatag

SEQ ID NO: 94186 - DNA, 504 bp, Artificial Sequence
  derived and/or modified sequence
atggccgccgccccccaggcccccggccggggcagcctgcggaagaccaggcctctggtggttaaaacttctttaaacaatccctatatcattcgatggtcagctcttgagagtgaggacatgcatttcatactccagaccttggaagatcgcctcaaagcaataggactccagaaaattgaggataagaagaagaaaaataaaactccctttctcaagaaggagagtagagagaagtgtagcatcgctgtggatattagcgagaatctgaaggagaagaagacagacgcaaagcagcaagtgagcgggtggacgccagcccatgtcaggaagcagttggccattggcgttaacgaggttacccgcgcactcgaacggcgtgagttgctcctggtcctggtgctgactcttctgcctcgtttagagtgctcaggggtgatccccgcccactgcaatccggcttcatgggttcaggccatcttactgccccagccccctgaatag

SEQ ID NO: 94187 - DNA, 852 bp, Artificial Sequence
  derived and/or modified sequence
atggccgccgccccccaggcccccggccggggcagcctgcggaagacccggcctctggtcgtgaagacaagtttgaacaatccttatattatacgctggtcagccctggagtcagaggatatgcactttatccttcagacactcgaggatcggttgaaggccattgggctccagaaaatcgaagataagaagaagaaaaacaagactcccttccttaagaaagaatctagagagaagtgcagcattgctgttgatatatctgagaatcttaaagaaaaaaaaaccgacgctaagcagcaggtctcaggctggacaccggcacacgttcgtaagcagctggccatcggcgttaatgaagttacacgtgctcttgagcgtagagagctgctgctggtgctcgtctgcaagtcagtgaagcctgctatgattacttcccatcttattcagctctctctgagtcgctctgttccggcatgccaagttccgcgattgagtgaaagaatcgctccggtgatcggcctgaagtgtgttttggctttagctttcaagaagaatacgactgacttcgtcgatgaagtccgcgccattatccccagggtcccttccctttctgtaccgtggctgcaggaccgaatcgaggattctggagagaatctggaaacagagccgctggagtcacaggacagggagcttctggacacaagctttgaggacctcagcaagccaaagcggaaactcgccgacggccgacaggctagtgtgaccctgcagccactcaaaatcaagaaattgattccaaaccctaataagattcgcaagcccccgaagtctaagaaagccaccccaaaatag

SEQ ID NO: 94188 - DNA, 852 bp, Artificial Sequence
  derived and/or modified sequence
atggccgccgccccccaggcccccggccggggcagcctgcggaagacgcggccattggttgttaaaacctccctgaataacccctatattatcaggtggagtgccctggagagtgaagatatgcacttcatcttacagactctggaagaccggttgaaagcgataggcctgcagaagatagaagataaaaaaaagaaaaataaaacacccttccttaaaaaggagagccgcgagaaatgtagcatcgctgttgatatctccgagaacctcaaggaaaagaaaactgatgcaaaacagcaggtaagcggctggacaccagcccatgtgagaaagcagctggccatcggagtcaatgaagtgacaagggccctcgaacgcagagagcttttacttgtgctagtgtgcaagtccgtcaagcccgcaatgattacatcacatttgatccagctgagcctgagtcggagcgtgcccgcctgtcaggtaccacgcttgtcagagcgtatcgcgccagtgattggcctgaaatgcgtgctcgctttggcttttaaaaaaaacaccaccgactttgtcgacgaggtcagggctattatccctcgggtgcccagcctctctgttccttggctacaggaccggatcgaggactcgggcgagaaccttgagactgagcctttggagtcccaggacagagagttgctcgatacttcattcgaggacctgagtaaacctaagcgcaaactggccgatgggcgtcaggctagcgtcaccctgcaacctttgaagattaaaaaactgatcccaaacccaaataaaattcggaaaccccccaaatcgaagaaggcaacccctaagtag

SEQ ID NO: 94189 - DNA, 510 bp, Artificial Sequence
  derived and/or modified sequence
atggccgccgccccccaggcccccggccggggcagcctgcggaagacccggcccttggtcgtgaagacaagccttaataacccttacatcatccgctggtccgctcttgaaagcgaggacatgcattttattctgcagaccctggaagatcgtcttaaggcaattggattgcagaagatcgaagacaaaaaaaagaaaaacaagaccccattcctgaaaaaggaatcccgcgaaaagtgctccattgccgtagatatttcagagaatctgaaggaaaaaaagaccgatgcgaagcagcaggtcagtggatggactccggctcatgtacgcaaacagctagctataggcgtcaacgaagtcacgcgcgcactggagcgcagggaactgctccttgtactggtatgcaagtcagtaaagccagcaatgatcaccagtcatttgatccaactgtccttgtcccgctcagttcccgcttgccaagttccacggctgtctgagagaattgcctag

SEQ ID NO: 94190 - DNA, 852 bp, Artificial Sequence
  derived and/or modified sequence
atggccgctgctccccaggcccctggcagaggatccttgcgcaaaactcggcctcttgttgttaaaacttcgcttaacaatccatatatcatacggtggtcggcactggaaagtgaggacatgcacttcattttgcagaccctcgaagaccgcctaaaggccatagggttacagaaaatagaggacaaaaagaaaaagaataagactccttttctgaagaaggagtctagggaaaagtgttcaattgccgtggacatctcggagaacttgaaggagaagaagactgacgcaaagcagcaggtgagtggctggacccccgctcatgtgaggaaacagttggctataggcgtgaatgaagttacacgggcattggaaagaagagagctcctattggtgctggtgtgtaaatctgtgaagccggcaatgattacttctcacttgatccaactatccctctcccgctccgtgccagcctgccaggttcctaggctgagtgagcgaatcgctcccgttatcggcctgaagtgcgtgctggctctggccttcaaaaagaacacgaccgactttgtggatgaagtgcgggctattattcctcgggttccgtccctttccgtgccgtggttgcaggaccggatcgaggattcaggggagaacctggagacagagcctcttgagtcccaagaccgcgagcttctggatacttcatttgaggatttatccaagcctaaacggaagctggctgatggccgtcaggcatccgtgacgcttcaacctctgaaaatcaaaaaactgattcccaacccaaataaaatcagaaaacccccaaagagcaaaaaagccactccaaagtag

SEQ ID NO: 94191 - DNA, 504 bp, Artificial Sequence
  derived and/or modified sequence
atggcagccgctccccaggcccctggcaggggcagcctcagaaagacaagacctctcgtggtaaaaactagtttaaacaacccctatatcattaggtggagcgctctggaatccgaggatatgcatttcatcctccagaccctcgaggatcgcctgaaggctattggcctacagaagatcgaggacaagaaaaagaagaacaaaacaccttttttgaaaaaagagtcaagggagaagtgctctattgcggttgacatatccgagaacctcaaggaaaagaagaccgatgccaaacagcaggtgtcaggttggacccccgcacatgttagaaaacagttagccattggtgtcaacgaggtgacccgtgcactggaacggcgagaacttttgctcgtgctggttcttaccctgctgccaagactcgagtgttcaggggtcatccccgcacactgcaaccctgcctcatgggtgcaagccatcctattgccacagccgccagagtag

SEQ ID NO: 94192 - DNA, 852 bp, Artificial Sequence
  derived and/or modified sequence
atggccgcagccccacaggcccctgggcgtggaagcctgcgcaagacgcgccctctagtggtcaagacctcactgaataatccatacataatcaggtggagcgcactcgaatctgaagacatgcactttattctccaaacactggaggatcgactgaaggcaattggcctccagaaaatcgaagacaagaagaagaaaaacaaaaccccctttttaaaaaaagagtcccgagagaaatgttctatagcggtggacatatccgagaacctaaaagagaaaaagaccgatgctaaacaacaggtgtcaggctggactcccgcacatgttcgcaaacagctcgccatcggggtaaatgaggttacccgggctctggaacgccgagagttactcctcgtgctggtttgcaagtcagtgaagccggcaatgatcacctcccatctgatccagctatctttatccagatctgtacctgcctgccaggtgcccaggctgtcagaaagaatcgctcctgtgatcggactcaaatgtgtcttagcacttgcgtttaagaagaacactacggactttgttgacgaggttagggccattataccccgtgttcctagtctgagcgttccatggctgcaggacagaatagaagactcaggggagaatctcgagacagagcccctagaatctcaggatcgcgaactcctcgatacctcctttgaagatctttctaagccgaaacgcaaacttgcagacgggaggcaagcttctgtgacattacagccactgaaaattaagaagctgattcctaatcctaataaaattcgcaagcctcctaaatccaagaaggccaccccgaagtag

SEQ ID NO: 94193 - DNA, 852 bp, Artificial Sequence
  derived and/or modified sequence
atggccgctgctccccaggcgcctggccgaggctccctgcgcaagaccagacccctcgtggtgaagaccagcttgaacaatccttacattattagatggtccgcattggagagcgaggacatgcactttatcctacagacccttgaagacagacttaaggctattggcctgcaaaaaattgaggataaaaagaaaaagaataaaactccattcttaaaaaaggagagtcgggagaagtgtagcatcgcagtggatatcagcgaaaacttaaaggaaaagaagaccgatgccaaacagcaggtgtctggatggactcctgcccacgtaaggaagcagttagctataggagtaaatgaggtgacccgggctctggagcggcgtgagctactgctggtcctcgtgtgtaaatccgtcaagccagctatgattaccagccacctgattcagcttagcttgagtcgttctgtcccggcatgtcaggttccacgcttgagcgaaagaatagccccagttatcggactgaagtgtgtgcttgctctggctttcaagaagaacactactgattttgtggatgaggttagggccataatcccccgtgtgccctctttatccgtaccatggctccaggatcggatcgaggactcaggcgaaaacctcgagaccgaacccttggagagccaggaccgcgaattactcgataccagcttcgaagacctgagcaagccgaagcgcaagctcgccgacggacgccaggcaagcgtcacgctccagccgcttaaaattaagaaactgattccgaatcctaacaaaattaggaagcctcctaagagcaagaaggcaactccgaaatag

SEQ ID NO: 94194 - DNA, 510 bp, Artificial Sequence
  derived and/or modified sequence
atggcggcagcccctcaggccccaggacggggttctctgaggaagacccgacccctcgtggttaaaacgagcctcaataacccctatataatacggtggtccgccctcgagagtgaagatatgcacttcatcttgcagacccttgaggatcggctcaaagccattgggctgcaaaagatcgaggacaaaaagaagaagaacaaaaccccatttctaaagaaggaatcacgtgagaagtgcagcattgctgtggacatcagcgagaatctgaaggagaagaagacggatgcaaagcagcaagtctccggatggacccccgcacatgtgcgtaaacaacttgccattggagtgaacgaagtaacaagggccttggagcggcgagagttgctcttagtgttagtctgtaaatctgttaagcccgcaatgattacatcccacctgatccagctgtccttaagcaggtcagttcctgcctgtcaggtgccccgactcagcgagcggattgcatag

SEQ ID NO: 94195 - DNA, 1457 bp, Artificial Sequence
  derived and/or modified sequence
accacggattcgccatcgtgagttccaggtgggcgcgcggggcccacgtagggcaggaggccagccccggggggatcgggcccgggactctgcggaatctggaggccgaagcccgcgcgcacgcagggtctctgctgcttccccaacgcctgttgcgtggccgcaggacccgccgccctcccggttgggccgcccagtcccgggccgggcgcgtgcacccagagcttccgcgtttctagtccggctcctctgctggattgcagcgccggctgggcaccaggagtacaaagcgaaaacccccgccggcccttctgttctccacggtctccaaggagacacggacaacagaacaacacttccgtgtgctaaatagtaaagcaccaagacagggtcagatgtgttactgggctggagtgtggtggcacaatcacgctcactgcatccttgacctcctgggctcaagtgatcttcccacctcagcctcccaagtagctgggactacaggattttcaaaatggctgcagctcctcaagcaccggggcggggatctctccgtaagacgagacctctggttgtgaagacgtcgttgaacaacccatacatcatccgctggagcgctctggagagcgaggatatgcacttcatcctacagacgcttgaggacaggcttaaagctattggacttcagaagattgaagataagaagaaaaagaacaaaacaccttttctgaaaaaagaaagcagagagaaatgcagcattgctgttgatattagtgagaatctgaaggagaagaaaacagatgctaagcagcaagtgtcagggtggacgcctgcacacgtcaggaagcagcttgccattggcgttaacgaagttaccagagccctggaaaggagggaactgctgttagttctggtgtgtaaatcagtcaagcctgccatgatcacctcacacttgattcagttaagcctaagcagaagtgtccctgcctgtcaggtcccccggctcagtgagagaatcgcccccgtcattggcttaaaatgtgttctagccttggcgttcaaaaagaacaccactgactttgtggacgaagtaagagccatcatccccagagtccccagtttaagtgtaccatggcttcaagacagaattgaagattctggggaaaatttagagactgaacctctggaaagccaagacagagagcttttggacacttcatttgaagatctgtcaaaacctaagagaaagcttgctgacggtcggcaggcttctgtaacattacaaccccttaaaataaagaaactgattccaaaccctaataagataaggaaaccacccaaaagtaaaaaagctactccaaagtaatcttgcataaacttgtcatgtcatacagtttgtgaaaggacaccttgtaaagaagccttgaaactaataaaatgagttatacttacataga

SEQ ID NO: 94196 - DNA, 834 bp, Artificial Sequence
  derived and/or modified sequence
ggccgctttcccctctccggagtgacctaacacaggataacgaaacctgcactgctccgagcgcttcctccccggcccgtcgcgtctgcgaggcgaggccgggaggcgagggctctgcgcacgcgcggcgcaggcgcactgggcgccggtgctgttgccttcaggtgaccacggattcgccatcgtgagttccagacagggtcagatgtgttactgggctggagtgtggtggcacaatcacgctcactgcatccttgacctcctgggctcaagtgatcttcccacctcagcctcccaagtagctgggactacaggattttcaaaatggctgcagctcctcaagcaccggggcggggatctctccgtaagacgagacctctggttgtgaagacgtcgttgaacaacccatacatcatccgctggagcgctctggagagcgaggatatgcacttcatcctacagacgcttgaggacaggcttaaagctattggacttcagaagattgaagataagaagaaaaagaacaaaacaccttttctgaaaaaagaaagcagagagaaatgcagcattgctgttgatattagtgagaatctgaaggagaagaaaacagatgctaagcagcaagtgtcagggtggacgcctgcacacgtcaggaagcagcttgccattggcgttaacgaagttaccagagccctggaaaggagggaactgctgttagttctggttctcactctgttgcccaggctggagtgcagtggtgtgatcccggctcactgcaaccccgcctcctgggttcaagcgattctcctgcctcagcctcctgaatagctggga

SEQ ID NO: 94197 - DNA, 1030 bp, Artificial Sequence
  derived and/or modified sequence
gcgcacgcgcggcgcaggcgcactgggcgccggtgctgttgccttcaggtgaccacggattcgccatcgtgagttccaggattttcaaaatggctgcagctcctcaagcaccggggcggggatctctccgtaagacgagacctctggttgtgaagacgtcgttgaacaacccatacatcatccgctggagcgctctggagagcgaggatatgcacttcatcctacagacgcttgaggacaggcttaaagctattggacttcagaagattgaagataagaagaaaaagaacaaaacaccttttctgaaaaaagaaagcagagagaaatgcagcattgctgttgatattagtgagaatctgaaggagaagaaaacagatgctaagcagcaagtgtcagggtggacgcctgcacacgtcaggaagcagcttgccattggcgttaacgaagttaccagagccctggaaaggagggaactgctgttagttctggtgtgtaaatcagtcaagcctgccatgatcacctcacacttgattcagttaagcctaagcagaagtgtccctgcctgtcaggtcccccggctcagtgagagaatcgcccccgtcattggcttaaaatgtgttctagccttggcgttcaaaaagaacaccactgactttgtggacgaagtaagagccatcatccccagagtccccagtttaagtgtaccatggcttcaagacagaattgaagattctggggaaaatttagagactgaacctctggaaagccaagacagagagcttttggacacttcatttgaagatctgtcaaaacctaagagaaagcttgctgacggtcggcaggcttctgtaacattacaaccccttaaaataaagaaactgattccaaaccctaataagataaggaaaccacccaaaagtaaaaaagctactccaaagtaatcttgcataaacttgtcatgtcatacagtttgtgaaaggacaccttgtaaagaagccttgaaactaataaaatgagttatacttacata

SEQ ID NO: 94198 - DNA, 1296 bp, Artificial Sequence
  derived and/or modified sequence
ctcgttgtgtcgtttccgggtcgcgcgacgctgtgggccgctttcccctctccggagtgacctaacacaggataacgaaacctgcactgctccgagcgcttcctccccggcccgtcgcgtctgcgaggcgaggccgggaggcgagggctctgcgcacgcgcggcgcaggcgcactgggcgccggtgctgttgccttcaggtgaccacggattcgccatcgtgagttccagacagggtcagatgtgttactgggctggagtgtggtggcacaatcacgctcactgcatccttgacctcctgggctcaagtgatcttcccacctcagcctcccaagtagctgggactacaggattttcaaaatggctgcagctcctcaagcaccggggcggggatctctccgtaagacgagacctctggttgtgaagacgtcgttgaacaacccatacatcatccgctggagcgctctggagagcgaggatatgcacttcatcctacagacgcttgaggacaggcttaaagctattggacttcagaagattgaagataagaagaaaaagaacaaaacaccttttctgaaaaaagaaagcagagagaaatgcagcattgctgttgatattagtgagaatctgaaggagaagaaaacagatgctaagcagcaagtgtcagggtggacgcctgcacacgtcaggaagcagcttgccattggcgttaacgaagttaccagagccctggaaaggagggaactgctgttagttctggtgtgtaaatcagtcaagcctgccatgatcacctcacacttgattcagttaagcctaagcagaagtgtccctgcctgtcaggtcccccggctcagtgagagaatcgcccccgtcattggcttaaaatgtgttctagccttggcgttcaaaaagaacaccactgactttgtggacgaagtaagagccatcatccccagagtccccagtttaagtgtaccatggcttcaagacagaattgaagattctggggaaaatttagagactgaacctctggaaagccaagacagagagcttttggacacttcatttgaagatctgtcaaaacctaagagaaagcttgctgacggtcggcaggcttctgtaacattacaaccccttaaaataaagaaactgattccaaaccctaataagataaggaaaccacccaaaagtaaaaaagctactccaaagtaatcttgcataaacttgtcatgtcatacagtttgtgaaaggacaccttgtaaagaagccttgaaactaataaaatgagttatactta

SEQ ID NO: 94199 - DNA, 863 bp, Artificial Sequence
  derived and/or modified sequence
ggggcccacgtagggcaggaggccagccccggggggatcgggcccgggactctgcggaatctggaggccgaagcccgcgcgcacgcagggtctctgctgcttccccaacgcctgttgcgtggccgcaggacccgccgccctcccggttgggccgcccagtcccgggccgggcgcgtgcacccagagcttccgcgtttctagtccggctcctctgctggattgcagcgccggctgggcaccaggagtacaaagcgaaaacccccgccggcccttctgttctccacggtctccaaggagacacggacaacagaacaacacttccgtgtgctaaatagtaaagcaccaaggattttcaaaatggctgcagctcctcaagcaccggggcggggatctctccgtaagacgagacctctggttgtgaagacgtcgttgaacaacccatacatcatccgctggagcgctctggagagcgaggatatgcacttcatcctacagacgcttgaggacaggcttaaagctattggacttcagaagattgaagataagaagaaaaagaacaaaacaccttttctgaaaaaagaaagcagagagaaatgcagcattgctgttgatattagtgagaatctgaaggagaagaaaacagatgctaagcagcaagtgtcagggtggacgcctgcacacgtcaggaagcagcttgccattggcgttaacgaagttaccagagccctggaaaggagggaactgctgttagttctggtgtgtaaatcagtcaagcctgccatgatcacctcacacttgattcagttaagcctaagcagaagtgtccctgcctgtcaggtcccccggctcagtgagagaatcgc

SEQ ID NO: 94200 - DNA, 852 bp, Artificial Sequence
  derived and/or modified sequence
atggccgccgccccccaggcccccggcagaggcagcctgagaaagaccagacccctggtggtgaagaccagcctgaacaacccctacatcatcagatggagcgccctggagagcgaggacatgcacttcatcctgcagaccctggaggacagactgaaggccatcggcctgcagaagatcgaggacaagaagaagaagaacaagacccccttcctgaagaaggagagcagagagaagtgcagcatcgccgtggacatcagcgagaacctgaaggagaagaagaccgacgccaagcagcaggtgagcggctggacccccgcccacgtgagaaagcagctggccatcggcgtgaacgaggtgaccagagccctggagagaagagagctgctgctggtgctggtgtgcaagagcgtgaagcccgccatgatcaccagccacctgatccagctgagcctgagcagaagcgtgcccgcctgccaggtgcccagactgagcgagagaatcgcccccgtgatcggcctgaagtgcgtgctggccctggccttcaagaagaacaccaccgacttcgtggacgaggtgagagccatcatccccagagtgcccagcctgagcgtgccctggctgcaggacagaatcgaggacagcggcgagaacctggagaccgagcccctggagagccaggacagagagctgctggacaccagcttcgaggacctgagcaagcccaagagaaagctggccgacggcagacaggccagcgtgaccctgcagcccctgaagatcaagaagctgatccccaaccccaacaagatcagaaagccccccaagagcaagaaggccacccccaagtag

SEQ ID NO: 94201 - DNA, 504 bp, Artificial Sequence
  derived and/or modified sequence
atggccgccgccccccaggcccccggcagaggcagcctgagaaagaccagacccctggtggtgaagaccagcctgaacaacccctacatcatcagatggagcgccctggagagcgaggacatgcacttcatcctgcagaccctggaggacagactgaaggccatcggcctgcagaagatcgaggacaagaagaagaagaacaagacccccttcctgaagaaggagagcagagagaagtgcagcatcgccgtggacatcagcgagaacctgaaggagaagaagaccgacgccaagcagcaggtgagcggctggacccccgcccacgtgagaaagcagctggccatcggcgtgaacgaggtgaccagagccctggagagaagagagctgctgctggtgctggtgctgaccctgctgcccagactggagtgcagcggcgtgatccccgcccactgcaaccccgccagctgggtgcaggccatcctgctgccccagccccccgagtag

SEQ ID NO: 94202 - DNA, 510 bp, Artificial Sequence
  derived and/or modified sequence
atggccgccgccccccaggcccccggcagaggcagcctgagaaagaccagacccctggtggtgaagaccagcctgaacaacccctacatcatcagatggagcgccctggagagcgaggacatgcacttcatcctgcagaccctggaggacagactgaaggccatcggcctgcagaagatcgaggacaagaagaagaagaacaagacccccttcctgaagaaggagagcagagagaagtgcagcatcgccgtggacatcagcgagaacctgaaggagaagaagaccgacgccaagcagcaggtgagcggctggacccccgcccacgtgagaaagcagctggccatcggcgtgaacgaggtgaccagagccctggagagaagagagctgctgctggtgctggtgtgcaagagcgtgaagcccgccatgatcaccagccacctgatccagctgagcctgagcagaagcgtgcccgcctgccaggtgcccagactgagcgagagaatcgcctag

SEQ ID NO: 94203 - DNA, 708 bp, Artificial Sequence
  derived and/or modified sequence
atgagatgggctgccccaggaaagaagacatctggtctgcaacagaaaaatattgaagtgaaaacaaaaaagaacaaacagaaaacacctggaaatggagatggtggcagtaccagtgagactccccagcctcctcgaaagaaaagggcccaggtagatcctactgttgaaaatgaggaaacattcatgaacagagttgaagttaaagtaaagattcctgaagagctaaaaccatggcttgttgatgactgggacttaattaccaggcaaaaacagctcttctatcttcctgccgagaagaatgtggattccattcttgaggactatgcaaattacaagaaatctcatggaaacacagataataaggagtatgcagttaatgaagttgtggcagggataaaagaatacttcaacctaatgttgggcacccagctactcaacaaatttgagagaccacagtatgccgaaattcttgcagattgtcccgatgcacccatgtcccaggtgtatggagtgccacatctcctgagattatctgtacaaattggagcaatgttggcctatacacctctgaatgagaagagccttgctttattactcaattatcttcacgatttcctaaagtacctggcaaagaattctgcaactttgtttagtgccagcgattatgaagtggctcttcctgagtaccatcggaaagctgtgtga

SEQ ID NO: 94204 - DNA, 708 bp, Artificial Sequence
  derived and/or modified sequence
atgagaggcgctgctcccggaaaaaagacctccggccttcagcaaaaaaacgtagaggtcaagacaaagaaaaacaagcagaagacaccagggaacggcgatggcggctcaacttctgaaacaccccagccgcctcgaaaaaaacgggcccgggttgaccctactgtcgagaatgaggaaaccttcatgaatagggtggaggtgaaggtgaagattcccgaagaactgaagccatggttggttgatgattgggatcttatcactagacagaaacagctgttttaccttcccgccaagaagaatgtggactccatcctcgaagattacgcaaattacaaaaagagccgaggaaacactgataacaaggagtatgcagttaacgaagtggtagcagggatcaaagagtatttcaacgtgatgctgggcacgcaactactctataaatttgagagaccccaatacgccgagatcctcgcagaccaccccgatgcccctatgtcacaggtttacggcgctccccatttactgagactcttcgtgagaataggagctatgctggcctacacgcctctggacgaaaagtctctagccctgctgctgaattaccttcacgactttttgaagtatcttgcaaaaaactcagccaccctgttctctgcctccgactatgaggtggcccctccagagtaccaccgaaaggccgtctag

SEQ ID NO: 94205 - DNA, 708 bp, Artificial Sequence
  derived and/or modified sequence
atgcgtggagccgctcctgggaagaaaactagcgggctgcagcagaagaatgtggaagtgaagactaagaagaacaagcagaaaacacctggcaatggagacggcggttccacgagtgagactccccagcctcccagaaagaaacgcgctagagttgaccccacagtggagaacgaagaaacctttatgaatagagttgaagtgaaggtgaaaatacctgaagaattaaagccctggctagtcgacgactgggatttgattacacgacaaaaacagctgttctacctccccgccaagaaaaacgtggactctatcttagaggactacgcaaattacaagaagtcacgaggaaacaccgataacaaggagtatgcggtgaatgaggtcgtggcaggcattaaggaatactttaacgtaatgttgggtacccagctgctctacaaattcgaacgccctcagtacgctgaaattttggcagaccaccctgatgcaccaatgtcccaggtgtacggggcccctcatttactaaggctctttgtgaggatcggagctatgctcgcctatacaccactcgacgagaaatcactcgctttgctgttgaactaccttcatgactttctgaagtacttggccaagaattccgccacactgtttagcgcaagtgactatgaggtcgcacccccagagtatcacaggaaagccgtgtag

SEQ ID NO: 94206 - DNA, 708 bp, Artificial Sequence
  derived and/or modified sequence
atgagaggagctgcccctgggaagaagaccagcggcctgcagcagaagaatgtggaggtgaagaccaagaagaacaagcagaagaccccaggaaatggagatggcggcagcaccagcgagaccccccagccccccaggaagaagagggcccgggtggaccccaccgtggagaatgaggagaccttcatgaacagagtggaggtgaaggtgaagatccctgaggagctgaagccctggctggtggatgactgggacctgatcacccggcagaagcagctgttctacctgcctgccaagaagaatgtggacagcatcctggaggactatgccaactacaagaagagccggggcaacacagacaacaaggagtatgctgtgaatgaggtggtggccggcatcaaggagtacttcaacgtgatgctgggcacccagctgctgtacaagtttgagcggccccagtatgcagagatcctggccgaccacccagatgcccccatgagccaggtgtatggagccccccacctgctgcggctgtttgtgcgcatcggggccatgctggcctacacccccctggatgagaagagcctggccctgctgctgaactacctgcatgacttcctgaagtacctggccaagaacagcgccaccctcttcagcgccagtgactatgaggtggcccctcctgagtaccacaggaaggctgtgtag

SEQ ID NO: 94207 - DNA, 708 bp, Artificial Sequence
  derived and/or modified sequence
atgcggggcgccgcccccggcaagaagaccagcggcctgcagcagaagaatgtggaagtgaaaaccaaaaagaacaagcagaagacgcctggaaacggagatggtggatccacaagtgagacgccccagccaccacggaagaaaagagctagagtcgacccaaccgtggagaatgaggagacctttatgaacagggtggaggtgaaggtaaagatccctgaggaattgaagccatggttggtggacgactgggacctgatcaccaggcaaaaacaactcttttatctcccagcaaagaagaacgtggactccatacttgaagactatgccaattacaaaaaatcaagaggaaatacggataataaggaatacgctgtgaatgaggtggtggctgggattaaggagtactttaacgtgatgctgggaacacagttgctctataagttcgagaggcctcaatacgccgagattctagcagaccatcctgatgcccctatgtcccaggtctacggcgcacctcatctcttaagactgtttgtgaggattggtgccatgcttgcatacaccccactcgatgagaaatcactggccctgctgctcaactatcttcatgattttctgaagtatctggctaagaattcggccaccctgttctccgcttcggattatgaggttgcccccccagagtaccatcgaaaagctgtttag

SEQ ID NO: 94208 - DNA, 708 bp, Artificial Sequence
  derived and/or modified sequence
atgcggggcgccgcccccggcaagaagaccagcggcctgcagcagaagaacgtggaggttaagacgaaaaagaacaagcagaaaactccaggtaacggcgatgggggaagtactagcgagactcctcaaccccccaggaaaaagagagccagggtggacccgaccgtagaaaatgaggaaactttcatgaaccgcgtggaggtcaaagtaaagatccctgaggagctgaaaccctggctcgtcgacgattgggacctaattacaagacagaaacagcttttctaccttcccgctaaaaaaaatgtggactccatcctagaagactacgccaactataaaaagtcacggggtaataccgataataaggaatatgccgtcaacgaggttgttgccggcattaaggagtactttaatgtgatgctcggtactcagctcctctacaagttcgaacgtccgcagtacgcagagatcttggcagaccacccagacgcccctatgtcgcaggtatatggcgctccccacctactccgcttgtttgttagaattggcgccatgctcgcctataccccattggatgaaaagagcctagccctgctcctgaattatctccacgattttcttaagtatctcgcaaagaactctgccaccctgttcagcgcatccgactacgaggtggcaccccctgaataccaccgaaaggccgtttag

SEQ ID NO: 94209 - DNA, 708 bp, Artificial Sequence
  derived and/or modified sequence
atgcggggagccgctcccggaaaaaaaacgagcggactgcagcagaagaatgtcgaagttaagaccaagaaaaataagcagaagacgccgggaaacggtgatggtggtagtacgtccgaaacccctcagcctccgaggaagaagcgcgcacgcgtggatccaactgtggaaaatgaggagacattcatgaatcgggtagaagtcaaggtgaagattcctgaagaattaaaaccctggttagtcgacgactgggatctgattactcggcagaagcagttgttttacctgccagctaaaaaaaatgtggattctatactagaagactacgcaaattacaaaaaaagccggggaaacactgacaacaaggaatacgccgtgaacgaagtggttgcaggaattaaagaatacttcaatgtgatgctgggaacacagttgctgtacaaattcgagagaccacagtatgccgagatattggccgatcaccctgatgcacccatgagccaggtatacggagcccctcatcttctccgcctgtttgtgcgaataggagctatgctcgcgtacacccctttggacgaaaaatctttggctctccttctgaattatttgcatgactttcttaaatacttggcaaaaaattcagctaccctcttttcagcatctgattatgaagtcgcaccacctgagtatcacaggaaggctgtgtag

SEQ ID NO: 94210 - DNA, 708 bp, Artificial Sequence
  derived and/or modified sequence
atgcgtggggcagcaccaggaaaaaaaaccagcgggttacaacagaagaatgtggaggtaaagacaaagaagaataaacagaaaaccccaggcaacggggacgggggatcgacatcagagaccccacagcccccacgcaaaaagcgagccagagtggatcccactgtggagaatgaggagacatttatgaaccgggtagaggtcaaggtaaagattcccgaagaattaaaaccttggctggtagacgattgggacttgataacccggcagaaacaacttttctacctgcctgccaagaagaacgtggattcaatacttgaagattacgccaactataagaaatccaggggcaacacagacaataaagaatatgccgtgaacgaagtggtcgccggtatcaaagaatatttcaatgtaatgctgggtacccagttactgtataaattcgaacggcctcagtacgctgagattttggccgaccaccctgatgccccaatgtcccaggtatatggagccccacacttgctgaggctgttcgtgaggatcggcgctatgctggcctataccccgttggatgagaaaagtttggctcttctacttaactatctacacgactttctgaagtatctcgcaaaaaattcagccacactcttttcagcatcagactatgaggtcgcccctcctgagtatcatcgcaaagccgtgtag

SEQ ID NO: 94211 - DNA, 708 bp, Artificial Sequence
  derived and/or modified sequence
atgagaggcgccgcccccggcaagaagaccagcggcctgcagcagaagaacgtggaggtgaagaccaagaagaacaagcagaagacccccggcaacggcgacggcggcagcaccagcgagaccccccagccccccagaaagaagagagccagagtggaccccaccgtggagaacgaggagaccttcatgaacagagtggaggtgaaggtgaagatccccgaggagctgaagccctggctggtggacgactgggacctgatcaccagacagaagcagctgttctacctgcccgccaagaagaacgtggacagcatcctggaggactacgccaactacaagaagagcagaggcaacaccgacaacaaggagtacgccgtgaacgaggtggtggccggcatcaaggagtacttcaacgtgatgctgggcacccagctgctgtacaagttcgagagaccccagtacgccgagatcctggccgaccaccccgacgcccccatgagccaggtgtacggcgccccccacctgctgagactgttcgtgagaatcggcgccatgctggcctacacccccctggacgagaagagcctggccctgctgctgaactacctgcacgacttcctgaagtacctggccaagaacagcgccaccctgttcagcgccagcgactacgaggtggccccccccgagtaccacagaaaggccgtgtag

SEQ ID NO: 94212 - protein, 556 aa, Artificial Sequence
  derived and/or modified sequence
MQKFIEADYYELDWYYEECSDVLCAERVGQMTKTYNDIDAVTRLLEEKERDLELAARIGQSLLKKNKTLTERNELLEEQVEHIREEVSQLRHELSMKDELLQFYTSAAEESEPESVCSTPLKRNESSSSVQNYFHLDSLQKKLKDLEEENVVLRSEASQLKTETITYEEKEQQLVNDCVKELRDANVQIASISEELAKKTEDAARQQEEITHLLSQIVDLQKKAKACAVENEELVQHLGAAKDAQRQLTAELRELEDKYAECMEMLHEAQEELKNLRNKTMPNTTSRRYHSLGLFPMDSLAAEIEGTMRKELQLEEAESPDITHQKRVFETVRNINQVVKQRSLTPSPMNIPGSNQSSAMNSLLSSCVSTPRSSFYGSDIGNVVLDNKTNSIILETEAADLGNDERSKKPGTPGTPGSHDLETALRRLSLRRENYLSERRFFEEEQERKLQELAEKGELRSGSLTPTESIMSLGTHSRFSEFTGFSGMSFSSRSYLPEKLQIVKPLEGDHAGPRPLSVLLGDSLWSLIHLRKAGHLCHAYSFFFRDSHPRCWFEFL

SEQ ID NO: 94213 - DNA, 1671 bp, Artificial Sequence
  derived and/or modified sequence
atgcagaagttcatcgaggccgactactacgagctggactggtactacgaggagtgcagcgacgtgctgtgcgccgagagagtgggccagatgaccaagacctacaacgacatcgacgccgtgaccagactgctggaggagaaggagagagacctggagctggccgccagaatcggccagagcctgctgaagaagaacaagaccctgaccgagagaaacgagctgctggaggagcaggtggagcacatcagagaggaggtgagccagctgagacacgagctgagcatgaaggacgagctgctgcagttctacaccagcgccgccgaggagagcgagcccgagagcgtgtgcagcacccccctgaagagaaacgagagcagcagcagcgtgcagaactacttccacctggacagcctgcagaagaagctgaaggacctggaggaggagaacgtggtgctgagaagcgaggccagccagctgaagaccgagaccatcacctacgaggagaaggagcagcagctggtgaacgactgcgtgaaggagctgagagacgccaacgtgcagatcgccagcatcagcgaggagctggccaagaagaccgaggacgccgccagacagcaggaggagatcacccacctgctgagccagatcgtggacctgcagaagaaggccaaggcctgcgccgtggagaacgaggagctggtgcagcacctgggcgccgccaaggacgcccagagacagctgaccgccgagctgagagagctggaggacaagtacgccgagtgcatggagatgctgcacgaggcccaggaggagctgaagaacctgagaaacaagaccatgcccaacaccaccagcagaagataccacagcctgggcctgttccccatggacagcctggccgccgagatcgagggcaccatgagaaaggagctgcagctggaggaggccgagagccccgacatcacccaccagaagagagtgttcgagaccgtgagaaacatcaaccaggtggtgaagcagagaagcctgacccccagccccatgaacatccccggcagcaaccagagcagcgccatgaacagcctgctgagcagctgcgtgagcacccccagaagcagcttctacggcagcgacatcggcaacgtggtgctggacaacaagaccaacagcatcatcctggagaccgaggccgccgacctgggcaacgacgagagaagcaagaagcccggcacccccggcacccccggcagccacgacctggagaccgccctgagaagactgagcctgagaagagagaactacctgagcgagagaagattcttcgaggaggagcaggagagaaagctgcaggagctggccgagaagggcgagctgagaagcggcagcctgacccccaccgagagcatcatgagcctgggcacccacagcagattcagcgagttcaccggcttcagcggcatgagcttcagcagcagaagctacctgcccgagaagctgcagatcgtgaagcccctggagggcgaccacgccggccccagacccctgagcgtgctgctgggcgacagcctgtggagcctgatccacctgagaaaggccggccacctgtgccacgcctacagcttcttcttcagagacagccaccccagatgctggttcgagttcctgtag

SEQ ID NO: 94214 - DNA, 1671 bp, Artificial Sequence
  derived and/or modified sequence
atgcagaaattcatagaggcagattattacgagctggattggtattatgaggagtgctccgatgtcctctgcgctgaacgcgtgggacagatgaccaaaacctacaacgatattgacgcagtgacacgacttttggaggaaaaggagagagatttagagctggctgcgcggattggtcaatcgctacttaagaagaacaagacgctgactgagcgtaacgagctgctggaagagcaagtcgaacatattagggaggaggtgtcccagctgaggcacgagttgagcatgaaggacgagttgttgcagttctataccagtgccgctgaggagtcagagccagagagcgtatgtagcacccctctcaaaagaaacgaatcatcatcgtccgttcagaactactttcatttggatagtctacagaaaaagctaaaggaccttgaagaggaaaacgtggtgctccggtccgaggccagccagttgaagaccgagactatcacttacgaagaaaaggagcaacaactggtaaatgactgtgtaaaggaacttagagatgctaatgtgcagattgcctccatttcggaggaactggcaaagaaaaccgaggacgccgccagacaacaagaggagatcacccacctgctgtctcagatcgtggacctgcaaaagaaggccaaagcatgcgcagttgagaacgaagagctggtccagcatctcggagccgctaaagacgcacagcgtcaactgacagcagagcttcgagagcttgaggataagtatgccgaatgtatggagatgttgcacgaagctcaggaagagctcaaaaatttaagaaataaaacaatgcccaacactacctcccggagataccactcacttgggctgtttccaatggactctctggctgcagaaatcgaaggcacaatgcgtaaggagctccagctggaggaggccgaatcgcctgatatcacacatcagaagagagtatttgagaccgtccgcaatatcaaccaagtcgtgaagcaacggtcccttacacccagcccaatgaacatccctggcagtaaccagagcagcgcaatgaattctttgctttcatcctgcgtgagcacccccaggtcttcattctacggttcagatatcggcaatgtggtgttagacaataagaccaacagcatcatcctggagaccgaggcggctgatttggggaacgatgaaaggtctaagaaaccaggaacccccggcactccaggaagccacgatctagaaaccgctctgagacgactgagtctgcgacgtgagaattacctgagtgaaaggaggttctttgaagaggagcaggaaagaaagctccaggagctggccgagaaaggggagctcagatcaggctcactaactcccaccgagagcataatgtctttaggcacccactcaagattttctgaattcaccggatttagcgggatgtctttctcgagccgctcttacctgccagaaaagcttcagattgtcaagcccttggaaggagaccatgcagggcctcggccactttctgttctgcttggcgattcattatggagcctgatccatctcagaaaagcaggccacttgtgtcacgcatactcattctttttcagagactctcatcccagatgctggttcgaattcctgtag

SEQ ID NO: 94215 - DNA, 1671 bp, Artificial Sequence
  derived and/or modified sequence
atgcagaagttcattgaagctgactactatgagctggactggtactatgaggagtgcagtgatgtgctgtgtgccgagcgggtgggccagatgaccaagacctacaatgacattgatgctgtgacccggctgctggaggagaaggagcgggacctggagctggccgcccgcatcggccagagcctgctgaagaagaacaagaccctgacagaaagaaatgagctgctggaggagcaggtggagcacatccgggaggaggtgtcccagctgcggcatgagctgtccatgaaggatgagctgctgcagttctacaccagcgctgctgaggagagcgagcctgagagcgtgtgcagcacccccctgaagagaaatgaaagcagcagctctgtgcagaactacttccacctggacagcctgcagaagaagctgaaggacctggaggaggagaatgtggtgctgcggtctgaggccagccagctgaagacagagaccatcacctatgaggagaaggagcagcagctggtgaatgactgtgtgaaggagctgagagatgccaacgtgcagatcgccagcatcagcgaggagctggccaagaagacagaagatgctgcccggcagcaggaggagatcacccacctgctgagccagatcgtggacctgcagaagaaggccaaggcctgtgctgtggagaatgaggagctggtgcagcacctgggcgccgccaaggatgcccagaggcagctgacagctgagctgcgggagctggaggacaagtatgcagagtgcatggagatgctgcacgaggcccaggaggagctgaagaacctgaggaacaagaccatgcccaacaccaccagccgccgctaccacagcctgggcctcttccccatggacagcctggccgctgagattgagggcaccatgaggaaggagctgcagctggaggaggccgagagcccagacatcacccaccagaagagggtgtttgaaacagtgaggaacatcaaccaggtggtgaagcagaggagcctgacccccagccccatgaacatccctggcagcaaccagagcagcgccatgaacagcctgctgagcagctgtgtgtccacccccaggagcagcttctacggcagtgacattggaaatgtggtgctggacaacaagaccaacagcatcatcctggagacagaggccgctgacctgggcaatgatgagaggagcaagaagccaggcaccccaggcaccccaggcagccatgacctggagacagccctgcggcggctgagcctgcggcgggagaactacctgtctgaaagacgcttctttgaggaggagcaggagaggaagctgcaggagctggccgagaagggggagctgcggagcggcagcctgacccccacagagagcatcatgagcctgggcacccacagccgcttcagcgagttcaccggcttcagcggcatgtccttcagcagccgcagctacctgcctgagaagctgcagatcgtgaagcccctggagggggaccatgctggcccccggcccctgtctgtgctgctgggggacagcctgtggagcctcatccacctgaggaaggccggccacctgtgccacgcctacagcttcttcttccgggacagccacccccgctgctggtttgagttcctgtag

SEQ ID NO: 94216 - DNA, 1671 bp, Artificial Sequence
  derived and/or modified sequence
atgcagaagttcatcgaggccgactactacgagctggactggtactacgaggaatgctcagacgtcctttgcgccgagagagtgggacagatgactaagacctacaacgatatcgatgctgttactagacttctagaggaaaaagaaagggaccttgagctggcggcaaggatcgggcaatctctgcttaagaagaacaagacactcacagagagaaatgagcttctggaggagcaagttgagcatatcagagaagaagtcagccagctgcgccacgagctcagcatgaaggatgaactgctacaattttatacatctgctgccgaggagtccgaacccgagagtgtatgttccacacctctgaaaagaaacgagagctctagctctgtacagaactactttcacctggattcactgcagaaaaagctgaaagacctcgaagaggagaacgtcgtactgcgttcagaggctagccagctgaaaactgaaacaataacatatgaggaaaaggagcagcagctagtaaacgactgtgttaaggaactgagagacgccaacgtgcagatcgcaagtattagcgaggagctggccaagaaaacggaagacgcggccagacagcaggaagagatcacacacctcctgtcgcaaatcgtcgacctgcaaaagaaagcaaaagcttgcgccgtggagaacgaggaacttgtgcagcatctaggggccgctaaagatgctcagcgtcagttgactgcagaactgcgcgaactggaggacaagtatgccgagtgtatggaaatgttgcacgaggcccaagaagagcttaaaaatctgagaaacaagacgatgccgaacactacttcaagaaggtaccacagtttgggcctctttccaatggacagtttagctgctgaaatcgagggcactatgcgtaaagagctccagctggaggaggcagaatctccagacatcacgcatcagaaacgcgtcttcgaaaccgtgaggaacatcaaccaggtcgtgaagcaacgttccctcactccaagccccatgaatatacccgggagcaaccagtcctcagctatgaactccctcttgtcttcttgcgtaagcacaccgaggagctctttttacgggtcagacatcggaaacgtcgtcctggacaataaaacgaattctatcatcttagagactgaagctgctgaccttggcaacgacgaacgaagtaagaaaccgggcacccctgggacacctggtagtcacgaccttgagacagcactacgccgcctgtctttgagaagagagaattatctgagtgaacggcgcttctttgaagaggaacaggagcggaagttacaggagctggctgagaagggtgaactgcgctcggggagcctgacacccaccgagagcattatgtccctcgggacacattcgcgcttctcagaattcactggctttagtggcatgtccttctccagccggtcttatctacccgagaagttacagatcgttaagccccttgagggcgaccatgccggaccgcgtcccctcagcgttctgttgggggacagtctctggagtcttatccacctgcggaaggcggggcacctgtgtcacgcctactccttctttttcagagactcccacccccgctgttggtttgagttcttatag

SEQ ID NO: 94217 - DNA, 1671 bp, Artificial Sequence
  derived and/or modified sequence
atgcaaaagttcatcgaggcggattattatgagctggactggtactatgaggaatgctctgatgtgctctgcgccgaacgcgtagggcagatgactaaaacttataatgatattgacgctgtcacccgactgctggaggagaaggagagagatctggagctagccgctcgaattggccagtcactgctgaagaaaaacaaaactctgactgagaggaacgagcttctggaggagcaggtggaacacatccgcgaggaggttagccagcttcgccacgagttgtcaatgaaagacgaactgctgcagttctacacttctgcggcagaagaatcggagccagaaagtgtctgcagcacccccttaaagagaaatgagtcttcctcaagtgtacagaactactttcacctagatagtctccagaagaagttgaaggatctggaagaggagaatgttgttctccgctctgaagctagccaactaaaaactgagaccattacgtacgaggaaaaggagcagcagctcgtgaatgactgtgtaaaggagctgagggatgctaatgtgcaaatcgccagcatctctgaggagttagccaaaaagacagaggatgctgccaggcagcaggaggagattactcacctgctgtcccagatcgtggatctccagaaaaaggcaaaggcttgcgcggtggaaaacgaagaactcgttcagcacctgggagcggcaaaggatgctcagaggcaacttaccgctgagctcagagaactggaggacaaatatgccgaatgtatggaaatgctacacgaagcccaggaagaactcaaaaacctgcgcaacaagaccatgcccaacacaaccagtcggagataccactctctgggactctttcctatggattcactcgccgctgaaatcgaaggtacaatgaggaaggagcttcagttagaagaagctgagtcccctgacatcactcatcagaaacgtgtatttgagacagtaaggaacattaaccaggtggtgaagcaacgctcgctgactccaagcccaatgaacattcccggaagtaaccaatcctccgccatgaacagcttgctgtctagttgcgtatctacgcctagatcatccttttatggatcagatatcggcaatgtggtactggacaataaaacaaatagcatcatcttagaaaccgaggcagctgatttgggtaacgacgagaggagtaagaaacccggaacacccggtacccccggtagccacgatctagagacagcgctaagacgcctgagcctgcgcagagagaactatttgtcagagcgacggttttttgaggaggagcaggaacgaaaactccaggagctggccgagaaaggagagctgcgtagcggctcgctgacacccacagagtcaataatgtccctgggaacacatagcaggttcagcgaatttacggggttctctgggatgtcattctcatctcgctcctacctgccagaaaaactgcaaattgtgaaacccctagaaggtgaccacgcgggacctaggccactaagcgtgttgctcggcgactcactctggtcccttatacaccttcgcaaagccggtcacctgtgtcacgcctattcctttttcttccgtgacagtcacccacggtgctggttcgagtttctgtag

SEQ ID NO: 94218 - DNA, 3260 bp, Artificial Sequence
  derived and/or modified sequence
attcagggctgctgtccagtgctgctttattggcagtgctgccagggtctccgttagctctctgcaaattgccttcctttctgctcctcctactccctccttcccccatagaatttttcttttcattgcccactttactgttttggctccagactgtcgttaagaatgtacagcctaattctggtgtgtttcgggatattcttctgtccagtattctggaagggcggggaggcatggcagcgttttacttgacgttgatggtgctgtgaagtccattctttcctctgcaagactactgactatgcagaaatttatcgaagcggattattatgaactagactggtattatgaagaatgctcggatgttttatgtgctgaaagagttggccagatgactaagacatataatgacatagatgctgtcactcggcttcttgaggagaaagagcgggatttagaattggccgctcgcatcggccagtcgttgttgaagaagaacaagaccctaaccgagaggaacgagctgctggaggagcaggtggaacacatcagggaggaggtgtctcagctccggcatgagctgtccatgaaggatgagctgcttcagttctacaccagcgctgcggaggagagtgagcccgagtccgtttgctcaaccccgttgaagaggaatgagtcgtcctcctcagtccagaattactttcatttggattctcttcaaaagaagctgaaagaccttgaagaggagaatgttgtacttcgatccgaggccagccagctgaagacagagaccatcacctatgaggagaaggagcagcagctggtcaatgactgcgtgaaggagctgagggatgccaatgtccagattgctagtatctcagaggaactggccaagaagacggaagatgctgcccgccagcaagaggagatcacacacctgctatcgcaaatagttgatttgcagaaaaaggcaaaagcttgcgcagtggaaaatgaagaacttgtccagcatctgggggctgctaaggatgcccagcggcagctcacagccgagctgcgtgagctggaggacaagtacgcagagtgcatggagatgctgcatgaggcgcaggaggagctgaagaacctccggaacaaaaccatgcccaataccacgtctcggcgctaccactcactgggcctgtttcccatggattccttggcagcagagattgagggaacgatgcgcaaggagctgcagttggaagaggccgagtctccagacatcactcaccagaagcgtgtctttgagacagtaagaaacatcaaccaggttgtcaagcagagatctctgaccccttctcccatgaacatccccggctccaaccagtcctcggccatgaactccctcctgtccagctgcgtcagcaccccccggtccagcttctacggcagcgacataggcaacgtcgtcctcgacaacaagaccaacagcatcattctggaaacagaggcagccgacctgggaaacgatgagcggagtaagaagccggggacgccgggcaccccaggctcccacgacctggagacggcgctgaggcggctgtccctgcgccgggagaactacctctcggagaggaggttctttgaggaggagcaagagaggaagctccaggagctggcggagaagggcgagctgcgcagcggctccctcacacccactgagagcatcatgtccctgggcacgcactcccgcttctccgagttcaccggcttctctggcatgtccttcagcagccgctcctacctgcctgagaagctccagatcgtgaagccgctggaaggtgatcacgcggggcctcggcccctctctgtcctcctgggggactccctttggtccctgatccacctgcggaaggcggggcacctctgtcacgcctactcctttttcttccgcgacagccacccgcgctgctggtttgagttcctctgagggtggtgctcagcctaggcctccgtccctcccctctggctggcaggtgtgacaatgcacacataggccatgaaactcgccgaggaaagacaagcatgtgcactgtggtcttctagttctttcctttgcctttagaaccttagaaataaaaacttttgtggcggtagaggcactgctaactgattcaaaaattaattaggttttgcctgtgggtgtgaggaatgcagaaaattaatgctttagcttttctgcagttttggtgtcggggagaggttccaagcaaactctattaaatggggatttttttttccccataaccacctgaatgtgatttgtgggcttatgtgttctgatttgaacttcatatagcaaggttgtggcttttggcagatgcagtatgttctgagcgcggctcctagagtctacaatttggagtccaggaaggggtggctgtggagacaagtgagttttgtacctccgtaagccaccctttttcagggtcagttcatgtgttagtatcaggggcatctcagatgattaaactcatgggaaaaacttcctccttccctctctccctcttgccctcctgcctctttttttttttttttttttttaatttaggcacttataaaatgttttccctctacctgctgctactctgccaagagccaccaagtgcttatatttttcattttttactcctttagtttggaaagccatatacgtttgagaaggtgttttaaaactctgtgttacacttacgatgcaaagccaaatcagaacttctgtaaggcagaactttcccaactttaaaaaaattattgtcccctctaaggagccttcttagacgttttttcctaatcaccccccaaagacattttaataccacatatatattgtttatgtactatatgtatatacataaacaatacataagcaatacatctgtggtattaaaattaaaaagaatccaattatgtttacctcaaaagaacctgtttttgcttcttgggagcaatattgcccctgtgagactgcatgctataaggtaaggttgtgcttgttaaagacccaagacatgactgggttccacagtctccaaaggaagagggtgggctagtttgtttttattattattttaaaattgtataattggggtctttcttagagttcagaaaaggtatagcttactcttttttaattgtttatttagttgtaagcttggtgattgttttctgatccacattgtgtgtgttcttcaataaaatctttcatttctgcaatttta

SEQ ID NO: 94219 - protein, 1231 aa, Artificial Sequence
  derived and/or modified sequence
MAVEGSTITSRIKNLLRSPSIKLRRSKAGNRREDLSSKVTLEKVLGITVSGGRGLACDPRSGLVAYPAGCVVVLFNPRKHKQHHILNSSRKTITALAFSPDGKYLVTGESGHMPAVRVWDVAEHSQVAELQEHKYGVACVAFSPSAKYIVSVGYQHDMIVNVWAWKKNIVVASNKVSSRVTAVSFSEDCSYFVTAGNRHIKFWYLDDSKTSKVNATVPLLGRSGLLGELRNNLFTDVACGRGKKADSTFCITSSGLLCEFSDRRLLDKWVELRTTVAHCISVSQDYIFCGCADGTVRLFNPSNLHFLSTLPRPHALGTDIASVTEASRLFSGVANARYPDTIALTFDPTNQWLSCVYNDHSIYVWDVRDPKKVGKVYSALYHSSCVWSVEVYPEVKDSNQACLPPSSFITCSSDNTIRLWNTESSGVHGSTLHRNILSSDLIKIIYVDGNTQALLDTELPGGDKADASLLDPRVGIRSVCVSPNGQHLASGDRMGTLRVHELQSLSEMLKVEAHDSEILCLEYSKPDTGLKLLASASRDRLIHVLDAGREYSLQQTLDEHSSSITAVKFAASDGQVRMISCGADKSIYFRTAQKSGDGVQFTRTHHVVRKTTLYDMDVEPSWKYTAIGCQDRNIRIFNISSGKQKKLFKGSQGEDGTLIKVQTDPSGIYIATSCSDKNLSIFDFSSGECVATMFGHSEIVTGMKFSNDCKHLISVSGDSCIFVWRLSSEMTISMRQRLAELRQRQRGGKQQGPSSPQRASGPNRHQAPSMLSPGPALSSDSDKEGEDEGTEEELPALPVLAKSTKKALASVPSPALPRSLSHWEMSRAQESVGFLDPAPAANPGPRRRGRWVQPGVELSVRSMLDLRQLETLAPSLQDPSQDSLAIIPSGPRKHGQEALETSLTSQNEKPPRPQASQPCSYPHIIRLLSQEEGVFAQDLEPAPIEDGIVYPEPSDNPTMDTSEFQVQAPARGTLGRVYPGSRSSEKHSPDSACSVDYSSSCLSSPEHPTEDSESTEPLSVDGISSDLEEPAEGDEEEEEEEGGMGPYGLQEGSPQTPDQEQFLKQHFETLASGAAPGAPVQVPERSESRSISSRFLLQVQTRPLREPSPSSSSLALMSRPAQVPQASEPAVSLEQCEQLVAELRGSVRQAVRLYHSVAGCKMPSAEQSRIAQLLRDTFSSVRQELEAVAGAVLSSPGSSPGAVGAEQTQALLEQYSELLLRAVERRMERKL

SEQ ID NO: 94220 - DNA, 3696 bp, Artificial Sequence
  derived and/or modified sequence
atggccgtggagggcagcaccatcaccagcagaatcaagaacctgctgagaagccccagcatcaagctgagaagaagcaaggccggcaacagaagagaggacctgagcagcaaggtgaccctggagaaggtgctgggcatcaccgtgagcggcggcagaggcctggcctgcgaccccagaagcggcctggtggcctaccccgccggctgcgtggtggtgctgttcaaccccagaaagcacaagcagcaccacatcctgaacagcagcagaaagaccatcaccgccctggccttcagccccgacggcaagtacctggtgaccggcgagagcggccacatgcccgccgtgagagtgtgggacgtggccgagcacagccaggtggccgagctgcaggagcacaagtacggcgtggcctgcgtggccttcagccccagcgccaagtacatcgtgagcgtgggctaccagcacgacatgatcgtgaacgtgtgggcctggaagaagaacatcgtggtggccagcaacaaggtgagcagcagagtgaccgccgtgagcttcagcgaggactgcagctacttcgtgaccgccggcaacagacacatcaagttctggtacctggacgacagcaagaccagcaaggtgaacgccaccgtgcccctgctgggcagaagcggcctgctgggcgagctgagaaacaacctgttcaccgacgtggcctgcggcagaggcaagaaggccgacagcaccttctgcatcaccagcagcggcctgctgtgcgagttcagcgacagaagactgctggacaagtgggtggagctgagaaccaccgtggcccactgcatcagcgtgagccaggactacatcttctgcggctgcgccgacggcaccgtgagactgttcaaccccagcaacctgcacttcctgagcaccctgcccagaccccacgccctgggcaccgacatcgccagcgtgaccgaggccagcagactgttcagcggcgtggccaacgccagataccccgacaccatcgccctgaccttcgaccccaccaaccagtggctgagctgcgtgtacaacgaccacagcatctacgtgtgggacgtgagagaccccaagaaggtgggcaaggtgtacagcgccctgtaccacagcagctgcgtgtggagcgtggaggtgtaccccgaggtgaaggacagcaaccaggcctgcctgccccccagcagcttcatcacctgcagcagcgacaacaccatcagactgtggaacaccgagagcagcggcgtgcacggcagcaccctgcacagaaacatcctgagcagcgacctgatcaagatcatctacgtggacggcaacacccaggccctgctggacaccgagctgcccggcggcgacaaggccgacgccagcctgctggaccccagagtgggcatcagaagcgtgtgcgtgagccccaacggccagcacctggccagcggcgacagaatgggcaccctgagagtgcacgagctgcagagcctgagcgagatgctgaaggtggaggcccacgacagcgagatcctgtgcctggagtacagcaagcccgacaccggcctgaagctgctggccagcgccagcagagacagactgatccacgtgctggacgccggcagagagtacagcctgcagcagaccctggacgagcacagcagcagcatcaccgccgtgaagttcgccgccagcgacggccaggtgagaatgatcagctgcggcgccgacaagagcatctacttcagaaccgcccagaagagcggcgacggcgtgcagttcaccagaacccaccacgtggtgagaaagaccaccctgtacgacatggacgtggagcccagctggaagtacaccgccatcggctgccaggacagaaacatcagaatcttcaacatcagcagcggcaagcagaagaagctgttcaagggcagccagggcgaggacggcaccctgatcaaggtgcagaccgaccccagcggcatctacatcgccaccagctgcagcgacaagaacctgagcatcttcgacttcagcagcggcgagtgcgtggccaccatgttcggccacagcgagatcgtgaccggcatgaagttcagcaacgactgcaagcacctgatcagcgtgagcggcgacagctgcatcttcgtgtggagactgagcagcgagatgaccatcagcatgagacagagactggccgagctgagacagagacagagaggcggcaagcagcagggccccagcagcccccagagagccagcggccccaacagacaccaggcccccagcatgctgagccccggccccgccctgagcagcgacagcgacaaggagggcgaggacgagggcaccgaggaggagctgcccgccctgcccgtgctggccaagagcaccaagaaggccctggccagcgtgcccagccccgccctgcccagaagcctgagccactgggagatgagcagagcccaggagagcgtgggcttcctggaccccgcccccgccgccaaccccggccccagaagaagaggcagatgggtgcagcccggcgtggagctgagcgtgagaagcatgctggacctgagacagctggagaccctggcccccagcctgcaggaccccagccaggacagcctggccatcatccccagcggccccagaaagcacggccaggaggccctggagaccagcctgaccagccagaacgagaagccccccagaccccaggccagccagccctgcagctacccccacatcatcagactgctgagccaggaggagggcgtgttcgcccaggacctggagcccgcccccatcgaggacggcatcgtgtaccccgagcccagcgacaaccccaccatggacaccagcgagttccaggtgcaggcccccgccagaggcaccctgggcagagtgtaccccggcagcagaagcagcgagaagcacagccccgacagcgcctgcagcgtggactacagcagcagctgcctgagcagccccgagcaccccaccgaggacagcgagagcaccgagcccctgagcgtggacggcatcagcagcgacctggaggagcccgccgagggcgacgaggaggaggaggaggaggagggcggcatgggcccctacggcctgcaggagggcagcccccagacccccgaccaggagcagttcctgaagcagcacttcgagaccctggccagcggcgccgcccccggcgcccccgtgcaggtgcccgagagaagcgagagcagaagcatcagcagcagattcctgctgcaggtgcagaccagacccctgagagagcccagccccagcagcagcagcctggccctgatgagcagacccgcccaggtgccccaggccagcgagcccgccgtgagcctggagcagtgcgagcagctggtggccgagctgagaggcagcgtgagacaggccgtgagactgtaccacagcgtggccggctgcaagatgcccagcgccgagcagagcagaatcgcccagctgctgagagacaccttcagcagcgtgagacaggagctggaggccgtggccggcgccgtgctgagcagccccggcagcagccccggcgccgtgggcgccgagcagacccaggccctgctggagcagtacagcgagctgctgctgagagccgtggagagaagaatggagagaaagctgtag

SEQ ID NO: 94221 - DNA, 3696 bp, Artificial Sequence
  derived and/or modified sequence
atggcagtcgagggaagtaccatcacttcccgtattaagaatctactccgcagcccgtcaattaagctcaggcgatcgaaggccggcaatcgcagggaagacctatcttctaaggtgacactggaaaaagtgctcggaatcactgtctctggtggacgcggcctggcctgtgaccctagaagtggcctggtcgcctaccccgccgggtgcgttgtggtcctgttcaaccccagaaagcataagcagcatcacatcctcaacagttcccgcaaaaccattactgccttggcattttcccccgacgggaaatatctcgttaccggtgagagcggccacatgcccgctgtcagggtctgggatgtagcagagcatagccaggttgccgaactgcaagagcataagtacggagtggcatgcgtggccttctctccaagcgccaagtacatagtatctgtaggataccaacacgacatgatcgtgaacgtttgggcatggaagaaaaatatcgtggtggcctcaaacaaggtgtctagccgggttacagcagtgtccttttctgaggattgctcatattttgtgacagccgggaatagacacattaaattttggtacctcgacgactctaaaacaagtaaggtaaatgctacggtgcccctcctcggacgtagcgggctgctgggggagttgcgtaataatctatttacggacgttgcctgcggcagaggcaagaaagccgattccactttttgtatcacaagctcaggcttgttatgcgagttctcagatcggcggctcttggataaatgggtggaactgaggaccactgtggcacattgtatttccgtgtcacaggactacattttctgcggatgcgcagacggaactgtgcggctttttaaccccagcaacctacactttctcagcactctgccccgcccccacgctctggggaccgatattgcatctgtcactgaggcttcccgcctgttcagcggtgttgccaacgctagatatcctgacaccattgcactgacgttcgatccaacaaatcaatggctgtcttgcgtttataatgatcattcgatatatgtgtgggacgtgcgcgaccctaagaaggtgggaaaagtgtatagcgccttgtatcactcaagctgcgtttggtcagtggaggtctaccccgaagtcaaagactcgaatcaggcctgcctgcccccctcatcttttatcacctgttcctcggacaatacgatccgcctgtggaacaccgagagttccggcgttcacggcagcactttgcaccggaatattttgagtagcgaccttatcaagatcatctatgtcgatggtaatacgcaggccctgcttgacactgaacttcccggtggggacaaggctgacgcgagcttgcttgaccccagagtcgggatccgctccgtttgcgtgtctccaaacggccagcacctggcctctggagaccgtatgggcactctgagggtgcacgaattgcagagcctgagcgaaatgcttaaagttgaagcacacgactccgagattctctgtctcgagtactctaagcccgatactgggctgaaactcttggcctccgcttcaagggaccgcctgatccacgtgctggatgcgggccgcgagtattctctgcagcagaccctggatgagcacagcagcagtattacggcggtgaagttcgctgcctctgatggccaggtccgcatgatctcatgcggtgctgataaatccatctatttccgtacagcccagaagtcaggcgacggagtgcaattcacgcgcacacaccatgttgtgaggaagacaactctatacgatatggatgtggaacccagttggaagtacacagccattggttgccaagatcgcaacatacgcatctttaacataagctcaggtaagcagaaaaagttgtttaaaggctcacagggcgaggacgggacgcttatcaaagtacaaacggatccctcgggtatatacatagctaccagctgtagcgataagaacctgagcatcttcgacttctcatccggcgaatgtgtcgccactatgttcggccacagcgaaattgtgacaggtatgaagttctcaaacgactgtaagcacctcatttccgtgtctggggacagctgcatttttgtatggcgcctgtcttccgagatgactattagcatgcggcagcgacttgctgagctcagacaaagacagcgtggcggaaagcagcaagggcccagttccccacagagagcatcaggcccaaatagacaccaagcccccagtatgctgtcccccgggcctgctctgtcaagcgactctgacaaggaaggagaggacgaaggcaccgaggaggagttgcctgcactccccgtgctcgccaagagcacaaagaaggcactggcctctgttccaagccccgctttacctcggtcgctttcccactgggaaatgtcacgagcccaagaatctgtggggtttttggatccagcccccgccgctaaccctggtccccgccgccggggcaggtgggtccaaccaggggtcgagctgtctgtacgctctatgctggatttgagacagctcgagactttagcgcctagcctgcaggacccatcacaagatagcttagccattattccttcaggccctagaaaacacggccaagaagcgctggaaacaagcctgaccagtcagaatgagaaaccgcccagacctcaggcttcccagccatgctcctatccgcacattattagactgctgtcacaggaggaaggggtgttcgcacaagacctggagcccgcgccgatagaagatggtatagtctatcctgaaccctcagataatcctaccatggacacgtctgagttccaggtgcaagctcccgcccgcggtaccctgggccgtgtctatccaggcagccgctcgagtgaaaaacactcccctgacagcgcctgcagtgtcgattacagctcaagttgtttgtcctctccagaacatccaacagaagattcagagagcacagaacccctgtctgtggatggaatctcttcagacctggaagagcccgccgagggggacgaagaagaggaggaggaggagggcgggatgggcccctacgggctccaggagggatccccccaaactcctgaccaggagcagtttctgaagcaacatttcgagaccctcgcaagtggagctgccccgggagcacccgtccaggtgcccgagcgcagcgagtctcggagcatttcgagtagatttctgctccaagtgcaaacgcgcccactacgggagccctcaccgtccagctccagtcttgcactcatgtctagacccgctcaagtccctcaagcctcggagccggcggtgagtctggagcagtgtgaacaattggtggctgagctcagagggtccgtgagacaggccgttagattgtaccatagcgtcgcgggctgtaagatgccaagcgccgagcaaagcaggattgcacagcttctcagggatacatttagcagtgtgcgccaggagctggaggcggttgctggagcagtgttaagttcccccggaagttcccctggggcagtgggggcagaacagacacaggctctgctggaacagtactcagaattgctgctgcgtgctgtggagcgcaggatggaaagaaaactttag

SEQ ID NO: 94222 - DNA, 3696 bp, Artificial Sequence
  derived and/or modified sequence
atggctgtggagggcagcaccatcaccagccgcatcaagaacctgctgcggagccccagcatcaagctgcggcgcagcaaggccggcaacagaagagaggacctgagcagcaaggtgaccctggagaaggtgctgggcatcaccgtgtctgggggccggggcctggcctgtgaccccaggagcggcctggtggcctacccagctggctgtgtggtggtgctcttcaaccccaggaagcacaagcagcaccacatcctgaacagcagcaggaagaccatcacagccctggccttctccccagatggcaagtacctggtgactggagagagcggccacatgcctgctgtgcgggtgtgggatgtggccgagcacagccaggtggccgagctgcaggagcacaagtatggagtggcctgtgtggccttcagccccagcgccaagtacatcgtgtctgtgggctaccagcacgacatgattgtgaatgtgtgggcctggaagaagaacatcgtggtggccagcaacaaggtgagcagccgggtgacagctgtgtccttcagcgaggactgcagctactttgtgacagctggcaacagacacatcaagttctggtacctggatgacagcaagaccagcaaggtgaatgccaccgtgcccctgctgggccgcagcggcctgctgggggagctgaggaacaacctcttcacagatgtggcctgtggccggggcaagaaggctgacagcaccttctgcatcaccagcagcggcctgctgtgtgagttcagtgaccggcggctgctggacaagtgggtggagctgcggaccaccgtggcccactgcatctctgtgtcccaggactacatcttctgtggctgtgctgatggcaccgtgcggctcttcaaccccagcaacctgcacttcctgagcaccctgccccggccccacgccctgggcacagacatcgcctctgtgacagaggccagccgcctcttctctggagtggccaatgcccgctacccagacaccatcgccctgacctttgaccccaccaaccagtggctgagctgtgtgtacaatgaccacagcatctacgtgtgggatgtgcgggaccccaagaaggtgggcaaggtgtacagcgccctgtaccacagcagctgtgtgtggagcgtggaggtgtacccagaggtgaaggacagcaaccaggcctgcctgccccccagcagcttcatcacctgcagcagtgacaacaccatccggctgtggaacacagagagcagtggagtgcacggcagcaccctgcacaggaacatcctgagcagtgacctgatcaagatcatctacgtggatggcaacacccaggccctgctggacacagagctgcccggcggggacaaggcagatgccagcctgctggacccccgggtgggcatccgctctgtgtgtgtgagccccaacggccagcacctggccagcggggacaggatgggcaccctgcgggtgcatgagctgcagagcctgtctgagatgctgaaggtggaggcccatgacagcgagatcctgtgcctggagtacagcaagccagacaccggcctgaagctgctggccagcgccagccgggacaggctcatccacgtgctggatgctggccgggagtacagcctgcagcagaccctggatgagcacagcagcagcatcacagctgtgaagtttgctgccagtgatggccaggtgaggatgatcagctgtggggctgacaagagcatctacttcagaacagcccagaagtctggagatggagtgcagttcaccaggacccaccacgtggtgaggaagaccaccctgtatgacatggatgtggagcccagctggaagtacacagccatcggctgccaggacaggaacatccgcatcttcaacatcagcagcggcaagcagaagaagctgttcaagggcagccagggagaagatggcaccctcatcaaggtgcagacagaccccagcggcatctacatcgccaccagctgcagcgacaagaacctgagcatctttgacttcagcagcggggagtgtgtggccaccatgtttggccacagcgagatcgtgacaggcatgaagttcagcaatgactgcaagcacctgatctctgtgtctggggacagctgcatctttgtgtggaggctgagcagcgagatgaccatctccatgaggcagaggctggccgagctgcggcagaggcagagaggaggcaagcagcagggccccagcagcccccagagggccagcggccccaacagacaccaggcccccagcatgctgagccctggccctgccctgagcagtgacagcgacaaggagggggaggatgagggcacagaggaggagctgcctgccctgcctgtgctggccaagagcaccaagaaggccctggcctctgtgcccagccctgccctgcccaggagcctgagccactgggagatgagccgggcccaggagagcgtgggcttcctggaccctgccccagctgccaaccctggccccaggagaagaggccgctgggtgcagcccggggtggagctgtctgtgcgctccatgctggacctgcggcagctggagaccctggcccccagcctgcaggaccccagccaggacagcctggccatcatccccagcggccccaggaagcacggccaggaggccctggagaccagcctgaccagccagaatgagaagccaccccggccccaggccagccagccctgcagctacccccacatcatccggctgctgagccaggaggagggcgtgtttgcccaggacctggagcccgcccccattgaagatggcatcgtgtacccagagcccagcgacaaccccaccatggacaccagcgagttccaggtgcaggccccagcccggggcaccctgggccgggtgtacccaggcagccgcagcagcgagaagcacagcccagattctgcctgcagcgtggactacagcagcagctgcctgagcagccctgagcaccccacagaggacagcgagagcacagagcccctgtctgtggatggcatcagcagtgacctggaggagccagcagaaggagatgaggaggaggaggaggaggagggcggcatgggcccctacggcctgcaggagggcagcccccagaccccagaccaggagcagttcctgaagcagcactttgagaccctggccagcggggccgcccctggggcccctgtgcaggtgcctgagaggtctgagagccgcagcatcagcagccgcttcctgctgcaggtgcagacccggcccctgcgggagcccagccccagcagcagcagcctggccctgatgagcaggcctgcccaggtgccccaggccagcgagcctgctgtgtccctggagcagtgtgagcagctggtggccgagctgcggggctctgtgcggcaggccgtgcggctgtaccacagcgtggccggctgcaagatgcccagcgctgagcagagccgcatcgcccagctgctgcgggacaccttcagctctgtgcggcaggagctggaggccgtggccggggctgtgctgagcagccctggcagcagccctggagctgtgggcgctgagcagacccaggccctgctggagcagtacagcgagctgctgctgcgggctgtggagaggaggatggagaggaagctgtag

SEQ ID NO: 94223 - DNA, 3696 bp, Artificial Sequence
  derived and/or modified sequence
atggccgtggagggcagcaccatcaccagccggatcaagaacctgttacggtctccaagtattaaactgcgcagatccaaagccgggaatagaagagaagacttgtcttctaaggtgacgttagagaaagtgctcggcattacagtgtccggcggcagaggcttggcctgtgaccctcgaagcggcctggtcgcttatcctgctgggtgcgtcgttgtgctctttaacccacgaaagcataagcagcaccacattctcaactcctcccgaaagacgataacagcgctggctttttccccagacggcaaatacctggttaccggggagagtggacacatgccagccgtcagagtgtgggacgtggccgagcatagccaagtcgccgagttgcaggaacacaaatacggcgtggcctgtgtagcttttagtcccagcgcgaaatacatagtcagcgtgggctatcagcacgacatgatcgtcaacgtgtgggcttggaagaagaacatcgtggtagcatctaacaaggtgtctagccgggtgacagctgttagtttcagcgaagactgcagctacttcgttaccgctgggaatcgccatattaagttctggtatctggacgattctaaaacctcaaaagtcaacgcaactgtcccattgctgggccgaagtggtctgctcggcgagttgcgaaacaacctctttaccgatgtggcctgcggaaggggcaaaaaagcggattctactttttgcatcacatcctcaggattactgtgcgaattcagcgatcgaaggcttctcgacaagtgggtagagctgcggaccaccgttgcacattgcattagcgttagccaagactacatcttttgcggctgcgcagacggcacagttcgcctgttcaatccatctaaccttcactttctctcgacactgccccggccccacgcactgggcactgacatcgcatccgtcacggaagcctcccggctgttttctggggtcgccaacgcccggtatcccgataccatcgcactgacattcgaccccaccaaccagtggctatcttgcgtttacaatgaccactccatctacgtctgggatgtccgcgaccctaaaaaggtcgggaaggtgtactccgccctgtatcactcatcctgcgtgtggagcgtggaagtgtatcctgaggtgaaagattcgaaccaggcctgcttgccaccatctagctttatcacgtgcagttctgataacacaatcagattatggaacactgagtcctccggagtgcacgggagcaccttgcatagaaatatcttatcctctgacctgattaaaatcatttatgtggatgggaatacacaggcattgctcgacaccgagcttcccggaggtgataaggctgacgcgagcctcttagaccctcgcgtgggcatccgtagcgtctgcgtcagccccaacggccagcacctggcttcaggagaccgaatgggtaccctccgcgtccacgagttacagtctcttagcgagatgctgaaagtcgaggcccacgactccgaaatcttatgcctcgagtatagtaaacctgataccggcctgaaactgctggcctccgcatccagagatcgcctgatccacgttctggacgccgggcgggaatacagcctacagcaaacccttgatgaacactcaagctcaattactgccgtgaagtttgcagccagcgatggccaggtgaggatgatttcctgtggggccgataagagtatatattttcgaacagcacagaaatctggcgacggcgtgcaatttacacgcactcaccatgtggttaggaaaacaacactatatgacatggacgttgagccgagttggaagtatacagcaatcgggtgccaggatcgcaacatacgcatattcaatatatcaagcggcaaacagaagaagctctttaagggctcacagggggaggacggcacattgatcaaggtgcagacagacccaagcggaatctatatcgctacaagctgcagcgacaagaatctctctattttcgacttctccagtggagagtgtgtcgccaccatgttcgggcacagcgaaatcgtcacaggcatgaagttctccaacgactgcaaacacctaattagtgtttccggggattcatgtatttttgtctggaggctgtcaagtgagatgaccatatctatgcggcagcggctagccgaactacggcagcgacagcgggggggcaagcagcaaggcccaagctcaccacagcgcgcctccggacctaaccgccatcaggcgccatccatgttatcaccagggccggctctgagcagcgatagcgacaaggagggcgaggatgaaggaactgaggaggagcttccggccttaccggtgcttgcaaagtctacgaagaaggcattggcctcggtgcccagtcctgcacttcccagatctttgagtcactgggagatgagccgagcacaggaatcagtggggttcctcgatccggctccggcggccaatcccgggcctagacgacgcgggcgctgggtgcagccaggggtggaactgagtgtgagatcaatgctggacttacggcagttggagactctggctccttccctgcaagatccctcccaggacagcttggcaattatcccatccgggccacggaagcatggtcaggaggcgctcgaaacttctctgaccagtcagaacgagaagccccccaggccacaggcatcacagccgtgttcttatccccacataatccgtttgctgagccaggaagaaggcgtattcgcacaggatctcgagcccgccccaatcgaagacggcatcgtgtatcctgagccctccgacaaccctactatggatacttcagagtttcaggtacaagcccccgccaggggcacattgggccgcgtgtatccaggctccaggtcaagtgaaaagcatagccctgatagcgcttgtagcgtggactacagtagctcttgtctctcttcccccgaacacccaactgaggactccgaatcaaccgagcccctgtccgtggacgggatcagctctgacttagaagaacctgcagagggagacgaagaagaagaggaggaagaaggtgggatgggcccctacgggttacaagaagggtccccccagacccccgatcaggagcaatttcttaaacagcactttgagacccttgcctcgggggccgcaccgggcgctcctgtgcaggtgccagaaagatccgaatccaggagcatatcatcaaggttcttgttacaggttcagacccggccattacgtgagccatctcctagcagctcatctttggcgctgatgagccgaccggctcaggtacctcaggcctccgaacctgccgtgtccttagaacagtgtgaacagctcgtggccgaactgaggggttcagtgcgccaagccgtgagactgtatcactccgtcgctggatgcaaaatgccctccgctgaacagagtaggatcgcacagttgctgcgcgacacgttttcatctgtaaggcaggagctggaggcagtcgccggcgccgtgctcagtagtcctgggtccagcccaggggccgttggggccgagcagactcaagcattactggagcaatattcagagctactgctcagggctgtggaacggcgaatggaacggaagctttag

SEQ ID NO: 94224 - DNA, 5394 bp, Artificial Sequence
  derived and/or modified sequence
ggagctgaaattgccgaacgcgatgcccgagggcgctgtgagcggggtggccttagctcgccgaggctggtcagtgagagggcatactgggaagccctctggagtgggaagacagtgccgctgttgagacaagacccaggactgggccggggactgtcccaaagggtttctcgtcataatggctgtggaagggtcaaccattaccagccggatcaagaatctgttgagatctccatccatcaaactgcgcaggagtaaggcaggaaaccgacgagaggacctcagctccaaggtgaccttggagaaggtgctgggaattacagtgtctggaggcagaggacttgcctgtgacccccgatcaggtttagttgcttacccagcagggtgtgtggttgtgttgttcaatccccggaaacacaaacagcaccacatcctcaacagttccaggaaaaccatcactgcccttgccttctcccctgatggcaagtacttggtcactggagagagtgggcacatgcctgccgtgcgggtttgggacgtggcagagcacagccaggtggccgagctgcaggagcacaagtatggtgtggcttgtgtggccttctctcctagcgccaagtacattgtctctgtgggctaccagcatgacatgatcgtcaacgtgtgggcctggaagaaaaacattgtggtggcctccaacaaggtgtccagtcgggtgacagcagtgtccttctctgaggattgcagctactttgtcactgcaggcaaccgacacatcaaattctggtatctcgatgacagcaagacctcaaaggtgaatgccactgtgcccttgctgggccgctcagggctgctgggagagctacggaacaacctattcactgatgtggcctgtggcagaggaaaaaaggcggacagtaccttctgcatcacgtcctcagggctgctgtgcgagttcagtgatcgaaggcttttggacaagtgggtggagctgaggaccacagtggcccactgcatctctgtgagccaagactacatcttctgtggctgtgctgatggcaccgtgcgccttttcaacccctctaacctgcacttccttagcaccttgccccgaccccatgctctggggacagacattgctagcgtcaccgaggccagtcgcctcttctctggagtggcgaatgccaggtatccagacaccattgccttgacctttgatcctactaatcagtggctgtcttgtgtgtacaacgatcatagcatttatgtttgggatgtgagggaccccaagaaagtgggcaaggtgtactcggctctgtatcattcttcctgcgtctggagtgtggaggtctaccccgaggtgaaggatagtaaccaggcctgcctgccccccagttcctttattacctgctcctcagacaacaccatccgcctgtggaacacagagagctccggggtgcatggctccaccctccaccgaaacatcctcagcagtgacctcattaaaatcatctatgtggatgggaacacccaggccctgctggacacagagctgcctggaggagacaaagctgatgcatccctgttggatccccgcgtgggcatccgctcggtgtgtgtcagccccaatggacagcatctagcatcaggggaccgtatgggcacacttagggtgcacgaacttcagtccctgagtgagatgctgaaggtggaggcccatgactctgagattctgtgcctggagtattctaagccagacacaggtctgaaactgctagcatcggcgagccgggaccggctgatccatgtgctggatgccgggcgggagtacagcctacagcagacgctggacgaacactcatcctccatcactgctgttaagtttgcagccagtgatgggcaagtccgcatgatcagctgtggagcagacaagagcatctacttccgcactgcgcagaagtctggagatggagtgcagttcacacggacacaccacgtggtgcggaagacgaccctctatgacatggatgtggagcccagctggaagtacacggctatcggctgccaggaccgaaatattcggatatttaacatcagcagtggaaagcagaagaagctgtttaaagggtcacagggtgaggacggcacactcattaaggtgcagacagacccctcagggatctacattgccaccagctgttctgacaagaatctctccatttttgacttctcctcaggcgagtgcgtggccaccatgtttggccactcagagattgtcactggcatgaaatttagtaatgattgtaaacatctcatctctgtgtctggggacagctgcatatttgtgtggcgcctgagctctgagatgaccatcagcatgaggcagcgtctggccgagttgcgccagcgtcagcggggcggcaagcagcaaggaccatcctctccccaaagggcttctggacccaaccggcaccaggccccatcaatgctgtctcctggaccggctctctcatcagacagtgacaaggagggagaagatgaggggactgaagaagaacttccagcactgcccgtccttgccaagagtaccaagaaggcactggcctcggtccccagcccagctttgccccgaagcctgtcccactgggagatgagtcgggcacaggagtccgtggggttcctggacccagctcctgcagccaacccaggacccagaagaagagggcgctgggttcagccaggtgtggaactgagcgttagatccatgctggatctgcggcagctggaaacactggccccaagcctgcaggaccctagccaggactcgctggccatcatcccatctggtcccaggaagcatgggcaggaggcccttgagacttcactcactagccagaatgaaaagccccctcggcctcaggcttcccaaccttgttcctatccccatattatccgattattgtcacaagaggaaggggtctttgcccaagatctggaacctgcacccattgaagatggtattgtctacccggagccgagtgacaaccccaccatggataccagtgagttccaagtgcaggctccagcccggggaactctgggaagagtgtacccaggcagcaggagctcagaaaagcacagccctgacagtgcctgctctgtggattacagcagcagctgcctttccagcccggagcaccccactgaagactctgagagcacggagcccctcagtgtggatggcatctcctcagaccttgaagagccagctgagggtgatgaagaagaggaagaagaggagggaggcatgggcccctatgggctacaggagggcagcccccagactccagaccaggagcagtttctaaaacagcactttgagactctggccagtggagctgctccaggggccccagtgcaggtcccagagaggtcagagtctcggagtatctcttcacgattcctgttgcaagtacagacccgcccactcagggaaccatccccatcctcctcaagcctggcactgatgtcgagaccagcccaggtgccacaggcatctgagccagcggtgagcctggagcagtgtgagcagctggtggcagagctccgcggcagcgtgcgccaggcagtgcggctctaccactcggtggctggctgcaagatgccctcagcagagcaaagtcggattgcccagctcctcagagacaccttctcttcagtgcgacaggagctggaagctgtggctggggcagtgctgtccagcccaggcagcagccctggggctgtgggagccgagcagacacaggccctgctggagcaatactcagaactgttgcttcgagccgtggaacggcgtatggaacgcaaactctgagttctggaagcctgtcccaagtgaatgaatgctccagcgattccaaactgcagcccctctgcccctcaccaaaacctgcggggctgcttggagtggaaagcagggagcagtgttcagaggcaaagcagccttcccagccgctcctcgtggggggcctgtatttattaatttatttccctgactgttgcctcacttccttggaactcctgcctccacagcccctccagtggcagggacaggtcttgggtctttgtcatcttggtgctgtgagaggtaggagggcagcctgccccatctaggaatctgggaagggctggccctctcttagaagccatttgaaattactgcagggattagctccctgtggtggagcatacacagggtactctggggtcgaggtgagaggtgatgtggtattcagtgcccgtcagccaactgtgggccttcacctctacctgcacttcccctctcacaccagctgcactcccgtggctgccagagcagggtggttttccccaatacctggagctcagaaaggcagagccatctggccctccagggtgtccccagccatcaggagacttgagttggtatttggacctgagcccgcacattccactcccattctccctccaagaggggcccagcattgtatttccctgtgaccccttactctcctggccagaacttgagccagctgtgggatgttgctgcaggacagtaagccctcacctgggcaaacatgaagctctggcctcctttcctcagccccttgttcttccctgtcctccaccctggaccccagccggctgctggagcccagaggccaccttctccctgcatcctgaatgatgcttagtcagaagcctgtgttggaacatccctcgtttacggggcgctggcctacctcctgaggacctcagccacagatgagatcacacgcatgcacgtgcacacatgtacacacacacacctacctgcacagcacgctgttgagtgttggttgctagagtatctggctggctgctgtgtgcctggtttcctcacatcctgcctcagcttcaccaccctggcttatgtggaacacctatcagggagcagaaaaggggtgcagtacactaagtgaacccagattctggattcttggtgtccacagcctagctgatacgagatagcccataggacacctggtttaggtagaaggagcctcctcaaaggcagtgctgggcacccacgggtgtgctggatactggagtttgagaggagggaggtgctggggccaaaggagacactagaaaagtggtagatgggacaggtaagtggcagaggtgaggggataagttagaatgtaaaagggcagtaattaggggtgagggaaaggagataggggaccctaggaggtagagtgggaccatgtcgtgaggcagttgaagagttgaggaaaggtttttctgggccctactgctcccctctgctgcaggtaagtcagagcagctttaccacagcttcaggccacgaga

SEQ ID NO: 94225 - DNA, 3696 bp, Artificial Sequence
  derived and/or modified sequence
atggcagtggagggcagcaccatcacaagcaggattaagaacttattgcggtcgcctagcattaagttgaggcgaagtaaggctggcaacagacgggaggacctctcatctaaagtgactctggaaaaagtgctggggatcactgtgtctggcggacggggtttggcatgtgatcctcgtagtggtttggttgcatatcctgcaggctgcgtcgtggttttgtttaatccgaggaagcataaacagcaccacattttaaattcttctagaaaaaccatcacagcactagccttttcccctgacggaaaatacttggtcaccggggaaagtggtcatatgccagctgtgcgggtctgggatgtcgccgaacactcgcaagttgcagaactgcaggagcacaagtacggcgtcgcttgcgttgctttctcacctagcgccaaatatattgtgagtgtcgggtaccagcacgatatgatcgtaaatgtctgggcgtggaaaaaaaatatagttgtagcgagtaacaaagtgtcttccagagtcactgctgtgagcttcagtgaggactgttcttatttcgtgactgcaggaaatagacatattaaattctggtacctggatgacagcaagacctccaaagttaatgccacggttcctctcctgggcagaagcgggttgttaggcgagttgaggaacaatctcttcactgatgtggcatgtggccgaggcaaaaaggctgacagtactttttgcatcacgagtagtggcttactctgcgaattttcggaccgcagactgctcgacaaatgggttgagctgcggactacagtggctcactgtatcagcgtaagtcaggattatatcttctgcgggtgtgccgacggcactgtccgcctcttcaatccttccaatcttcacttcttaagtaccctgccccgaccacacgcacttggcacagacatagcatctgtgacggaagcttctcgcctgttctcaggcgtcgcgaacgcaagatacccagataccatcgcgcttacctttgatcctactaaccagtggctgtcatgcgtttacaacgatcacagcatctacgtgtgggacgtgcgtgacccaaagaaagtcgggaaagtgtactccgccctctatcactccagttgcgtgtggtctgtggaagtctatccagaggtcaaagattccaaccaagcatgccttccaccctcttcttttatcacctgttcttccgacaatacaatccgcctttggaatactgagtcatctggcgtacacggaagtaccttacacaggaatattctttcttcagatctcattaaaataatttacgtggatggcaacacacaagccctgctggatactgaactacctggaggcgataaggcagacgcgtccctgttagaccctcgtgtcggaattcggtccgtctgcgtatctccaaatgggcaacacctggcctcaggtgatagaatgggaacccttcgcgtgcacgagctccagtctttgtctgagatgctcaaagtggaagcccacgacagcgagattctgtgcctcgagtacagcaagccagacaccgggttgaaacttctcgcctcagccagccgcgataggctgatccacgtccttgacgccggaagggagtatagtctgcagcagacattggatgaacattccagcagcattaccgcggtgaaatttgcagcgtcagacgggcaggtgcgtatgatcagctgcggggctgacaaatccatatattttcgcacagctcaaaagtcaggggacggggtgcagttcacaagaacacaccatgtggtgcgaaagacaaccttgtatgacatggatgtggagcccagttggaagtacaccgctattggatgccaggataggaatattaggattttcaacatctcgtcaggcaagcagaaaaagcttttcaagggctcccagggtgaggatggcacacttattaaggtgcagaccgacccatccgggatttatatcgccacctcatgtagtgataagaatttaagcatctttgacttcagcagtggggaatgtgttgccacgatgtttggccattcagagatcgtcactgggatgaaattcagtaatgattgcaagcatcttatctccgtatcaggtgatagctgcattttcgtttggaggctgagctccgagatgacaatttcaatgagacagagactggccgagctcaggcagcgacagcggggaggaaagcagcagggaccaagctccccccagagggcatctggtccaaaccgccatcaggcgccatccatgttgtccccagggcctgctctctcttccgatagcgacaaggagggagaggacgaggggactgaagaggagctcccagccttacccgtccttgccaagagtaccaaaaaagcactagcgtcagtccccagtccagcactgcccaggtccctgtctcattgggagatgagccgggctcaggagtctgtggggtttctggacccagcacccgcagcgaatcctggccctagacggaggggcagatgggtgcaacctggtgttgagctaagtgtgcggtctatgcttgacctaagacaacttgaaactttggcacccagtctgcaagacccaagccaggattcactggccattattccgtccggacctagaaagcacggccaggaggctctggagacaagtcttacctctcagaatgaaaagccaccacgaccacaggcttcacagccctgctcttaccctcatataattcgcttactgtcgcaggaagagggtgtgttcgcacaagatctggaacctgctccgattgaagatggcatcgtgtacccagagcctagcgacaacccaacaatggatactagtgagttccaagtgcaggctccagcacggggaactttaggaagagtttatcctggaagcagaagcagcgagaagcattctcctgatagcgcgtgcagcgtagactacagctccagctgtctgagctctccagaacatcccaccgaggatagcgaatccacagagcccctttctgtagatggcattagctccgatctcgaagagcctgcggagggtgacgaggaagaagaggaagaggagggagggatgggcccatatggcctgcaggaagggagcccacagaccccagatcaggaacagtttcttaaacaacactttgagaccctggcgagtggtgccgcacctggtgctccagtccaggttcccgagaggtccgagtccagatccatctcaagcaggtttcttctgcaggtgcagactcgacctctgcgtgaaccatcaccctcatcaagctcacttgctttaatgagcaggccggctcaggtgccccaggcaagtgagcctgctgtgtctctggaacaatgcgagcagctcgtggcagaactgagaggctctgttagacaggccgtcagattgtaccactccgtggccggatgtaaaatgccttccgccgagcagtcgcgaatcgctcagctcctgcgggataccttctcctccgtgcgacaggaactagaagcggtggcaggcgctgtcctcagcagcccgggatcgagccccggagccgtgggagcagaacagactcaggcgctgctggagcagtactcagaactactgcttcgggctgtagagcggagaatggagcggaagttgtag

SEQ ID NO: 94226 - protein, 2150 aa, Artificial Sequence
  derived and/or modified sequence
MNLDSLSLALSQISYLVDNLTKKNYRASQQEIQHIVNRHGPEADRHLLRCLFSHVDFSGDGKSSGKDFHQTQFLIQECALLITKPNFISTLSYAIDNPLHYQKSLKPAPHLFAQLSKVLKLSKVQEVIFGLALLNSSSSDLRGFAAQFIKQKLPDLLRSYIDADVSGNQEGGFQDIAIEVLHLLLSHLLFGQKGAFGVGQEQIDAFLKTLRRDFPQERCPVVLAPLLYPEKRDILMDRILPDSGGVAKTMMESSLADFMQEVGYGFCASIEECRNIIVQFGVREVTAAQVARVLGMMARTHSGLTDGIPLQSISAPGSGIWSDGKDKSDGAQAHTWNVEVLIDVLKELNPSLNFKEVTYELDHPGFQIRDSKGLHNVVYGIQRGLGMEVFPVDLIYRPWKHAEGQLSFIQHSLINPEIFCFADYPCHTVATDILKAPPEDDNREIATWKSLDLIESLLRLAEVGQYEQVKQLFSFPIKHCPDMLVLALLQINTSWHTLRHELISTLMPIFLGNHPNSAIILHYAWHGQGQSPSIRQLIMHAMAEWYMRGEQYDQAKLSRILDVAQDLKALSMLLNGTPFAFVIDLAALASRREYLKLDKWLTDKIREHGEPFIQACMTFLKRRCPSILGGLAPEKDQPKSAQLPPETLATMLACLQACAGSVSQELSETILTMVANCSNVMNKARQPPPGVMPKGRPPSASSLDAISPVQIDPLAGMTSLSIGGSAAPHTQSMQGFPPNLGSAFSTPQSPAKAFPPLSTPNQTTAFSGIGGLSSQLPVGGLGTGSLTGIGTGALGLPAVNNDPFVQRKLGTSGLNQPTFQQTDLSQVWPEANQHFSKEIDDEANSYFQRIYNHPPHPTMSVDEVLEMLQRFKDSTIKREREVFNCMLRNLFEEYRFFPQYPDKELHITACLFGGIIEKGLVTYMALGLALRYVLEALRKPFGSKMYYFGIAALDRFKNRLKDYPQYCQHLASISHFMQFPHHLQEYIEYGQQSRDPPVKMQGSITTPGSIALAQAQAQAQVPAKAPLAGQVSTMVTTSTTTTVAKTVTVTRPTGVSFKKDVPPSINTTNIDTLLVATDQTERIVEPPENIQEKIAFIFNNLSQSNMTQKVEELKETVKEEFMPWVSQYLVMKRVSIEPNFHSLYSNFLDTLKNPEFNKMVLNETYRNIKVLLTSDKAAANFSDRSLLKNLGHWLGMITLAKNKPILHTDLDVKSLLLEAYVKGQQELLYVVPFVAKVLESSIRSVVFRPPNPWTMAIMNVLAELHQEHDLKLNLKFEIEVLCKNLALDINELKPGNLLKDKDRLKNLDEQLSAPKKDVKQPEELPPITTTTTSTTPATNTTCTATVPPQPQYSYHDINVYSLAGLAPHITLNPTIPLFQAHPQLKQCVRQAIERAVQELVHPVVDRSIKIAMTTCEQIVRKDFALDSEESRMRIAAHHMMRNLTAGMAMITCREPLLMSISTNLKNSFASALRTASPQQREMMDQAAAQLAQDNCELACCFIQKTAVEKAGPEMDKRLATEFELRKHARQEGRRYCDPVVLTYQAERMPEQIRLKVGGVDPKQLAVYEEFARNVPGFLPTNDLSQPTGFLAQPMKQAWATDDVAQIYDKCITELEQHLHAIPPTLAMNPQAQALRSLLEVVVLSRNSRDAIAALGLLQKAVEGLLDATSGADADLLLRYRECHLLVLKALQDGRAYGSPWCNKQITRCLIECRDEYKYNVEAVELLIRNHLVNMQQYDLHLAQSMENGLNYMAVAFAMQLVKILLVDERSVAHVTEADLFHTIETLMRINAHSRGNAPEGLPQLMEVVRSNYEAMIDRAHGGPNFMMHSGISQASEYDDPPGLREKAEYLLREWVNLYHSAAAGRDSTKAFSAFVGQMHQQGILKTDDLITRFFRLCTEMCVEISYRAQAEQQHNPAANPTMIRAKCYHNLDAFVRLIALLVKHSGEATNTVTKINLLNKVLGIVVGVLLQDHDVRQSEFQQLPYHRIFIMLLLELNAPEHVLETINFQTLTAFCNTFHILRPTKAPGFVYAWLELISHRIFIARMLAHTPQQKGWPMYAQLLIDLFKYLAPFLRNVELTKPMQILYKGTLRVLLVLLHDFPEFLCDYHYGFCDVIPPNCIQLRNLILSAFPRNMRLPDPFTPNLKEIML

SEQ ID NO: 94227 - DNA, 6453 bp, Artificial Sequence
  derived and/or modified sequence
atgaacctcgatagcctttccttggccttatcacagatcagctacctggttgataacctcaccaagaaaaactatagagcctcacagcaggaaatccagcacattgtcaatcgacacggccctgaagctgacaggcacctgttaaggtgcctatttagccacgttgatttcagcggtgacgggaagtcctccgggaaggactttcaccaaactcagttcctgatccaggaatgcgctctgctcatcacgaagcctaacttcatctccactctgtcttatgccatagataacccactgcattatcaaaaatctctgaaaccagcccctcatctttttgcacagttgtctaaggtgctgaaactgagtaaggtgcaggaagtcatctttggactcgcgttgctgaacagctcctctagtgatcttcgaggctttgctgcacagttcattaaacagaagctgcctgatttgctccgctcctatatcgacgcagacgtctccggtaaccaagaagggggattccaggatatcgccatagaggtcctccatctgctcttgagccacctactgtttggccagaaaggagctttcggggtgggccaagagcagattgatgcgttcctgaaaacccttcgccgcgacttccctcaggaacgctgtcctgtagtgcttgcgccactgttgtatcctgaaaaacgggatattctgatggaccgcatcctgccagatagcggtggggtcgctaagacaatgatggagagctctcttgccgactttatgcaggaggtcggctacggtttctgtgcctcgattgaggagtgccggaatatcatagttcagttcggggtcagagaagtgacagctgcgcaggtagcccgagtactgggcatgatggcacgcacccactcgggccttaccgatggaataccattgcagagtataagtgcacccggctcaggtatttggtcagacgggaaggataaatccgacggtgcccaggcccatacctggaatgtggaggtgcttatagatgtcctgaaagaattgaacccgtcactcaacttcaaggaggtgacatacgagctcgaccacccaggtttccaaatcagagacagtaaggggttacataacgtggtatatgggattcagaggggcctgggtatggaggtatttcccgtggatctaatctatagaccttggaaacacgctgaaggccagttgtccttcatacaacattcactgatcaatccagagattttttgctttgccgattatccatgtcacaccgtcgccacagacattctcaaagccccccccgaagatgacaacagggagatcgctacctggaaatcactggatctcatcgaaagtcttctgcgactggctgaggtaggccagtatgaacaggtgaagcagctgttttcattcccaataaagcattgcccggatatgttagtgcttgcacttctgcagatcaatacctcctggcacaccttacgccacgaactgatcagcacactcatgccaatctttcttggaaatcaccccaatagcgctataatcttacactatgcatggcacggacagggccagtcaccaagcatccgacaactcatcatgcatgccatggcagaatggtacatgcggggcgagcagtatgaccaggcgaagctgagccggatcctcgatgtggcccaagaccttaaagcactatccatgcttctgaacggcactccttttgccttcgttattgatttagctgcacttgcatcaaggcgggagtacctgaagctggataaatggcttaccgacaagatccgtgagcacggtgagcccttcattcaggcttgcatgaccttcctgaaaaggagatgtccaagcatcctaggaggattggcgccagagaaggaccagcccaagagcgctcaactacctccagaaacactcgccacaatgctcgcctgtctgcaggcatgcgccgggagcgttagccaggagctctccgagacaatcctaacaatggtcgccaactgttctaatgttatgaacaaagcccgtcagccccctccgggcgtgatgcctaagggacgacctccatcagcttcctcactagatgctatatcaccagtacagatcgatccactagctggcatgactagcctgtctattggggggagcgcggcccctcacacacagtctatgcagggttttcctcccaatctgggaagtgcctttagtaccccgcagtctccagccaaggccttccccccactgagcactcccaatcaaaccactgctttctcaggcatagggggattatccagtcaattgcccgtagggggtctcggtactggcagtctgaccggcataggaaccggagctttaggactgccggcagttaataacgatccttttgtgcagagaaagttggggacaagtggtctgaaccagccaacattccaacagaccgacctttcacaggtgtggccagaagctaatcagcatttctccaaggaaatcgatgatgaggcaaattcctacttccagcgtatctataaccacccgccgcaccctacgatgtcagtcgacgaagttctcgagatgttgcagcggttcaaggacagcactatcaaaagagaaagagaggtgttcaactgtatgttacggaacctgttcgaggagtatagattttttccgcagtacccggataaggagctgcatatcacagcctgcctgtttggaggaattattgaaaaaggattggtgacctatatggcgctggggctagcattgcgctatgtcctggaggcgctccggaaacccttcggtagcaagatgtactattttggcattgccgccctggaccgctttaaaaaccgcctgaaggactacccacagtactgccagcacttggccagtatatcccacttcatgcagttcccacaccatctacaggaatacatagaatacggccagcagtcaagggatccccccgttaaaatgcaggggtctatcactacccccggcagtattgctctcgcccaggcccaggcacaggcccaggtgccggccaaagcgcctctcgctggccaagtgtctactatggtgaccacctcaacaacgaccactgtcgctaaaacagtgaccgtcacccgccccacaggcgtatcctttaaaaaagatgttccacccagcatcaacaccaccaatattgatacactgctggtggctacggaccagaccgaacgaattgtcgagccaccagagaatattcaggagaagattgccttcattttcaataatttgagccagagtaatatgacacagaaggtagaggaactcaaggagaccgtgaaggaggagttcatgccctgggtgagtcagtacctagttatgaaacgtgtgtctattgagcctaatttccattcactgtattctaattttcttgacactcttaagaaccccgagtttaacaaaatggtgctgaatgagacatataggaacattaaggtattactcacgtccgataaggcagctgcgaatttttcggaccgaagccttcttaagaacctgggccactggctgggaatgataactctggcaaaaaataaaccaatcttgcacactgacctcgatgttaagagtctgttactcgaagcttatgtcaagggacaacaagaattactgtatgtggttccgttcgtcgcaaaggtcttagaaagttctataaggagtgtcgtctttagaccgcccaacccttggactatggcgatcatgaacgtccttgccgagctccatcaggagcacgacctgaagttaaacctaaagttcgagatcgaagtcctatgtaaaaacctggccctggacatcaacgagcttaaaccaggcaatttgttaaaagacaaagaccgactcaaaaatctggatgaacagctatccgctccaaagaaggacgttaagcagccagaggagctaccccccatcacaacgacgaccacatcaacaacgccagctacgaatacgacgtgtaccgccactgtcccccctcagccccaatattcttatcacgacatcaacgtttattccctggctggccttgctcctcatatcaccctgaacccaacaatccccttgttccaggcccacccgcagctcaaacagtgcgtgagacaagccattgagagagccgttcaggagctggtacatccagtcgtggatcgttctatcaaaatcgccatgaccacttgcgagcagatagtgcgtaaggacttcgctttggactctgaagaatctcgcatgcggattgccgctcaccatatgatgcgtaatcttaccgctggcatggctatgataacctgccgggagcctctgctgatgagcatctcaacaaacctgaaaaacagctttgcctccgcgttgcgcaccgcatccccccagcagcgcgaaatgatggaccaagccgccgcacagctcgctcaggacaactgtgagctcgcctgttgctttatccagaaaacggctgtcgagaaggccggccctgagatggacaagaggctcgctactgagttcgaattgagaaaacatgccagacaggaaggtaggaggtattgtgatccagtcgtacttacctatcaggcggagcgaatgcctgaacagattcggcttaaggtaggtggagtggatcctaagcagctcgctgtgtacgaggagtttgctcggaacgtaccaggttttcttcctacgaacgatctctcccaacccacaggatttcttgctcagcccatgaagcaagcctgggccaccgatgacgtggcacagatctacgacaagtgcatcaccgagttggagcaacatctgcatgcgattcctcctaccctggcgatgaatccacaagcgcaagctttacgatccctcttggaagtggtggtcctgtcacgcaacagccgcgatgcaatagcggcccttggcctgttgcaaaaggcagtcgaaggcctgcttgatgcaaccagcggtgccgacgctgacttgctactgcggtatagagagtgccatcttctggtgctaaaagcattacaggacggccgggcctatgggtccccctggtgcaacaagcaaatcacaagatgtctcattgagtgtagagacgaatacaaatataacgtggaagccgtggaactactgatcaggaaccacctcgttaatatgcagcagtacgatctgcacttggcgcagagtatggagaacggcctgaattacatggccgtggcattcgcaatgcagctagttaaaatcctgttagtggatgaaaggtctgtcgcacatgtgaccgaggcagatctgttccatacaatagaaactctcatgaggatcaacgctcattcaagagggaacgcccccgaagggttgcctcagctcatggaggtggtcagaagtaactatgaggccatgatcgaccgagcccatgggggtccaaacttcatgatgcatagcggcataagtcaggctagcgagtatgacgatccacctggattgcgcgagaaagcggagtacctccttcgcgagtgggtcaacctgtaccactctgccgcagcaggtcgcgacagtactaaagcgttctccgcatttgtgggacagatgcaccagcagggtatcctgaagacagacgacctcattacccggtttttcaggctctgcacggagatgtgtgtggaaattagttatcgcgcccaggccgagcaacaacacaatcccgcagcgaaccccaccatgattagagcaaagtgctaccataaccttgatgcttttgtcagactcattgctctgctagtgaaacattcaggcgaagctaccaatactgtgaccaaaattaacctactgaacaaagtgttaggcatcgtcgtgggcgttctgctgcaggatcacgatgtacgccaatccgaattccagcagttaccatatcaccgaatattcatcatgctcctcttggagttgaacgcacctgagcatgtgcttgagacaatcaacttccagactttgacggctttctgtaacacatttcacatccttcggcctaccaaagcgccggggttcgtctacgcatggctggagctgattagccacaggatcttcatcgcaagaatgcttgcacacacaccgcagcaaaaagggtggccgatgtacgcccagctgctgattgatttgtttaagtacttggctccatttcttagaaacgtggagttaactaaacccatgcagatcttgtacaaaggtacattacgggtcttgttagtcctgctccatgatttcccagagtttctttgcgattatcattatggcttttgcgacgtgattcccccgaactgtatacagttaaggaatctcatactgtcagctttcccaagaaacatgcgcctgcccgaccccttcactccaaatctgaaggaaatcatgttgtag

SEQ ID NO: 94228 - DNA, 951 bp, Artificial Sequence
  derived and/or modified sequence
atgctgctgttggagttgaacgcaccagaacacgtcctggagacgataaactttcagactttgacagccttttgtaacacattccatattctgagacccacaaaggcacctggattcgtgtacgcctggctggagctgatcagccaccggatctttattgcaagaatgttagcacatacaccgcagcaaaagggctggccaatgtacgctcagctgctcatcgatctgttcaagtacttggccccctttctgaggaacgtggagctcaccaagcctatgcagatcctctacaagggtacactccgagtgctgttggtgctgctgcacgactttcccgagttcctgtgcgattaccactacggtttctgtgacgtcatcccacctaattgtatacagctgcgcaatctcatccttagcgcattccctaggaacatgcggcttcccgatccctttacccccaatctgaaggttgacatgctgtcagagattaatatcgccccccggattctgaccaacttcactggcgtgatgccacctcaatttaaaaaggaccttgatagttacctgaagacgcggtcaccagtgacatttcttagtgacttgcgctccaacctgcaggtttccaatgagcccggcaataggtacaatttgcagttgatcaatgctctcgttctctacgtcgggacccaggccattgcacacatccacaacaaggggtcaacacccagtatgagtacgatcacacattccgcccacatggacatatttcagaatctggctgtagacctagataccgaaggaaggtacctgttcctgaatgccattgccaatcaatcaggcacacagatcgccacactgactacatcagtggcaccctgttgtacattcttgcaacgccctatccgcaaaccttcaaagaatcgctcacaggagttcagctggaatggatag

SEQ ID NO: 94229 - DNA, 6453 bp, Artificial Sequence
  derived and/or modified sequence
atgaacctggacagcctgagcctggccctgagccagatctcctacctggtggacaacctgaccaagaagaactaccgggccagccagcaggagatccagcacatcgtgaacagacatggccctgaggccgacagacacctgctgcgctgcctcttcagccacgtggacttctctggagatggcaagagcagcggcaaggacttccaccagacccagttcctgatccaggagtgtgccctgctgatcaccaagcccaacttcatcagcaccctgtcctatgccatcgacaaccccctgcactaccagaagagcctgaagccagccccccacctgtttgcccagctgagcaaggtgctgaagctgagcaaggtgcaggaggtgatcttcggcctggccctgctgaacagcagcagcagtgacctgcggggctttgctgcccagttcatcaagcagaagctgcctgacctgctgcggagctacattgatgctgatgtgtctggcaaccaggagggcggcttccaggacatcgccatcgaggtgctgcacctgctgctgagccacctgctgtttggccagaagggggccttcggcgtgggccaggagcagattgatgccttcctgaagaccctgcggcgggacttcccccaggagcgctgccctgtggtgctggcccccctgctgtacccagagaagagggacatcctgatggaccgcatcctgcctgattctggaggagtggccaagaccatgatggagagcagcctggccgacttcatgcaggaggtgggctacggcttctgtgccagcattgaggagtgcaggaacatcatcgtgcagtttggagtgcgggaggtgacagctgcccaggtggcccgggtgctgggcatgatggcccggacccacagcggcctgacagatggcatccccctgcagagcatcagcgcccctggcagcggcatctggagcgatggcaaggacaagagtgatggagcccaggcccacacctggaatgtggaggtgctgattgatgtgctgaaggagctgaaccccagcctgaacttcaaggaggtgacctatgagctggaccaccctggcttccagatccgggacagcaagggcctgcacaacgtggtgtatggcatccagaggggcctgggcatggaggtgtttcctgtggacctgatctaccggccctggaagcacgccgagggccagctgtccttcatccagcacagcctcatcaaccctgagatcttctgctttgctgactacccctgccacacagtggccacagacatcctgaaggcccccccagaagatgacaaccgggagatcgccacctggaagagcctggacctgattgagagcctgctgcggctggccgaggtgggccagtatgagcaggtgaagcagctgttctccttccccatcaagcactgcccagacatgctggtgctggccctgctgcagatcaacacctcctggcacaccctgcggcatgagctgatcagcaccctgatgcccatcttcctgggcaaccaccccaacagcgccatcatcctgcactacgcctggcacggccagggccagagccccagcatccggcagctgatcatgcacgccatggccgagtggtacatgagaggagagcagtatgaccaggccaagctgagccgcatcctggatgtggcccaggacctgaaggccctgtccatgctgctgaatggcaccccatttgcctttgtgattgacctggccgccctggccagcagaagagagtacctgaagctggacaagtggctgacagacaagatccgggagcacggggagcccttcatccaggcctgcatgaccttcctgaagaggcgctgccccagcatcctgggcggcctggcccctgagaaggaccagcccaagagcgcccagctgcccccagagaccctggccaccatgctggcctgcctgcaggcctgtgccggctctgtgtcccaggagctgtctgagaccatcctgaccatggtggccaactgcagcaatgtgatgaacaaggcccggcagcccccacctggggtgatgcccaagggccggcccccatctgccagcagcctggatgccatcagccctgtgcagattgaccccctggccggcatgaccagcctgagcatcggcggcagcgctgccccccacacccagagcatgcagggcttcccccccaacctgggcagcgccttcagcaccccccagagccctgccaaggccttcccccccctgagcacccccaaccagaccacagccttctctggaattggaggcctgagcagccagctgcctgtgggcggcctgggcaccggcagcctgactggaattggaactggagccctgggcctgcctgctgtgaacaatgacccctttgtgcagaggaagctgggcaccagcggcctgaaccagcccaccttccagcagacagacctgagccaggtgtggccagaggccaaccagcacttcagcaaggagattgatgatgaggccaacagctacttccagaggatctacaaccaccccccccaccccaccatgtctgtggatgaggtgctggagatgctgcagcgcttcaaggacagcaccatcaagcgggagcgggaggtgttcaactgcatgctgaggaacctgtttgaggagtaccgcttcttcccccagtacccagacaaggagctgcacatcacagcctgcctgtttggaggcatcatcgagaagggcctggtgacctacatggccctgggcctggccctgcgctacgtgctggaggccctgaggaagcccttcggcagcaagatgtactacttcggcattgctgccctggaccgcttcaagaaccggctgaaggactacccccagtactgccagcacctggccagcatcagccacttcatgcagttcccccaccacctgcaggagtacattgaatatggccagcagagccgggacccccctgtgaagatgcagggcagcatcaccaccccaggcagcatcgccctggcccaggcccaggcccaggcccaggtgcctgccaaggcccccctggccggccaggtgtccaccatggtgaccaccagcaccaccaccaccgtggccaagacagtgacagtgacccggcccactggagtgtccttcaagaaggatgtgccccccagcatcaacaccaccaacatcgacaccctgctggtggccacagaccagacagaaagaattgtggagcccccagagaacatccaggagaagatcgccttcatcttcaacaacctgagccagagcaacatgacccagaaggtggaggagctgaaggagaccgtgaaggaggagttcatgccctgggtgtcccagtacctggtgatgaagagggtgtccattgagcccaacttccacagcctgtacagcaacttcctggacaccctgaagaaccctgagttcaacaagatggtgctgaatgagacctacagaaacatcaaggtgctgctgaccagtgacaaggccgccgccaacttcagtgacaggagcctgctgaagaacctgggccactggctgggcatgatcaccctggccaagaacaagcccatcctgcacacagacctggatgtgaagagcctgctgctggaggcctacgtgaagggccagcaggagctgctgtatgtggtgccctttgtggccaaggtgctggagagcagcatccgctctgtggtgttccggccccccaacccctggaccatggccatcatgaatgtgctggccgagctgcaccaggagcatgacctgaagctgaacctgaagtttgaaattgaggtgctgtgcaagaacctggccctggacatcaatgagctgaagccaggcaacctgctgaaggacaaggaccggctgaagaacctggatgagcagctgagcgcccccaagaaggatgtgaagcagcctgaggagctgccccccatcaccaccaccaccaccagcaccaccccagccaccaacaccacctgcacagccaccgtgcccccccagccccagtacagctaccatgacatcaacgtgtacagcctggccggcctggccccccacatcaccctgaaccccaccatccccctcttccaggcccacccccagctgaagcagtgtgtgcggcaggccatcgagagagctgtgcaggagctggtgcaccctgtggtggacaggagcatcaagatcgccatgaccacctgtgagcagatcgtgaggaaggactttgccctggacagcgaggagagcaggatgagaattgctgcccaccacatgatgaggaacctgacagctggcatggccatgatcacctgccgggagcccctgctgatgagcatcagcaccaacctgaagaacagctttgccagcgccctgaggacagccagcccccagcagcgggagatgatggaccaggccgccgcccagctggcccaggacaactgtgagctggcctgctgcttcatccagaagacagctgtggagaaggccggccctgagatggacaagaggctggccacagaatttgagctgaggaagcacgcccggcaggagggccgccgctactgtgaccctgtggtgctgacctaccaggccgagaggatgcctgagcagatccggctgaaggtgggcggcgtggaccccaagcagctggccgtgtatgaggagtttgccagaaatgtgcccggcttcctgcccaccaatgacctgagccagcccaccggcttcctggcccagcccatgaagcaggcctgggccacagatgatgtggcccagatctatgacaagtgcatcacagagctggagcagcacctgcacgccatcccccccaccctggccatgaacccccaggcccaggccctgcggagcctgctggaggtggtggtgctgagcaggaacagcagagatgccatcgccgccctgggcctgctgcagaaggctgtggagggcctgctggatgccaccagcggggctgatgctgacctgctgctgcgctaccgggagtgccacctgctggtgctgaaggccctgcaggacggccgggcctacggcagcccctggtgcaacaagcagatcacccgctgcctgattgaatgtagagatgagtacaagtacaacgtggaggccgtggagctgctgatccggaaccacctggtgaacatgcagcagtatgacctgcacctggcccagagcatggagaatggcctgaactacatggctgtggcctttgccatgcagctggtgaagatcctgctggtggatgagaggtctgtggcccacgtgacagaagctgacctcttccacaccatcgagaccctgatgaggatcaatgcccacagcagaggaaatgcccctgagggcctgccccagctgatggaggtggtgcgcagcaactatgaggccatgattgaccgggcccacggcggccccaacttcatgatgcacagcggcatcagccaggcctctgaatatgatgaccccccaggcctgcgggagaaggccgagtacctgctgcgggagtgggtgaacctgtaccacagcgctgctgctggccgggacagcaccaaggccttcagcgcctttgtgggccagatgcaccagcagggcatcctgaagacagatgacctgatcacccgcttcttccggctgtgcacagagatgtgtgtggagatctcctaccgggcccaggccgagcagcagcacaacccagctgccaaccccaccatgatccgggccaagtgctaccacaacctggatgcctttgtgcggctcatcgccctgctggtgaagcacagcggggaggccaccaacacagtgaccaagatcaacctgctgaacaaggtgctgggcatcgtggtgggcgtgctgctgcaggaccatgatgtgcggcagagcgagttccagcagctgccctaccaccgcatcttcatcatgctgctgctggagctgaatgcccctgagcacgtgctggagaccatcaacttccagaccctgacagccttctgcaacaccttccacatcctgcggcccaccaaggcccctggctttgtgtatgcctggctggagctgatcagccaccgcatcttcatcgccaggatgctggcccacaccccccagcagaagggctggcccatgtatgcccagctgctgattgacctcttcaagtacctggcccccttcctgagaaatgtggagctgaccaagcccatgcagatcctgtacaagggcaccctgcgggtgctgctggtgctgctgcatgacttccctgagttcctgtgtgactaccactacggcttctgtgatgtgattcctcccaactgcatccagctgaggaacctgatcctgagcgccttccccaggaacatgaggctgcctgaccccttcacccccaacctgaaggagatcatgctgtag

SEQ ID NO: 94230 - DNA, 951 bp, Artificial Sequence
  derived and/or modified sequence
atgctgctgctggagctgaatgcccctgagcacgtgctggagaccatcaacttccagaccctgacagccttctgcaacaccttccacatcctgcggcccaccaaggcccctggctttgtgtatgcctggctggagctgatcagccaccgcatcttcatcgccaggatgctggcccacaccccccagcagaagggctggcccatgtatgcccagctgctgattgacctcttcaagtacctggcccccttcctgagaaatgtggagctgaccaagcccatgcagatcctgtacaagggcaccctgcgggtgctgctggtgctgctgcatgacttccctgagttcctgtgtgactaccactacggcttctgtgatgtgattcctcccaactgcatccagctgaggaacctgatcctgagcgccttccccaggaacatgaggctgcctgaccccttcacccccaacctgaaggtggacatgctgtctgagatcaacatcgccccccgcatcctgaccaacttcaccggggtgatgccaccccagttcaagaaggacctggacagctacctgaagaccaggagccctgtgaccttcctgagtgacctgcggagcaacctgcaggtgtccaatgaacctggcaaccgctacaacctgcagctgatcaatgccctggtgctgtatgtgggcacccaggccatcgcccacatccacaacaagggcagcacccccagcatgagcaccatcacccacagcgcccacatggacatcttccagaacctggccgtggacctggacacagagggccgctacctgttcctgaatgccatcgccaaccagagcggcacccagatcgccaccctgaccacctctgtggccccctgctgcaccttcctgcagaggcccatcaggaagcccagcaagaacagaagccaggagttctcctggaatggatag

SEQ ID NO: 94231 - DNA, 6453 bp, Artificial Sequence
  derived and/or modified sequence
atgaacctggacagcctgagcctggccctgagccagatcagctacctggtggacaacttaactaagaaaaactacagggcaagtcagcaggagatccagcatattgttaatagacacgggcctgaggccgatcgacacctgctgaggtgcctgtttagccatgtggacttttcgggtgacggaaaatcttctggtaaggactttcaccagacgcagttcctcattcaggagtgtgctttactgatcacaaagcccaattttatcagcactctgtcttatgccatagataatcctctccactaccaaaagtccctcaaacctgctccccacttatttgcacagctgtccaaagtcctcaagttaagtaaagtgcaggaagtcatctttgggctcgcactcctgaactcatcttccagcgatcttaggggctttgctgcccaatttatcaaacagaagctgccggatctgctgcgttcttacatcgatgctgatgtgagcggcaaccaagaggggggctttcaagatattgcaattgaggtattacaccttttattgagccacttgctcttcggccaaaagggagctttcggggtggggcaggaacagatagatgccttcttgaaaactctgcggcgtgactttcctcaggagcgatgtccggtagtgcttgcgccattgctctacccagagaagcgagacattttgatggacaggatactaccggacagcggcggcgttgccaaaacgatgatggagtcgtccctcgcggacttcatgcaagaggtgggatacggtttctgcgcatcaatcgaagagtgtcgtaatataatcgtccagtttggtgtcagagaagttacggccgctcaggtggcccgagttttaggaatgatggcccgcacccattcaggcctaacagacggcataccgctccagtcgatttcagcgcccggaagcggcatttggtcggacggcaaagataagtcagacggcgcccaagcgcatacctggaacgtggaggtgctaatcgacgtgcttaaggagcttaacccaagcctgaactttaaagaggtaacttatgagctcgaccacccaggttttcagatcagggactcgaagggactgcacaatgtggtatatggaatccaaaggggactgggaatggaggtgttccccgtggatctgatttaccggccttggaaacacgctgagggccagctaagttttattcaacactccctgataaatccagagatcttttgttttgcagactatccctgccatacagtggccacggacatcctgaaagcccccccggaggacgataaccgagaaattgcgacgtggaagtcactcgacctgatcgagtccctattgagattagctgaggtgggccagtacgaacaggtgaaacaactgttttcctttccaatcaaacactgtcccgacatgctcgtgctggctttattgcagattaacacctcatggcacactctgagacacgagctgatttccacactgatgcccatttttctgggcaaccacccaaactccgccattatcctccactacgcatggcacggtcagggacagtccccttccatcaggcagctgatcatgcatgccatggctgagtggtacatgcggggcgagcagtacgaccaggccaagttgtccagaatactggatgtcgcgcaagacctgaaggcactgtccatgctgctcaacgggacaccgtttgcctttgtcattgacctggccgcgctcgcatcgaggcgagagtacttgaaactggacaagtggttgacagacaagatcagagagcacggtgaaccctttatccaggcatgcatgaccttcttgaagcgacgctgtccatccattctaggtgggcttgctcctgaaaaggatcagccaaaatctgcccagctgcctcctgaaaccctggccacaatgctggcctgcctccaggcctgcgctggcagcgtatcacaggagttgtcggaaacaatcctcacgatggtggctaattgctctaatgtcatgaataaggcccggcagcccccaccgggagtcatgcccaaagggcgccctcccagcgccagcagcctagatgctataagccccgtgcagatcgacccactggctgggatgacctccttgtctatcggtggcagtgcagcacctcacacccagagtatgcagggatttccacccaacttgggcagtgccttttcaaccccgcaatctcctgcaaaggcctttcccccactgtccacacccaatcagaccacagccttctcaggaattggaggattgagcagtcagttacccgtcggtggtttaggcaccggttctttgaccggcattggcacaggtgcattggggttgccagctgtcaataacgacccatttgtccaaagaaaacttggaacttccgggttaaaccagcccaccttccagcagactgacctttctcaggtatggccggaagcgaatcagcacttttctaaagagattgacgatgaagccaatagctacttccagagaatatataatcacccaccacacccgactatgtcagtagacgaagtcttggagatgctgcagcggttcaaagatagcactattaaaagagagcgcgaggttttcaattgcatgctgcgaaatttgttcgaggagtaccgcttttttccacaatatccagataaggagctccatataactgcctgcttgtttggcggaatcatcgaaaagggactcgtgacctacatggctctgggtctagctcttcgatacgttctcgaagcactgcgaaaacccttcggatccaagatgtactattttggtatcgcggcccttgaccgcttcaagaacagactaaaagattatccacagtactgtcaacatcttgcatccatatctcactttatgcaatttccacaccacctacaggaatacatcgaatatggacagcagtcgagggacccccccgtaaagatgcagggatccatcacaactcccgggagcattgccctggcccaggcacaggcacaagctcaggtgcctgcaaaggctccgctggccggccaggtgtccacaatggtaacaaccagcaccacaacaacggtagcgaaaactgttaccgtaacccgccctaccggagtgtctttcaaaaaagacgtgcccccctccatcaacaccacaaatattgacactctgctggtggccaccgatcaaactgagcgcattgttgaacctccagaaaatattcaagaaaaaatcgccttcatttttaataatctctcacagagcaatatgacacaaaaggtggaggagctgaaggaaacagtgaaagaagagttcatgccgtgggtttcccagtacctggtaatgaagcgtgtgtccatcgagcccaatttccatagcctttattcgaatttcctcgacacccttaaaaatcctgaatttaataagatggtccttaatgagacatacaggaacataaaggtgctcctcacgagcgacaaagccgccgcaaatttctcagatcgcagcttgctaaagaacctggggcactggctgggcatgataacactcgccaagaataagcctattttgcacactgatctcgacgtcaaatccctactgctggaggcctatgtcaagggtcagcaggaacttctgtacgttgtgccattcgtagcaaaggtcctagagagttcgatccgctcagtcgtgtttcggccacccaatccttggacaatggccatcatgaatgttctggcggaactccaccaggagcatgatctcaagctaaatctgaagtttgagattgaggtcctgtgcaaaaatcttgctcttgacattaatgagttgaagcccggcaatctgttgaaggataaggaccgccttaagaacctggacgagcagctgagcgccccaaagaaagatgtgaagcagccagaggagttgcctcctatcacgactacaaccacatccacaacaccggccacaaatactacttgcacggctacagtgcccccacagccacaatattcataccatgatatcaatgtgtacagtctagccggcttggctccccacatcaccctcaatccgactattcctctcttccaggcccaccctcaacttaagcagtgtgtgcggcaggcgattgagagagctgtacaggagctggtgcatccagtagtggaccgaagcattaaaatcgcaatgaccacttgcgaacagatcgtccgaaaggacttcgcgctggattcagaagaatctagaatgcgcattgctgcacatcatatgatgaggaaccttaccgccggcatggccatgattacttgcagagaacctctgctcatgagcatttcaacaaacctgaaaaacagctttgctagtgctttgaggaccgcctcaccacagcaacgggaaatgatggaccaggcggccgcccaactggcccaggataactgcgaacttgcctgttgcttcattcaaaagacagccgtcgagaaagccggcccggaaatggacaagcggctagctaccgagtttgagttaaggaaacatgccagacaagagggccggcggtactgcgatccagtggtgctaacataccaggctgagaggatgcctgaacagatacgtctgaaggtggggggagtggaccccaaacagctggcagtttatgaggagtttgcacgtaatgtgccagggttcctccctacaaacgacctgagccagccaactggatttctggctcaaccgatgaagcaggcttgggccaccgacgatgtcgcccagatttacgacaaatgtatcaccgaattggagcaacacctgcacgcaattccacctactcttgccatgaaccctcaggcccaagcactgaggtcactgctcgaggttgtggtcctgagcaggaactcccgcgacgctatcgcggctctgggactgctgcaaaaggccgtcgaagggcttctggatgccaccagtggggcggacgctgacctgctgcttcgctatagagaatgtcatttgctggtcctgaaggccctgcaggatggacgcgcctatggtagcccgtggtgcaacaagcagattacaaggtgtctgattgaatgtagggacgagtacaaatacaacgtagaagcggtcgaactccttattcgtaaccacctggtgaatatgcagcagtacgatcttcatctggctcaatccatggaaaatgggctcaactacatggctgtggctttcgctatgcagctcgtcaaaatactcctggtggatgagcggtccgtggcccacgtcaccgaggccgacctgtttcacactatcgagacgctgatgcggattaatgcccactcccgagggaatgcacccgagggactgcctcagcttatggaggtcgttaggtctaattacgaagccatgatagatagagcccacggggggccaaatttcatgatgcatagcggcatttcacaggctagtgagtatgacgatccacccggtcttcgggagaaggccgaatatttactgcgcgagtgggtaaacttgtatcattccgccgcagctgggcgcgatagtaccaaggcttttagtgctttcgtcggccagatgcatcagcaaggcatactgaagactgatgatctgatcacaagatttttccgtctctgcacagaaatgtgcgtggagatctcatacagagctcaggccgagcagcagcataatcccgctgccaatccaactatgattcgagctaagtgctatcataacctcgatgcattcgtgcggcttatcgcgttgctggtgaagcacagtggcgaggccactaacaccgtcacaaagatcaatctgttgaacaaagtgctcgggattgtggttggcgttctgcttcaagaccatgatgtccggcagtctgaattccagcaactgccctaccatagaatctttatcatgctactgttggagctcaatgcacccgagcacgtcctagagacgattaacttccagaccctgaccgccttctgcaacactttccacatcctccggcctacaaaggcccctggttttgtttatgcctggctggagctaataagtcataggatttttattgcgcgcatgctggcgcataccccccaacagaagggctggccaatgtatgctcagcttctgattgatctgttcaagtaccttgctccattcctgcggaacgtcgaacttaccaaaccaatgcagatactgtataagggcactctgagagtgctcttggtcttattgcatgactttccagaatttttgtgtgattaccattacggcttttgcgatgtaatcccacctaattgtattcagttgagaaacctgatcctgtcagcctttccgaggaatatgcgcctgcctgacccttttaccccgaacctgaaggagattatgctgtag

SEQ ID NO: 94232 - DNA, 951 bp, Artificial Sequence
  derived and/or modified sequence
atgctgctgctggagctgaacgcccccgagcacgtgctggagaccatcaactttcagacacttactgccttttgcaataccttccacatcctgaggcccactaaagccccaggcttcgtgtacgcctggctggagcttatcagccatcggatcttcatcgcaagaatgctagcacatactccgcaacagaaaggatggccaatgtatgcccagctgttgatagatttattcaaatatctggcacctttcctccgaaacgtcgaactgacaaaacccatgcagattctgtataaagggactctgcgtgttttgctggtgttactgcacgactttccagaattcctgtgcgactaccattacggcttttgcgatgtgattccacctaactgtattcagttaaggaatctcattctctccgctttccctagaaacatgcggcttcctgatccttttacccctaacttgaaagtggacatgctctccgagatcaacatcgccccccggattctcaccaactttacaggcgttatgccacctcagttcaagaaggacctcgactcctacctcaagaccagatcccctgtcactttcctgagcgatctgcgtagtaaccttcaagtctccaacgaacccggcaaccgctataacctccaattaatcaacgctctggtgctgtatgtgggaacccaagccatcgcccatatccacaataagggatctaccccaagtatgtccaccatcacgcacagtgcacacatggatatttttcagaacctggcagtcgacctggacaccgaaggcaggtatttgttcctgaatgctatcgccaatcagtccgggacccaaattgcaaccctcaccaccagcgtagcgccatgctgtacattcctacaaaggccaatccgaaaaccatcgaagaacaggagccaagagtttagttggaacggatag

SEQ ID NO: 94233 - DNA, 6452 bp, Artificial Sequence
  derived and/or modified sequence
atgaatttggactctttgtctctggctctctctcaaatttcctacctggtggacaacctgaccaaaaagaactacagggccagccagcaggagatacaacacatcgtcaacaggcatgggcctgaagccgaccggcatctgttgagatgccttttttctcacgtggacttttcaggggacggtaaaagttccgggaaggacttccaccaaacgcaattcctgatccaggaatgtgccctgctgataacaaaaccaaactttatctctaccctctcttacgcaatcgacaatccactgcattatcagaagtctttgaagcccgctccccacctttttgcccaactgtccaaggttctcaaattatctaaggttcaggaggtgatttttggccttgccctgttgaactccagctcgagcgacctcaggggctttgccgcacagtttattaaacagaaattgccagacctgctccgatcttatatcgatgccgacgtctccggtaaccaggaggggggtttccaagatatagcgatcgaggttctgcacctgctgctgagtcacctgctgttcggccagaaaggtgccttcggcgtgggccaggaacagattgacgctttcctgaaaaccctccggagggatttcccacaggagcgatgtcccgtggttctggctcctctgctctatccggaaaagcgagatattttgatggaccggatcttgccggactctggaggagtcgccaagactatgatggagagttccttagccgattttatgcaagaagtcggttacgggttttgtgcctctatcgaagaatgtcggaatattatcgtgcagttcggtgtaagagaggtaacagcagctcaggtggctcgagttctgggaatgatggccagaacccattctggcttgaccgatggtatcccattacagtctatctccgccccaggtagcggcatctggtctgatggtaaggataagagcgatggggctcaggcccatacctggaacgtcgaggtgcttatcgatgtgttgaaggagctgaatccctctctgaatttcaaggaagttacttacgagctggaccaccccggatttcagattcgcgattccaaggggctgcacaatgtagtgtacggtattcagcgcggactgggtatggaggtctttccagtggatcttatctatcgtccgtggaagcacgccgagggccagctgtcttttattcagcactcgttgatcaaccccgaaatcttttgtttcgctgactatccctgtcacactgtggctacagacatcttgaaggcaccccctgaggacgacaacagggaaattgcgacctggaaaagcctggatctgatcgagtccttgctcagactggccgaagtggggcaatacgagcaagttaagcagctcttttccttccccattaagcactgccctgacatgcttgttcttgctttgctccaaattaacacgtcctggcacaccttacgtcatgaattgatctctactctcatgcctatcttcctcggaaaccacccaaactcagcaatcatcttgcactatgcctggcatgggcaaggacagtcaccttcaataagacaactgataatgcatgccatggccgaatggtatatgcgcggagagcagtatgaccaggctaaattatcaaggattctggacgttgcccaagatttgaaagccctgagcatgcttttgaatgggacaccttttgctttcgtcatcgatttggcagcgctggcctctcggcgagaatacctgaaattggataaatggctgacagacaagattcgagagcacggcgaaccttttatccaggcatgcatgacttttcttaagagaaggtgcccttctatcctgggaggactcgcccctgagaaggatcaacccaaaagcgcacagctgccccctgaaacgctggccacaatgctagcatgcttgcaggcctgtgccggtagcgtcagtcaggaactctcagagactattttgactatggtggccaattgtagcaatgtgatgaacaaggccagacagccacctccaggggtaatgcccaaaggtaggcctcccagcgcctcttcgctggacgcaattagtcctgtgcagattgacccgctcgctggtatgacttctctcagtatcggcggatccgccgcaccccacactcagagcatgcagggctttccgccaaatttgggttcagctttctctaccccccaatcaccagccaaagccttcccccctctatcgacacccaaccagactacagccttcagcgggatcggagggttgtcaagtcaactgcctgtgggcggacttggcacagggtcgttaaccggaattgggacaggggctctaggccttccagctgtaaataacgatccatttgtgcagagaaagctgggaacctccggtctgaaccagcccaccttccagcaaactgacctttcccaggtttggcctgaagcgaatcagcacttctccaaagagatcgatgacgaagccaactcttactttcagcgcatctacaatcatcctccccacccgacgatgtctgttgatgaggttctggaaatgctgcagagattcaaagactccacaatcaaaagggagagagaagtcttcaactgcatgttgagaaacctgtttgaagaatatcgattcttcccccagtacccagataaggaactgcatatcaccgcatgcctgttcggcggtattatcgaaaagggattggtgacgtatatggctctaggcttagccctgaggtatgttttggaagccttgcggaaaccattcggctcgaagatgtattacttcgggatcgccgcactggatcgctttaaaaacagattgaaagactatccgcagtattgtcagcacctggcctctatcagtcatttcatgcagttccctcaccatctgcaggagtacattgaatacggtcagcaaagtcgcgacccccctgtgaagatgcaaggttcaattacaacacctggatccatagccctcgctcaggcccaagcgcaggctcaagtgcccgctaaagctcccctagccggtcaggtaagtacaatggtcaccaccagtaccaccactactgtggccaaaacggtgacggtgacaaggccgacaggggtgtccttcaaaaaagacgtccccccttcaatcaatactacaaatattgacacactcttagtggccactgatcagactgaacggattgttgaacctcccgaaaacatacaggaaaaaatagccttcatcttcaacaatctatcacagagtaatatgacacagaaggttgaggaactgaaggagacagtgaaagaagaattcatgccatgggttagtcagtacctcgttatgaagagagtgtctatcgagcccaatttccactccctttattccaactttctcgacacgttgaaaaaccccgaattcaacaagatggtcttgaatgaaacatatagaaacatcaaagtgctgttgactagtgataaagccgctgctaactttagtgacagatcgctgctcaaaaatcttgggcactggttgggcatgattacactcgccaaaaataaaccgatcctgcatacagacctggacgtcaaatcccttctgctcgaggcctacgtgaaagggcagcaggagctgctttatgtcgtgccctttgttgctaaagtactcgaatcttcgattcgttccgtagtgtttaggcccccaaatccctggaccatggctatcatgaacgtattggctgaattacaccaggagcacgacctgaaattgaacctgaagttcgagatcgaagttctgtgtaaaaaccttgctctggatattaacgaactgaagcctggcaacctgcttaaggacaaggatcgcttgaagaatctcgacgagcagctgagcgcacccaaaaaagatgtgaagcagcccgaggagctgcctccaataaccaccacgactacttctacaaccccagccacgaacacgacctgtaccgccaccgtgcctcctcagccccagtattcctaccatgacatcaatgtttacagcctggcaggtcttgcccctcacattaccctgaaccccaccatcccacttttccaagcacatccacagctgaaacagtgtgtacggcaggccatcgaacgcgctgtgcaggagctggtacaccctgtagtcgacaggtctatcaagattgccatgaccacctgtgagcaaattgtccggaaggacttcgccctagactccgaagagagcagaatgcgtattgccgcacatcacatgatgcgcaaccttaccgctggaatggctatgattacttgcagagagccgctgcttatgagcataagcacaaatctgaagaactcgttcgcttctgccttgaggacagcgtctccacagcagagggagatgatggatcaggctgccgctcaactggctcaagataattgcgagttggcttgttgtttcattcagaaaacagctgtcgaaaaagccggtcctgaaatggacaaacggttagccacggagttcgagctgcgtaagcacgctcggcaagaggggaggcggtattgcgatcctgtagtcctgacttaccaggctgagaggatgcccgaacagatccggctgaaagtgggcggagtggatccaaagcaactagccgtgtatgaggaattcgcgagaaacgtgcctggattcctgcctaccaacgacctgtcacagcccacaggttttcttgcccaaccaatgaagcaggcctgggctacagacgacgttgcccagatctacgataaatgcattaccgagctagagcaacacctgcacgctatcccccctacattagcaatgaatccacaagctcaggccttacgctccctgctggaagtggtagttttgtcccggaactcccgcgatgccattgcagccttgggactgctccagaaggcggtcgagggactattagatgcaacatctggcgctgatgcggatcttctcctgcgctaccgggagtgtcatcttctggtcttgaaggcactgcaggatggcagggcatacggctctccttggtgcaataaacagattacacgctgcctgatcgaatgccgcgatgagtataaatataacgtggaagccgtggaacttttgatacgaaaccatctggtgaacatgcagcagtatgatctccacttagcacagtccatggagaacggcctgaattacatggccgtggcattcgcaatgcagctagttaagattctgctcgtcgatgagaggagcgtggcacatgtcacggaggccgacctctttcatactattgaaacgttaatgagaattaatgcacatagccgcggtaatgcccctgaggggttaccccagcttatggaagtggtgaggagcaactacgaagccatgatcgatagagcccacggaggtcctaactttatgatgcattcgggtatttcccaggccagcgagtatgatgaccctcccggattgcgcgaaaaggcagaatacctgctaagagaatgggtcaatctgtaccactctgctgctgccggaagggacagcacaaaggccttctctgcatttgtggggcagatgcatcaacagggaatccttaaaactgatgatctcattacacgatttttcagactctgcactgaaatgtgcgtcgaaatttcctaccgcgctcaggctgaacaacaacataatcccgctgccaaccccactatgattcgcgctaaatgctaccataaccttgacgctttcgtgaggctcatcgcccttctggtaaagcactcaggcgaggcaactaatacagttaccaaaatcaacctgctcaataaggtccttggtatcgtcgtgggcgtgttgctgcaggatcatgatgtccgccagtccgaattccagcagcttccttaccaccggatctttataatgcttctcttagaactgaacgccccagagcatgtcctagagactatcaactttcagaccttaacagccttttgtaacactttccatatattaagacctacgaaggctcccggttttgtttatgcctggctggagctcatttcccatagaatctttatagctaggatgcttgctcacactccacagcaaaaaggctggcccatgtacgcacaactgctgatcgatcttttcaaatatctggctcctttcctgaggaatgtcgaactgaccaagcctatgcagatcctctataaaggcacccttagggtgctgttggttcttctgcacgacttccctgaattcctctgcgactaccactatggcttttgcgacgtgatcccccctaattgtatccaacttaggaaccttatcctttctgcgttcccacgtaacatgcggctgccagatccattcacgccaaacttgaaagaaatcatgctcta

SEQ ID NO: 94234 - DNA, 951 bp, Artificial Sequence
  derived and/or modified sequence
atgctcctgctggaactgaatgcaccagagcatgtcctcgagacgataaacttccagacactgaccgctttttgtaacacgttccacattttgaggcccactaaggcccctggcttcgtgtatgcctggctcgaactgatttcccaccgcattttcatcgccaggatgctagctcatacaccgcaacagaaagggtggcctatgtacgcccagctgttgattgaccttttcaagtatttggctcctttcttgcggaatgtggaacttaccaagcccatgcagattctctacaagggcacccttagagtgcttctggtcctgctgcacgactttcctgaattcttgtgcgattaccactatggcttttgtgatgtgatacccccaaactgcatccagctgcgtaacctgatcttgagcgccttccccagaaatatgcggttaccagatcccttcacccccaatcttaaggtcgatatgctgtctgaaatcaacatcgccccaagaatacttaccaacttcaccggggttatgccaccacagttcaagaaggatcttgactcatacctgaagactcggtctcctgtcacttttttgtccgaccttagaagcaatctccaggtttctaatgagccaggtaataggtataacctccagcttattaacgcccttgtgctttacgtcgggacgcaggcaatcgcacacatccacaataagggatctactcccagcatgagcaccataacccactctgctcatatggacatcttccagaacctcgcagtggacctggatactgaaggcagatatctattccttaatgcaatcgccaaccaatcagggacacaaattgccaccttgacaacatctgtcgccccatgttgtacgttcctgcagcgacccattcgtaagccaagcaaaaaccggagccaggaattctcatggaatgggtag

SEQ ID NO: 94235 - DNA, 6743 bp, Artificial Sequence
  derived and/or modified sequence
gcgacctccggcgccattttgtagagaaacaagcggagttaaccgaagagggggtcgaggagagccggagtcggggacccaggagtttcctgtgtccagcgctgccggagccgcctgaggtgccatgtttcagaacagagtaagacccctggtaaagaagaactgaagatattatacagataccagatatagcctaattacaaagaaagcattaacctgcctctgaggtgactaaaggggaataatggtgattttgcgccgggctcggccgcctgcttccgccccaaccagcaatgaatcttgactcgctctcgctggccttgtctcaaatcagctacctggtggacaatttaaccaagaaaaattaccgagccagccagcaggaaatacagcatattgtgaatcggcacggtcctgaggcagacaggcatttattacgctgcctattttcgcatgtggatttcagtggcgatggtaaaagcagtggcaaagatttccatcagactcagtttctgattcaggagtgtgcgttgctgattacaaagccaaattttatctcgacgctgtcctatgccattgataatccattgcactatcagaagagtttaaagcctgcaccccacttatttgcccagctgagtaaagtgctcaaattaagcaaagtacaagaggtaatttttggccttgccctgttgaattcttccagctcagatcttagaggtttcgctgcccagtttatcaaacagaagcttccagatcttctgcgttcttacattgacgcagacgtcagtggaaatcaagaaggtggcttccaagatatagcaatagaggtcctacacctcctcctctcccatctcctctttgggcagaagggagcctttggagttggacaagaacagatagacgcttttcttaagacgctgcgcagagattttccccaagaacgctgtcccgtggtgctcgcaccacttttataccctgaaaaacgggacattctaatggacaggatcctgcctgattccggaggggtagctaaaaccatgatggagagctctttggctgatttcatgcaagaagtaggctatggcttttgtgcaagtattgaagaatgtcgcaatataatcgtgcagtttggtgttcgggaggtcacagctgcccaggttgcaagggttttgggaatgatggctcgaactcattcaggattaacagatggcattccattacagagtatttctgctccgggcagtgggatctggagtgatgggaaagataaaagtgatggagcacaggcacacacatggaatgtagaagtcttgattgacgttcttaaagaactgaatccaagtttgaatttcaaggaagtaacttatgaactggaccatcctggatttcaaattcgtgacagtaaaggacttcataatgtggtttatggcattcagaggggtttgggtatggaagtgttcccagtagacctcatatatagaccttggaaacatgctgaaggccagctctccttcattcaacattcccttataaatccagagatcttctgttttgctgactatccctgtcatactgttgccactgatattctgaaagcaccaccagaggatgacaatcgagaaattgccacatggaagagcttggatttgattgaatctctgctgaggcttgcagaggttgggcagtatgagcaagtcaaacagctcttcagcttccctatcaaacactgtccagacatgctggtattggccttactacaaattaacacctcttggcataccttgcgccatgaacttatctccactctgatgccaattttccttggaaaccatcctaactcagctattattttgcactatgcatggcatgggcagggacagtctccctcaattcgccaacttatcatgcatgcaatggcagaatggtacatgagaggggagcagtatgatcaggccaaattgtctcgaatacttgatgtggcccaggacttgaaggccttgtcaatgctgctaaatggtactccatttgcctttgttattgaccttgctgcacttgcttcacgtcgtgaatacctcaaacttgataagtggctcacagataaaattcgagagcatggggagccttttatccaggcgtgtatgacttttttaaagagacggtgtccttctattttgggcggacttgccccagaaaaagaccagcccaaaagtgctcaacttcctccagaaactttggcgacaatgttggcctgtctgcaagcttgtgcagggagtgtttctcaggagctatcagaaactatcctcaccatggtagccaattgcagtaatgttatgaataaggccagacaaccaccacctggagttatgccaaaaggacgtcctcctagtgctagcagcttagatgccatttctcctgttcagattgaccctcttgctggaatgacatctcttagtataggtggttcagctgcccctcacacccagagtatgcagggttttcctccaaatttgggttctgcattcagtacccctcagtcaccagcaaaagcatttccacccctttcaacccccaatcagaccactgcattcagtggtattggaggactttcatcacagcttccagtaggtggtcttggcacaggcagcctgactggtataggaactggtgctcttggactccctgcagtgaataacgacccttttgtacagaggaaactgggcacctctggactgaatcagcctacattccagcagacggacttgtctcaggtgtggccagaggcaaaccagcactttagtaaagagatagatgatgaagcaaacagctatttccagcgaatatataatcatccaccacatccaaccatgtctgttgatgaggtattagaaatgctgcagagatttaaagactctactataaagagggaacgagaagtatttaactgtatgctaaggaacttgtttgaagaatatcgtttttttccccagtatcctgataaagagttacatataacagcctgcctatttggtggtataattgagaaaggactggtcacttacatggcactaggtctggctctacgatatgttcttgaagccttacgcaagccttttggatccaaaatgtattatttcgggattgctgcactagatagatttaaaaacagattgaaggactatccccagtattgtcagcatttggcttctatcagtcactttatgcaatttccacatcatttacaggagtatattgagtatggacagcagtctagagatcctcctgtgaaaatgcaaggctctatcacaacccctggaagtattgcactggctcaggcccaggctcaggcccaggttccagcaaaagctcctcttgctggtcaagttagcactatggtaaccacctcaacaactaccactgttgctaaaacggttacggtcaccaggccaactggagtcagctttaagaaagatgtgccaccttctattaatactacaaatatagatacgttgcttgtggccacagatcaaactgagagaattgtggagcccccagaaaatatccaggagaaaattgcttttattttcaataatctctcacagtcaaatatgacacaaaaggttgaagagctaaaggaaacggtgaaagaagaatttatgccttgggtttcacagtatctggttatgaagagagtcagtattgagccaaactttcatagcctgtattcaaacttccttgacacgctgaagaatcctgaatttaacaagatggttctgaatgagacctacagaaacattaaagtgctcctgacctctgataaagctgcagccaatttctcagatcgttctttgctgaagaacttgggacattggctaggaatgatcacattagctaaaaacaaacccatcttacacactgacttggatgtgaaatcattgctgctagaggcttatgttaaaggacaacaagaattgctctatgtagtgccctttgttgccaaagtcttagaatctagcattcgtagtgtggtttttaggccaccaaacccttggacaatggcaattatgaatgtattagctgagctacatcaggagcatgacttaaagttaaacttgaagtttgaaatcgaggttctctgcaagaaccttgcattagacatcaatgagctaaaacctggaaacctcctaaaggataaagatcgcctgaagaatttagatgagcaactctctgctccaaagaaagatgtcaagcagccagaagaactccctcccatcacaaccacaacaacttctactacaccagctaccaacaccacttgtacagccacggttccaccacagccacagtacagctaccacgacatcaatgtctattcccttgcgggcttggcaccacacattactctgaatccaacaattcccttgtttcaggcccatccacagttgaagcagtgtgtgcgtcaggcaattgaacgggctgtccaggagctggtccatcctgtggtggatcgatcaattaagattgccatgactacttgtgagcaaatagtcaggaaggattttgccctggattcggaggaatctcgaatgcgaatagcagctcatcacatgatgcgtaacttgacagctggaatggctatgattacatgcagggaacctttgctcatgagcatatctaccaacttaaaaaacagttttgcctcagcccttcgtactgcttccccacaacaaagagaaatgatggatcaggcagctgctcaattagctcaggacaattgtgagttggcttgctgttttattcagaagactgcagtagaaaaagcaggccctgagatggacaagagattagcaactgaatttgagctgagaaaacatgctaggcaagaaggacgcagatactgtgatcctgttgttttaacatatcaagctgaacggatgccagagcaaatcaggctgaaagttggtggtgtggacccaaagcagttggctgtttacgaagagtttgcacgcaatgttcctggcttcttacctacaaatgacttaagtcagcccacgggatttttagcccagcccatgaagcaagcttgggcaacagatgatgtagctcagatttatgataagtgtattacagaactggagcaacatctacatgccatcccaccaactttggccatgaaccctcaagctcaggctcttcgaagtctcttggaggttgtagttttatctcgaaactctcgggatgccatagctgctcttggattgctccaaaaggctgtagagggcttactagatgccacaagtggtgctgatgctgaccttctgctgcgctacagggaatgccacctcttggtcctaaaagctctgcaggatggccgggcatatgggtctccatggtgcaacaaacagatcacaaggtgcctaattgaatgtcgagatgaatataaatataatgtggaggctgtggagctgctaattcgcaatcatttggttaatatgcagcagtatgatcttcacctagcgcagtcaatggagaatggcttaaactacatggctgtggcatttgctatgcagttagtaaaaatcctgctggtggatgaaaggagtgttgctcatgttactgaggcagatctgttccacaccattgaaaccctcatgaggattaatgctcattccagaggcaatgctccagaaggattgccccagctgatggaagtagtgcgatccaactatgaagcaatgattgatcgtgctcatggaggcccaaactttatgatgcattctgggatctctcaagcctcagagtatgatgaccctccaggcctgagggagaaggcagagtatcttctgagggaatgggtgaatctctaccattcagcagcagctggccgcgacagtaccaaagctttctctgcatttgttggacagatgcaccagcaaggaatactgaagaccgatgatctcataacaaggttctttcgtctgtgtactgaaatgtgtgttgaaatcagttaccgtgctcaggctgagcagcagcacaatcctgctgccaatcccaccatgatccgagccaagtgctatcacaacctggatgcctttgttcgactcattgcactgctcgtgaaacactcaggggaggccaccaacactgtcacaaagattaatctgctgaacaaggtccttggtatagtagtgggagttctccttcaggatcatgatgttcgtcagagtgaatttcagcaacttccctaccatcgaatttttatcatgcttctcttggaactcaatgcacctgagcatgtgttggaaaccattaatttccagacacttacagctttctgcaatacattccacatcttgaggcctaccaaagctcctggctttgtatatgcctggcttgaactgatttcccatcggatatttattgcaagaatgctggcacatacgccacagcagaaggggtggcctatgtatgcacagctactgattgatttattcaaatatttagcgcctttccttagaaatgtggaactcaccaaacctatgcaaatcctctacaagggcactttaagagtgctgctggttcttttgcatgatttcccagagttcctttgtgattaccattatgggttctgtgatgtgatcccacctaattgtatccagttaagaaatttgatcctgagtgcctttccaagaaacatgaggctccccgacccattcactcctaatctaaaggaaataatgtta

SEQ ID NO: 94236 - DNA, 6453 bp, Artificial Sequence
  derived and/or modified sequence
atgaacctggacagcctgagcctggccctgagccagatcagctacctggtggacaacctgaccaagaagaactacagagccagccagcaggagatccagcacatcgtgaacagacacggccccgaggccgacagacacctgctgagatgcctgttcagccacgtggacttcagcggcgacggcaagagcagcggcaaggacttccaccagacccagttcctgatccaggagtgcgccctgctgatcaccaagcccaacttcatcagcaccctgagctacgccatcgacaaccccctgcactaccagaagagcctgaagcccgccccccacctgttcgcccagctgagcaaggtgctgaagctgagcaaggtgcaggaggtgatcttcggcctggccctgctgaacagcagcagcagcgacctgagaggcttcgccgcccagttcatcaagcagaagctgcccgacctgctgagaagctacatcgacgccgacgtgagcggcaaccaggagggcggcttccaggacatcgccatcgaggtgctgcacctgctgctgagccacctgctgttcggccagaagggcgccttcggcgtgggccaggagcagatcgacgccttcctgaagaccctgagaagagacttcccccaggagagatgccccgtggtgctggcccccctgctgtaccccgagaagagagacatcctgatggacagaatcctgcccgacagcggcggcgtggccaagaccatgatggagagcagcctggccgacttcatgcaggaggtgggctacggcttctgcgccagcatcgaggagtgcagaaacatcatcgtgcagttcggcgtgagagaggtgaccgccgcccaggtggccagagtgctgggcatgatggccagaacccacagcggcctgaccgacggcatccccctgcagagcatcagcgcccccggcagcggcatctggagcgacggcaaggacaagagcgacggcgcccaggcccacacctggaacgtggaggtgctgatcgacgtgctgaaggagctgaaccccagcctgaacttcaaggaggtgacctacgagctggaccaccccggcttccagatcagagacagcaagggcctgcacaacgtggtgtacggcatccagagaggcctgggcatggaggtgttccccgtggacctgatctacagaccctggaagcacgccgagggccagctgagcttcatccagcacagcctgatcaaccccgagatcttctgcttcgccgactacccctgccacaccgtggccaccgacatcctgaaggccccccccgaggacgacaacagagagatcgccacctggaagagcctggacctgatcgagagcctgctgagactggccgaggtgggccagtacgagcaggtgaagcagctgttcagcttccccatcaagcactgccccgacatgctggtgctggccctgctgcagatcaacaccagctggcacaccctgagacacgagctgatcagcaccctgatgcccatcttcctgggcaaccaccccaacagcgccatcatcctgcactacgcctggcacggccagggccagagccccagcatcagacagctgatcatgcacgccatggccgagtggtacatgagaggcgagcagtacgaccaggccaagctgagcagaatcctggacgtggcccaggacctgaaggccctgagcatgctgctgaacggcacccccttcgccttcgtgatcgacctggccgccctggccagcagaagagagtacctgaagctggacaagtggctgaccgacaagatcagagagcacggcgagcccttcatccaggcctgcatgaccttcctgaagagaagatgccccagcatcctgggcggcctggcccccgagaaggaccagcccaagagcgcccagctgccccccgagaccctggccaccatgctggcctgcctgcaggcctgcgccggcagcgtgagccaggagctgagcgagaccatcctgaccatggtggccaactgcagcaacgtgatgaacaaggccagacagcccccccccggcgtgatgcccaagggcagaccccccagcgccagcagcctggacgccatcagccccgtgcagatcgaccccctggccggcatgaccagcctgagcatcggcggcagcgccgccccccacacccagagcatgcagggcttcccccccaacctgggcagcgccttcagcaccccccagagccccgccaaggccttcccccccctgagcacccccaaccagaccaccgccttcagcggcatcggcggcctgagcagccagctgcccgtgggcggcctgggcaccggcagcctgaccggcatcggcaccggcgccctgggcctgcccgccgtgaacaacgaccccttcgtgcagagaaagctgggcaccagcggcctgaaccagcccaccttccagcagaccgacctgagccaggtgtggcccgaggccaaccagcacttcagcaaggagatcgacgacgaggccaacagctacttccagagaatctacaaccaccccccccaccccaccatgagcgtggacgaggtgctggagatgctgcagagattcaaggacagcaccatcaagagagagagagaggtgttcaactgcatgctgagaaacctgttcgaggagtacagattcttcccccagtaccccgacaaggagctgcacatcaccgcctgcctgttcggcggcatcatcgagaagggcctggtgacctacatggccctgggcctggccctgagatacgtgctggaggccctgagaaagcccttcggcagcaagatgtactacttcggcatcgccgccctggacagattcaagaacagactgaaggactacccccagtactgccagcacctggccagcatcagccacttcatgcagttcccccaccacctgcaggagtacatcgagtacggccagcagagcagagacccccccgtgaagatgcagggcagcatcaccacccccggcagcatcgccctggcccaggcccaggcccaggcccaggtgcccgccaaggcccccctggccggccaggtgagcaccatggtgaccaccagcaccaccaccaccgtggccaagaccgtgaccgtgaccagacccaccggcgtgagcttcaagaaggacgtgccccccagcatcaacaccaccaacatcgacaccctgctggtggccaccgaccagaccgagagaatcgtggagccccccgagaacatccaggagaagatcgccttcatcttcaacaacctgagccagagcaacatgacccagaaggtggaggagctgaaggagaccgtgaaggaggagttcatgccctgggtgagccagtacctggtgatgaagagagtgagcatcgagcccaacttccacagcctgtacagcaacttcctggacaccctgaagaaccccgagttcaacaagatggtgctgaacgagacctacagaaacatcaaggtgctgctgaccagcgacaaggccgccgccaacttcagcgacagaagcctgctgaagaacctgggccactggctgggcatgatcaccctggccaagaacaagcccatcctgcacaccgacctggacgtgaagagcctgctgctggaggcctacgtgaagggccagcaggagctgctgtacgtggtgcccttcgtggccaaggtgctggagagcagcatcagaagcgtggtgttcagaccccccaacccctggaccatggccatcatgaacgtgctggccgagctgcaccaggagcacgacctgaagctgaacctgaagttcgagatcgaggtgctgtgcaagaacctggccctggacatcaacgagctgaagcccggcaacctgctgaaggacaaggacagactgaagaacctggacgagcagctgagcgcccccaagaaggacgtgaagcagcccgaggagctgccccccatcaccaccaccaccaccagcaccacccccgccaccaacaccacctgcaccgccaccgtgcccccccagccccagtacagctaccacgacatcaacgtgtacagcctggccggcctggccccccacatcaccctgaaccccaccatccccctgttccaggcccacccccagctgaagcagtgcgtgagacaggccatcgagagagccgtgcaggagctggtgcaccccgtggtggacagaagcatcaagatcgccatgaccacctgcgagcagatcgtgagaaaggacttcgccctggacagcgaggagagcagaatgagaatcgccgcccaccacatgatgagaaacctgaccgccggcatggccatgatcacctgcagagagcccctgctgatgagcatcagcaccaacctgaagaacagcttcgccagcgccctgagaaccgccagcccccagcagagagagatgatggaccaggccgccgcccagctggcccaggacaactgcgagctggcctgctgcttcatccagaagaccgccgtggagaaggccggccccgagatggacaagagactggccaccgagttcgagctgagaaagcacgccagacaggagggcagaagatactgcgaccccgtggtgctgacctaccaggccgagagaatgcccgagcagatcagactgaaggtgggcggcgtggaccccaagcagctggccgtgtacgaggagttcgccagaaacgtgcccggcttcctgcccaccaacgacctgagccagcccaccggcttcctggcccagcccatgaagcaggcctgggccaccgacgacgtggcccagatctacgacaagtgcatcaccgagctggagcagcacctgcacgccatcccccccaccctggccatgaacccccaggcccaggccctgagaagcctgctggaggtggtggtgctgagcagaaacagcagagacgccatcgccgccctgggcctgctgcagaaggccgtggagggcctgctggacgccaccagcggcgccgacgccgacctgctgctgagatacagagagtgccacctgctggtgctgaaggccctgcaggacggcagagcctacggcagcccctggtgcaacaagcagatcaccagatgcctgatcgagtgcagagacgagtacaagtacaacgtggaggccgtggagctgctgatcagaaaccacctggtgaacatgcagcagtacgacctgcacctggcccagagcatggagaacggcctgaactacatggccgtggccttcgccatgcagctggtgaagatcctgctggtggacgagagaagcgtggcccacgtgaccgaggccgacctgttccacaccatcgagaccctgatgagaatcaacgcccacagcagaggcaacgcccccgagggcctgccccagctgatggaggtggtgagaagcaactacgaggccatgatcgacagagcccacggcggccccaacttcatgatgcacagcggcatcagccaggccagcgagtacgacgacccccccggcctgagagagaaggccgagtacctgctgagagagtgggtgaacctgtaccacagcgccgccgccggcagagacagcaccaaggccttcagcgccttcgtgggccagatgcaccagcagggcatcctgaagaccgacgacctgatcaccagattcttcagactgtgcaccgagatgtgcgtggagatcagctacagagcccaggccgagcagcagcacaaccccgccgccaaccccaccatgatcagagccaagtgctaccacaacctggacgccttcgtgagactgatcgccctgctggtgaagcacagcggcgaggccaccaacaccgtgaccaagatcaacctgctgaacaaggtgctgggcatcgtggtgggcgtgctgctgcaggaccacgacgtgagacagagcgagttccagcagctgccctaccacagaatcttcatcatgctgctgctggagctgaacgcccccgagcacgtgctggagaccatcaacttccagaccctgaccgccttctgcaacaccttccacatcctgagacccaccaaggcccccggcttcgtgtacgcctggctggagctgatcagccacagaatcttcatcgccagaatgctggcccacaccccccagcagaagggctggcccatgtacgcccagctgctgatcgacctgttcaagtacctggcccccttcctgagaaacgtggagctgaccaagcccatgcagatcctgtacaagggcaccctgagagtgctgctggtgctgctgcacgacttccccgagttcctgtgcgactaccactacggcttctgcgacgtgatcccccccaactgcatccagctgagaaacctgatcctgagcgccttccccagaaacatgagactgcccgaccccttcacccccaacctgaaggagatcatgctgtag

SEQ ID NO: 94237 - DNA, 951 bp, Artificial Sequence
  derived and/or modified sequence
atgctgctgctggagctgaacgcccccgagcacgtgctggagaccatcaacttccagaccctgaccgccttctgcaacaccttccacatcctgagacccaccaaggcccccggcttcgtgtacgcctggctggagctgatcagccacagaatcttcatcgccagaatgctggcccacaccccccagcagaagggctggcccatgtacgcccagctgctgatcgacctgttcaagtacctggcccccttcctgagaaacgtggagctgaccaagcccatgcagatcctgtacaagggcaccctgagagtgctgctggtgctgctgcacgacttccccgagttcctgtgcgactaccactacggcttctgcgacgtgatcccccccaactgcatccagctgagaaacctgatcctgagcgccttccccagaaacatgagactgcccgaccccttcacccccaacctgaaggtggacatgctgagcgagatcaacatcgcccccagaatcctgaccaacttcaccggcgtgatgcccccccagttcaagaaggacctggacagctacctgaagaccagaagccccgtgaccttcctgagcgacctgagaagcaacctgcaggtgagcaacgagcccggcaacagatacaacctgcagctgatcaacgccctggtgctgtacgtgggcacccaggccatcgcccacatccacaacaagggcagcacccccagcatgagcaccatcacccacagcgcccacatggacatcttccagaacctggccgtggacctggacaccgagggcagatacctgttcctgaacgccatcgccaaccagagcggcacccagatcgccaccctgaccaccagcgtggccccctgctgcaccttcctgcagagacccatcagaaagcccagcaagaacagaagccaggagttcagctggaacggctag

SEQ ID NO: 94238 - protein, 501 aa, Artificial Sequence
  derived and/or modified sequence
MLQMLWHFLASFFPRAGCHGSREGDDREVRGTPAPAWRDQMASFLGKQDGRAEATEKRPTILLVVGPAEQFPKKIVQAGDKDLDGQLDFEEFVHYLQDHEKKLRLVFKSLDKKNDGRIDAQEIMQSLRDLGVKISEQQAEKILKRIRTGHFWGPVTYMDKNGTMTIDWNEWRDYHLLHPVENIPEIILYWKHSTIFDVGENLTVPDEFTVEERQTGMWWRHLVAGGGAGAVSRTCTAPLDRLKVLMQVHASRSNNMGIVGGFTQMIREGGARSLWRGNGINVLKIAPESAIKFMAYEQIKRLVGSDQETLRIHERLVAGSLAGAIAQSSIYPMEVLKTRMALRKTGQYSGMLDCARRILAREGVAAFYKGYVPNMLGIIPYAGIDLAVYETLKNAWLQHYAVNSADPGVFVLLACGTMSSTCGQLASYPLALVRTRMQAQASIEGAPEVTMSSLFKHILRTEGAFGLYRGLAPNFMKVIPAVSISYVVYENLKITLGVQSR

SEQ ID NO: 94239 - DNA, 1506 bp, Artificial Sequence
  derived and/or modified sequence
atgctgcagatgctgtggcacttcctggccagcttcttccccagagccggctgccacggcagcagagagggcgacgacagagaggtgagaggcacccccgcccccgcctggagagaccagatggccagcttcctgggcaagcaggacggcagagccgaggccaccgagaagagacccaccatcctgctggtggtgggccccgccgagcagttccccaagaagatcgtgcaggccggcgacaaggacctggacggccagctggacttcgaggagttcgtgcactacctgcaggaccacgagaagaagctgagactggtgttcaagagcctggacaagaagaacgacggcagaatcgacgcccaggagatcatgcagagcctgagagacctgggcgtgaagatcagcgagcagcaggccgagaagatcctgaagagaatcagaaccggccacttctggggccccgtgacctacatggacaagaacggcaccatgaccatcgactggaacgagtggagagactaccacctgctgcaccccgtggagaacatccccgagatcatcctgtactggaagcacagcaccatcttcgacgtgggcgagaacctgaccgtgcccgacgagttcaccgtggaggagagacagaccggcatgtggtggagacacctggtggccggcggcggcgccggcgccgtgagcagaacctgcaccgcccccctggacagactgaaggtgctgatgcaggtgcacgccagcagaagcaacaacatgggcatcgtgggcggcttcacccagatgatcagagagggcggcgccagaagcctgtggagaggcaacggcatcaacgtgctgaagatcgcccccgagagcgccatcaagttcatggcctacgagcagatcaagagactggtgggcagcgaccaggagaccctgagaatccacgagagactggtggccggcagcctggccggcgccatcgcccagagcagcatctaccccatggaggtgctgaagaccagaatggccctgagaaagaccggccagtacagcggcatgctggactgcgccagaagaatcctggccagagagggcgtggccgccttctacaagggctacgtgcccaacatgctgggcatcatcccctacgccggcatcgacctggccgtgtacgagaccctgaagaacgcctggctgcagcactacgccgtgaacagcgccgaccccggcgtgttcgtgctgctggcctgcggcaccatgagcagcacctgcggccagctggccagctaccccctggccctggtgagaaccagaatgcaggcccaggccagcatcgagggcgcccccgaggtgaccatgagcagcctgttcaagcacatcctgagaaccgagggcgccttcggcctgtacagaggcctggcccccaacttcatgaaggtgatccccgccgtgagcatcagctacgtggtgtacgagaacctgaagatcaccctgggcgtgcagagcagatag

SEQ ID NO: 94240 - DNA, 1506 bp, Artificial Sequence
  derived and/or modified sequence
atgctgcagatgctgtggcacttcctcgcatccttcttcccacgggccggttgccatggctctcgagaaggggatgatagagaggtgcgcggcactcctgcccctgcgtggcgggatcagatggcttctttcctgggtaaacaggatggacgcgctgaggctaccgagaaaagaccaactattttgctcgtagtgggacccgccgagcagtttcctaagaagatcgtccaggctggtgacaaggatcttgacggacagttggacttcgaggagttcgtgcattatctgcaagaccatgagaaaaagctgagattagtgttcaaaagcttggacaagaaaaatgacggacgtatcgatgctcaagaaattatgcaaagcctcagagatctaggcgtcaaaatttccgagcagcaggctgagaagattctgaagcggatccgcacgggccatttctggggtcccgttacctacatggacaagaacggcaccatgacgatcgattggaacgagtggagagactaccatctgctccacccggttgagaatattccagaaatcattctatattggaagcacagtacaatcttcgacgtgggggagaaccttaccgtgcctgatgaatttacagtggaagaaagacagaccgggatgtggtggcgacatttggtagcaggagggggcgcaggtgctgtcagtcggacatgcacagcacccctggaccgtctaaaggtgctgatgcaggttcacgcctcccgctcaaacaatatggggattgtgggcggtttcactcaaatgatacgtgaagggggagcacggtccctgtggagaggtaacggaatcaacgtgctaaaaatcgctcctgaatcagccataaagttcatggcctacgagcagatcaaaagactggtaggctcagaccaagagactctgcgcattcatgagaggctggtcgcggggagcctcgccggcgccatcgcacagagttctatatacccaatggaggtgctgaaaacccgcatggccctccggaagacagggcagtactccggcatgcttgactgcgccaggcgtatcttagcccgtgaaggagtggccgccttctacaaagggtatgtgcctaatatgctgggcattataccctacgccggcatcgatctggcggtatacgagaccctgaaaaatgcttggctacagcattacgcagttaattccgctgaccctggcgtgttcgttctactggcatgcgggacgatgtcttccacctgcgggcaacttgcgtcctaccctctggccctagttcgcacccgcatgcaagcacaggccagcatagaaggggctccggaagtcactatgtcgtccctgttcaagcacatcttgcggactgagggggcttttggtctttatcgcggcttggcacctaattttatgaaagtgattcccgctgtgtccattagttacgtcgtgtatgaaaatctaaaaatcacacttggtgtgcagagtagatag

SEQ ID NO: 94241 - DNA, 1506 bp, Artificial Sequence
  derived and/or modified sequence
atgctgcagatgctgtggcacttcctggccagcttcttcccccgggccggctgccacggcagccgggagggagatgaccgggaggtgcggggcaccccagccccagcctggagggaccagatggccagcttcctgggcaagcaggacggccgggcagaggccacagagaagaggcccaccatcctgctggtggtgggccctgctgagcagttccccaagaagatcgtgcaggccggggacaaggacctggatggccagctggactttgaggagtttgtgcactacctgcaggaccacgagaagaagctgcggctggtgttcaagagcctggacaagaagaatgatggaagaattgatgcccaggagatcatgcagagcctgcgggacctgggcgtgaagatcagcgagcagcaggccgagaagatcctgaagaggatcagaacaggccacttctggggccctgtgacctacatggacaagaatggcaccatgaccatcgactggaatgagtggagggactaccacctgctgcaccctgtggagaacatccctgagatcatcctgtactggaagcacagcaccatctttgatgtgggggagaacctgactgtgcctgatgagttcaccgtggaggagcggcagacaggcatgtggtggaggcacctggtggccggcggcggggccggggctgtgtccaggacctgcacagcccccctggaccggctgaaggtgctgatgcaggtgcacgccagccgcagcaacaacatgggcatcgtgggcggcttcacccagatgatccgggagggcggggcccggagcctgtggagaggaaatggcatcaacgtgctgaagatcgcccctgagagcgccatcaagttcatggcctatgagcagatcaagaggctggtgggcagtgaccaggagaccctgcgcatccacgagcggctggtggccggcagcctggccggggccatcgcccagagcagcatctaccccatggaggtgctgaagaccaggatggccctgaggaagacaggccagtacagcggcatgctggactgtgcccggcgcatcctggcccgggagggcgtggccgccttctacaagggctacgtgcccaacatgctgggcatcatcccctatgccggcatcgacctggccgtgtatgagaccctgaagaatgcctggctgcagcactatgctgtgaacagcgctgaccccggggtgtttgtgctgctggcctgtggcaccatgagcagcacctgtggccagctggccagctaccccctggccctggtgaggaccaggatgcaggcccaggccagcattgaaggagcccctgaggtgaccatgagcagcctcttcaagcacatcctgaggacagaaggagccttcggcctgtaccggggcctggcccccaacttcatgaaggtgatcccagctgtgtccatctcctatgtggtgtatgagaacctgaagatcaccctgggcgtgcagagcaggtag

SEQ ID NO: 94242 - DNA, 1506 bp, Artificial Sequence
  derived and/or modified sequence
atgctgcagatgctgtggcacttcctggccagcttcttcccccgggcaggctgccacggttctagagaaggggacgaccgcgaggtgcggggaaccccagccccagcttggagagaccagatggcatcttttctcgggaagcaggacgggcgggccgaggccaccgagaagagaccaacaatccttcttgtggtgggtccagctgaacagtttccgaagaagattgtacaggctggagacaaggacctggatggccagcttgactttgaggagttcgtccactatcttcaggatcacgagaaaaagctgcggcttgtgtttaagagcctagataagaaaaatgacgggcgcatagacgctcaagagattatgcagtcactaagagatctgggcgtgaagatcagtgagcagcaggcagaaaaaattctgaaacggatccggaccggacacttctggggtcccgttacttatatggacaagaatggaacaatgaccatcgactggaacgaatggcgagactaccacctgcttcatcctgtggagaatattcctgaaatcattctgtattggaaacattctactatcttcgacgtgggcgagaatctgacggtcccagacgagttcacggtcgaagaacggcagacaggaatgtggtggcgccatctggtagccggcggcggagccggcgccgtgtcccggacctgcaccgcccctctagatcggctcaaggttctcatgcaggtacacgccagtcgctctaacaacatgggaattgttggcggatttacgcagatgattcgtgaggggggcgctcgtagcctgtggagaggtaacgggattaacgtgctgaagatcgcccccgaatccgccataaaatttatggcatatgagcagattaagaggttagtgggtagtgatcaggagacacttcgtatccatgagcggctggtagctggttcacttgccggcgccatcgcccaaagttctatataccccatggaggtgctcaaaacaagaatggccttgcgtaaaacgggacagtacagcggtatgttggattgcgcacgccgtatcctggcccgagaaggcgtggcagccttctataagggatatgtgcccaatatgttgggcattattccatatgccgggattgatttagcagtctacgaaactttaaaaaacgcctggctccaacactacgctgttaactctgctgacccaggggtatttgtgcttctggcttgtgggaccatgagttctacttgtggtcaacttgcttcttacccgttggccctggtgcgaacgcggatgcaagcgcaggcttccatagaaggtgctcctgaggtaaccatgagcagtctgtttaagcacatcctgagaacagagggggcctttgggctctatcgcggtttggcacctaacttcatgaaggtcatccctgctgtcagtatttcatatgtggtgtatgaaaacctgaaaattaccctgggggtccagagtcgttag

SEQ ID NO: 94243 - DNA, 1506 bp, Artificial Sequence
  derived and/or modified sequence
atgctgcagatgttgtggcacttccttgcctccttttttcctcgtgccggatgtcacggatcccgcgaaggggacgatcgtgaggttcgcggaactccagcccctgcgtggagagatcagatggcctcattcctcgggaaacaggatggcagggccgaggccaccgaaaagcggccaacaattctcctggtcgtgggtcctgccgaacagtttccaaaaaaaattgtgcaggccggtgacaaagatctagacggccagctcgattttgaggagttcgtgcactatttgcaggatcacgaaaaaaagctgaggctcgtgttcaagagcctggacaaaaaaaacgacggtagaatcgatgcacaagagattatgcagtcactgcgagacctgggcgtaaagattagcgaacaacaggccgaaaagatcctgaagcggattcgcactggacatttctggggcccagtgacctacatggacaagaatgggacaatgaccatagattggaatgagtggcgcgactaccatctgctccaccctgtcgaaaatatccctgagatcatcttgtactggaaacatagcaccattttcgatgtaggtgagaacttgactgttcccgatgaattcacagtggaagaacgacagaccggcatgtggtggcgccacttggttgcaggcggaggcgctggtgcggtgtcacggacatgtacagccccactggaccggctcaaagtgcttatgcaggtgcatgcgtcccggtcaaataacatgggcatcgtcggcggtttcacccagatgattcgcgaggggggagccaggagcttatggagaggcaacggtatcaacgtgctgaagatcgctccagagtcagcgataaaattcatggcatatgaacagatcaagaggttggtgggctcagaccaggaaactctgagaatacacgagaggctagttgcagggagccttgccggagccattgcccagtccagtatctatccaatggaggtgcttaagactcggatggcccttagaaagactggccagtactcggggatgttggactgcgcgaggagaattctagctagggagggggttgcagctttttataagggttacgtgcctaacatgctcggaatcatcccatacgccggtatcgacctggcggtctacgagacactgaagaacgcttggctacagcactacgccgttaattcagcggaccccggtgtgtttgttctcctggcctgcgggactatgtcatccacctgtggccagctggccagctatcccctggcactcgtccggactcgcatgcaggcccaggccagcatcgaaggggctccggaggtcacaatgtcatcactgttcaaacacatcctgcggactgagggtgcctttggtttgtacagagggctggcgccaaattttatgaaagtaattcccgctgtctcaataagttacgtggtctatgaaaacctgaaaatcactctgggagtgcaatcaagatag

SEQ ID NO: 94244 - DNA, 3714 bp, Artificial Sequence
  derived and/or modified sequence
gcgaggacagctgaataactgggagctcgaagttgcttgctgcctccgggagtggtctgcttggctgtcgcgttttccttttctttttttttttttttaaaaaaaagccaaacgtttgctcaccatcacctgcagaagtgagtttttattgaagaagctccagctgctttctccttattgccggcagcctggcaagcctcccttagagtgagctacttctcaggccgggcacgacagcagtgctagcacatttgaaaaagcaggaaaccgcccctgcatgcagagcttccagcctgagaaccccaggcccgtcctcccagcagctgtgtagccagagagcgttggtactgtggtcacatccctcaaaagtgaacagtcgccatcagaggcgtttggaggagaccgtgatgttgcagatgctgtggcatttcctagctagctttttccccagggctgggtgccacggctccagagagggggacgatcgtgaagtcagaggcaccccagcccctgcctggagagaccagatggcaagctttttggggaaacaggacggaagggctgaggccacggaaaaaagacccaccattttgctggtggttggacctgcagagcagtttcctaagaaaattgtacaagctggagataaggaccttgatgggcagctagactttgaagaatttgtccattatctccaagatcatgagaagaagctgaggctggtgtttaagagtttggacaaaaagaatgatggacgcattgacgcgcaggagatcatgcagtccctgcgggacttgggagtcaagatatctgaacagcaggcagaaaaaattctcaagagaatacgaacgggccatttctggggccctgtcacctacatggataaaaacggcacgatgaccattgactggaacgagtggagagactaccacctcctccaccccgtggaaaacatccccgagatcatcctctactggaagcattccacgatctttgatgtgggtgagaatctaacggtcccggatgagttcacagtggaggagaggcagacggggatgtggtggagacacctggtggcaggaggtggggcaggggccgtatccagaacctgcacggcccccctggacaggctcaaggtgctcatgcaggtccatgcctcccgcagcaacaacatgggcatcgttggtggcttcactcagatgattcgagaaggaggggccaggtcactctggcggggcaatggcatcaacgtcctcaaaattgcccccgaatcagccatcaaattcatggcctatgagcagatcaagcgccttgttggtagtgaccaggagactctgaggattcacgagaggcttgtggcagggtccttggcaggggccatcgcccagagcagcatctacccaatggaggtcctgaagacccggatggcgctgcggaagacaggccagtactcaggaatgctggactgcgccaggaggatcctggccagagagggggtggccgccttctacaaaggctatgtccccaacatgctgggcatcatcccctatgccggcatcgaccttgcagtctacgagacgctcaagaatgcctggctgcagcactatgcagtgaacagcgcggaccccggcgtgtttgtgctcctggcctgtggcaccatgtccagtacctgtggccagctggccagctaccccctggccctagtcaggacccggatgcaggcgcaagcctctattgagggcgctccggaggtgaccatgagcagcctcttcaaacatatcctgcggaccgagggggccttcgggctgtacagggggctggcccccaacttcatgaaggtcatcccagctgtgagcatcagctacgtggtctacgagaacctgaagatcaccctgggcgtgcagtcgcggtgacggggggagggccgcccggcagtggactcgctgatcctgggccgcagcctggggtgtgcagccatctcattctgtgaatgtgccaacactaagctgtctcgagccaagctgtgaaaaccctagacgcacccgcagggagggtggggagagctggcaggcccagggcttgtcctgctgaccccagcagaccctcctgttggttccagcgaagaccacaggcattccttagggtccagggtcagcaggctccgggctcacatgtgtaaggacaggacattttctgcagtgcctgccaatagcgagcttggagcctggaggccggcttagttcttccatttcacccttgcagccagctgttggccacggcccctgccctctggtctgccgtgcatctccctgtgccctcttgctgcctgcctgtctgctgaggtaaggtgggaggagggctacagcccacatcccaccccctcgtccaatcccataatccatgatgaaaggtgaggtcacgtggcctcccaggcctgacttcccaacctacagcattgacgccaacttggctgtgaaggaagaggaaaggatctggccttgtggtcactggcatctgagccctgctgatggctggggctctcgggcatgcttgggagtgcagggggctcgggctgcctggcctggctgcacagaaggcaagtgctggggctcatggtgctctgagctggcctggaccctgtcaggatgggccccacctcagaaccaaactcactgtccccactgtggcatgagggcagtggagcaccatgtttgagggcgaagggcagagcgtttgtgtgttctggggagggaaggaaaaggtgttggaggccttaattatggactgttgggaaaagggttttgtccagaaggacaagccggacaaatgagcgacttctgtgcttccagaggaagacgagggagcaggagcttggctgactgctcagagtctgttctgacgccctgggggttcctgtccaaccccagcaggggcgcagcgggaccagccccacattccacttgtgtcactgcttggaacctatttattttgtatttatttgaacagagttatgtcctaactatttttatagatttgtttaattaatagcttgtcattttcaagttcattttttattcatatttatgttcatggttgattgtaccttcccaagcccgcccagtgggatgggaggaggaggagaaggggggccttgggccgctgcagtcacatctgtccagagaaattccttttgggactggaggcagaaaagcggccagaaggcagcagccctggctcctttcctttggcaggttggggaagggcttgcccccagccttaggatttcagggtttgactgggggcgtggagagagagggaggaacctcaataaccttgaaggtggaatccagttatttcctgcgctgcgagggtttctttatttcactcttttctgaatgtcaaggcagtgaggtgcctctcactgtgaatttgtggtgggcgggggctggaggagagggtgggggactggctccgtccctcccagccttctgctgcccttgcttaacaatgccggccaactggcgacctcacggttgcacttccattccaccagaatgacctgatgaggaaatcttcaataggatgcaaagatcaatgcaaaaattgttatatatgaacatataactggagtcgtcaaaaagcaaattaagaaagaattggacgttagaagttgtcatttaaagcagccttctaataaagttgtttcaaagctga

SEQ ID NO: 94245 - protein, 290 aa, Artificial Sequence
  derived and/or modified sequence
MRPAVLGSPDRAPPEDEGPVMVKLEDSEEEGEAALWDPGPEAARLRFRCFRYEEATGPQEALAQLRELCRQWLRPEVRSKEQMLELLVLEQFLGALPPEIQARVQGQRPGSPEEAAALVDGLRREPGGPRRWVTVQVQGQEVLSEKMEPSSFQPLPETEPPTPEPGPKTPPRTMQESPLGLQVKEESEVTEDSDFLESGPLAATQESVPTLLPEEAQRCGTVLDQIFPHSKTGPEGPSWREHPRALWHEEAGGIFSPGAGAGAAPALGAGWLGAAVAMYVARCSANAATC

SEQ ID NO: 94246 - DNA, 873 bp, Artificial Sequence
  derived and/or modified sequence
atgcgcccagccgttcttggctcgcctgatagggcccctccagaagatgaaggacccgtcatggtgaaactcgaggactcagaggaggaaggcgaggctgctctttgggaccccggacctgaggccgccagactgcggttcagatgtttccgatatgaggaggctacaggccctcaagaggccctggcccagcttcgagagctctgtcgacaatggctcaggcccgaagtgcgtagcaaggaacagatgctggagctgctcgttctggagcagttcttgggtgccctgcccccggaaattcaggccagagtacagggtcagcgacccgggtcccccgaggaggccgccgcactggttgacggattgcgcagggaaccaggtggtccccgtagatgggtgacagtgcaggtccagggccaggaggttctgtccgagaagatggaacctagttcctttcagccactgcctgagaccgagccacctacccctgagcccgggcctaagactccgccacgtactatgcaggaatcccctttaggactgcaggtaaaggaggaatcagaggtgaccgaggatagcgacttcctggaaagtggtcctcttgcggctacccaggaatcagtccccacactcctgccagaggaagcccagagatgcggcacagtccttgaccagatatttccgcactccaaaactgggcccgaggggcccagctggagggaacacccaagagctttatggcatgaggaggccggcggaatattcagtccaggcgctggggcgggggccgctcccgctcttggagccggttggcttggcgcagccgtcgcaatgtatgtggccagatgctccgccaatgctgctacatgttag

SEQ ID NO: 94247 - DNA, 873 bp, Artificial Sequence
  derived and/or modified sequence
atgaggcctgctgtgctgggcagcccagaccgggcccccccagaagatgagggccctgtgatggtgaagctggaggacagcgaggaggagggggaggccgccctgtgggaccccggccctgaggccgcccggctgcgcttccgctgcttccgctatgaggaggccaccggcccccaggaggccctggcccagctgcgggagctgtgccggcagtggctgcggcctgaggtgcgcagcaaggagcagatgctggagctgctggtgctggagcagttcctgggcgccctgcccccagagatccaggcccgggtgcagggccagaggcctggcagccctgaggaggccgccgccctggtggatggcctgcggcgggagcccggcggcccccggcgctgggtgacagtgcaggtgcagggccaggaggtgctgtctgagaagatggagcccagcagcttccagcccctgcctgagacagagccccccaccccagagcccggccccaagaccccacccaggaccatgcaggagagccccctgggcctgcaggtgaaggaggagagcgaggtgacagaagattctgacttcctggagagcggccccctggccgccacccaggagagcgtgcccaccctgctgcctgaggaggcccagagatgtggcaccgtgctggaccagatcttcccccacagcaagacaggccctgagggccccagctggagggagcacccccgggccctgtggcatgaggaggccggcggcatcttcagccctggagctggagctggagctgccccagccctgggcgccggctggctgggcgctgctgtggccatgtatgtggcccgctgcagcgccaatgctgccacctgctag

SEQ ID NO: 94248 - DNA, 873 bp, Artificial Sequence
  derived and/or modified sequence
atgcggcccgccgtgctgggcagccccgaccgggccccccccgaggatgaaggccccgtcatggtaaaactcgaggacagcgaggaagaaggcgaggcggccctttgggaccccgggccggaagccgcaagactaaggttcaggtgctttcgctacgaagaggctactggcccccaggaggcgctggctcagctaagagagctctgtagacaatggctccggcctgaagtgcgatctaaggaacagatgctggaactgttggtattggagcaattcctgggagcactgcctccagaaattcaagctagagtacaaggtcagaggcccggcagcccagaagaggctgctgccctggttgacgggctcaggagagaacctggcgggcccagacgctgggtaaccgtccaggttcaggggcaggaagtactgagcgaaaagatggagccttcttcatttcagcctctacccgagactgaaccacctaccccagagccaggtcccaagacgccaccacgtactatgcaggagagccccctcggtctgcaggtgaaggaggagtcagaagtgaccgaagacagtgattttcttgaatccggccccctagcggctacgcaagaaagtgtgcccactcttttaccagaggaggctcagaggtgcggtacggtcctggaccagattttcccacatagcaagactggaccagagggtccatcctggagggagcatccgcgcgcactttggcatgaggaggccggcggaattttctctcctggcgccggcgcgggagccgcaccagctctgggcgcaggatggttgggcgctgccgtggccatgtatgtggcgcgatgctctgccaatgcagcaacctgctag

SEQ ID NO: 94249 - DNA, 873 bp, Artificial Sequence
  derived and/or modified sequence
atgcggccagctgtgcttggctcgccggatagggcacctccagaggacgaaggacctgtcatggtcaagctggaggattcggaagaggagggggaagccgctctatgggatcccggaccagaggctgccagactgagattcaggtgttttcgctacgaggaggcaacaggcccacaggaggccctggcgcaactacgagagctttgtaggcaatggctccgcccagaggtgagaagcaaggaacagatgctggaattattggtcttggagcagtttctgggggcactgccccctgagatccaggcacgcgtgcaggggcagaggccaggctctccagaggaggccgcagccctcgtcgatggactccggagagagccaggcggaccccgaaggtgggtcacagtgcaggtgcagggtcaggaggtgctttccgagaaaatggaaccaagctctttccagcccttgcccgagactgagccacctacccccgaacctggccctaagacccctccacggactatgcaggaaagccccctagggttgcaggtaaaggaagagtccgaggttacggaagattcagactttctcgaaagcggcccactggccgctacacaagaatcagttccaacactgctgcccgaggaggcccagcggtgcggtacagttctcgatcaaatctttccccatagcaagaccgggccagagggcccatcctggcgggagcaccccagggcactgtggcacgaggaggcagggggaatattttcacccggagctggcgcaggtgcagcccctgcccttggcgctggatggcttggagctgctgtcgctatgtacgttgcaaggtgttctgccaacgcagctacctgctag

SEQ ID NO: 94250 - DNA, 873 bp, Artificial Sequence
  derived and/or modified sequence
atgagacccgccgtgctgggcagccccgacagagccccccccgaggacgagggccccgtgatggtgaagctggaggacagcgaggaggagggcgaggccgccctgtgggaccccggccccgaggccgccagactgagattcagatgcttcagatacgaggaggccaccggcccccaggaggccctggcccagctgagagagctgtgcagacagtggctgagacccgaggtgagaagcaaggagcagatgctggagctgctggtgctggagcagttcctgggcgccctgccccccgagatccaggccagagtgcagggccagagacccggcagccccgaggaggccgccgccctggtggacggcctgagaagagagcccggcggccccagaagatgggtgaccgtgcaggtgcagggccaggaggtgctgagcgagaagatggagcccagcagcttccagcccctgcccgagaccgagccccccacccccgagcccggccccaagaccccccccagaaccatgcaggagagccccctgggcctgcaggtgaaggaggagagcgaggtgaccgaggacagcgacttcctggagagcggccccctggccgccacccaggagagcgtgcccaccctgctgcccgaggaggcccagagatgcggcaccgtgctggaccagatcttcccccacagcaagaccggccccgagggccccagctggagagagcaccccagagccctgtggcacgaggaggccggcggcatcttcagccccggcgccggcgccggcgccgcccccgccctgggcgccggctggctgggcgccgccgtggccatgtacgtggccagatgcagcgccaacgccgccacctgctag

SEQ ID NO: 94251 - protein, 210 aa, Artificial Sequence
  derived and/or modified sequence
MGIVQICKGEYFWLEPKNAFENFQEPDIGLVALAFLQGSFAYGGWNFLNYVTEELVDPYKNLPRAIFISIPLVTFVYVFANVAYVTAMSPQELLASNAVAVTFGEKLLGVMAWIMPISVALSTFGGVNGSLHLLSAVLRWSPRGPPSQCVGHDPREALHPNPSPALHMHLHPADAGHQRHVHTHQLCGLHQLPLLWGHGCWTDSPSLEEA

SEQ ID NO: 94252 - protein, 230 aa, Artificial Sequence
  derived and/or modified sequence
  misc_feature (1)..(1): Xaa can be any naturally occurring amino acid
XCLQEHSQPSQLLCTLLLCWCVLGRERPFRKAQSTSSPLEGVPRFLKRLLLTWVNCSSVRWATRVQDIFTAGKLLALALIIIMGIVQICKGEYFWLEPKNAFENFQEPDIGLVALAFLQGSFAYGGWNFLNYVTEELVDPYKLFFAGAREGHLPSVLAMIHVKRCTPIPALLFTCISTLLMLVTSDMYTLINYVGFINYLFYGVTVAGQIVLRWKKPDIPRPIKPLPYQG

SEQ ID NO: 94253 - protein, 430 aa, Artificial Sequence
  derived and/or modified sequence
MGQYGQELSWKCLVKAVCLQEHSQPSQLLCTLLLCWCVLGRERPFRKAQSTSSPLEGVPRFLKRLLLTWVNCSSVRWATRVQDIFTAGKLLALALIIIMGIVQICKGEYFWLEPKNAFENFQEPDIGLVALAFLQGSFAYGGWNFLNYVTEELVDPYKNLPRAIFISIPLVTFVYVFANVAYVTAMSPQELLASNAVAVTFGEKLLGVMAWIMPISVALSTFGGVNGSLFTSSRLFFAGAREGHLPSVLAMIHVKRCTPIPALLFTCISTLLMLVTSDMYTLINYVGFINYLFYGVTVAGQIVLRWKKPDIPRPIKINLLFPIIYLLFWAFLLVFSLWSEPVVCGIGLAIMLTGVPVYFLGVYWQHKPKCFSDFIELLTLVSQKMCVVVYPEVERGSGTEEANEDMEEQQQPMYQPTPTKDKDVAGQPQP

SEQ ID NO: 94254 - DNA, 693 bp, Artificial Sequence
  derived and/or modified sequence
tgatgcctgcaggagcacagccagcccagccagctgctgtgcaccctgctgctgtgctggtgcgtgctgggcagagagagacccttcagaaaggcccagagcaccagcagccccctggagggcgtgcccagattcctgaagagactgctgctgacctgggtgaactgcagcagcgtgagatgggccaccagagtgcaggacatcttcaccgccggcaagctgctggccctggccctgatcatcatcatgggcatcgtgcagatctgcaagggcgagtacttctggctggagcccaagaacgccttcgagaacttccaggagcccgacatcggcctggtggccctggccttcctgcagggcagcttcgcctacggcggctggaacttcctgaactacgtgaccgaggagctggtggacccctacaagctgttcttcgccggcgccagagagggccacctgcccagcgtgctggccatgatccacgtgaagagatgcacccccatccccgccctgctgttcacctgcatcagcaccctgctgatgctggtgaccagcgacatgtacaccctgatcaactacgtgggcttcatcaactacctgttctacggcgtgaccgtggccggccagatcgtgctgagatggaagaagcccgacatccccagacccatcaagcccctgccctaccagggctag

SEQ ID NO: 94255 - DNA, 1293 bp, Artificial Sequence
  derived and/or modified sequence
atgggccagtacggccaggagctgagctggaagtgcctggtgaaggccgtgtgcctgcaggagcacagccagcccagccagctgctgtgcaccctgctgctgtgctggtgcgtgctgggcagagagagacccttcagaaaggcccagagcaccagcagccccctggagggcgtgcccagattcctgaagagactgctgctgacctgggtgaactgcagcagcgtgagatgggccaccagagtgcaggacatcttcaccgccggcaagctgctggccctggccctgatcatcatcatgggcatcgtgcagatctgcaagggcgagtacttctggctggagcccaagaacgccttcgagaacttccaggagcccgacatcggcctggtggccctggccttcctgcagggcagcttcgcctacggcggctggaacttcctgaactacgtgaccgaggagctggtggacccctacaagaacctgcccagagccatcttcatcagcatccccctggtgaccttcgtgtacgtgttcgccaacgtggcctacgtgaccgccatgagcccccaggagctgctggccagcaacgccgtggccgtgaccttcggcgagaagctgctgggcgtgatggcctggatcatgcccatcagcgtggccctgagcaccttcggcggcgtgaacggcagcctgttcaccagcagcagactgttcttcgccggcgccagagagggccacctgcccagcgtgctggccatgatccacgtgaagagatgcacccccatccccgccctgctgttcacctgcatcagcaccctgctgatgctggtgaccagcgacatgtacaccctgatcaactacgtgggcttcatcaactacctgttctacggcgtgaccgtggccggccagatcgtgctgagatggaagaagcccgacatccccagacccatcaagatcaacctgctgttccccatcatctacctgctgttctgggccttcctgctggtgttcagcctgtggagcgagcccgtggtgtgcggcatcggcctggccatcatgctgaccggcgtgcccgtgtacttcctgggcgtgtactggcagcacaagcccaagtgcttcagcgacttcatcgagctgctgaccctggtgagccagaagatgtgcgtggtggtgtaccccgaggtggagagaggcagcggcaccgaggaggccaacgaggacatggaggagcagcagcagcccatgtaccagcccacccccaccaaggacaaggacgtggccggccagccccagccctag

SEQ ID NO: 94256 - DNA, 693 bp, Artificial Sequence
  derived and/or modified sequence
taatgtctccaggaacacagtcagccctcacagctcctgtgtacattgctgttatgttggtgcgtcctggggcgtgagcgccccttccgtaaggcccagtctacatcttcgcctctggagggagtccccaggtttttgaagcgcttgctcttgacttgggtcaattgcagttctgtccgctgggcaactcgcgtacaagacatcttcaccgccgggaagctcttagctttagcgctgatcattataatgggcatcgtacaaatctgcaagggcgagtatttctggttggagcccaagaatgcatttgagaatttccaggagccagatattggactggtggccttggcctttctgcaaggcagctttgcctacgggggctggaacttccttaactacgtcacggaggagttggtggatccatataagctgttttttgccggagctcgagaaggccacctgcccagcgtccttgctatgatccatgtcaagcgctgtacacccatccccgcacttctgtttacctgtatcagcaccctgctcatgctcgttacatctgatatgtatacattgataaactatgtcgggttcattaactaccttttttatggagttaccgttgctgggcagatagtcctgaggtggaaaaaaccagatatccccagacccatcaagccactgccctaccagggatag

SEQ ID NO: 94257 - DNA, 1293 bp, Artificial Sequence
  derived and/or modified sequence
atgggtcagtatggccaggagcttagctggaagtgcctagtgaaagcagtttgtttgcaggagcattcacagccatctcagttgctgtgcactctgctgctctgttggtgcgtactgggaagagagaggccttttagaaaggcacaatctactagttcccctctggagggcgtgcctcgatttctaaaacgcctactcctgacatgggtcaattgttcatccgtgcgttgggcaaccagagttcaggatatctttactgcaggcaaactcttggcactcgccctgattatcattatgggcattgtgcagatctgcaaaggagagtacttctggctggaacccaaaaacgcctttgagaattttcaggaaccggatattggtctagtggcattggcgttcctccaggggtcctttgcttacggcggttggaactttctgaactatgtaacagaagaattagtggatccttataagaacctgccccgagctatcttcattagcatccccctcgtcactttcgtgtatgtgttcgccaacgtggcctatgtgaccgctatgtcaccacaggagcttctggcatcaaacgcagtggccgtgacttttggtgagaaactcctgggcgttatggcatggatcatgcccatcagcgtggctctttctacattcggaggcgttaacgggtccctatttaccagtagtcggctgttcttcgccggagcgcgcgagggccacctgccatcagtcttagccatgattcacgtgaaaaggtgcacccccatccctgccctgttgtttacatgcatttctacgctcctcatgctcgtgacaagcgatatgtacactctgatcaactatgtcggctttattaactacctattttatggtgtgacagtcgccggccagatcgtgctacggtggaagaagcccgacatacctaggccgatcaagatcaacctcttgttcccaatcatctacctcctattctgggcttttctattagtattctccctatggagcgagcctgtggtgtgcggcatcgggttggctattatgttgacgggtgtgccggtgtacttcttgggcgtttactggcagcacaaacccaaatgctttagcgatttcattgaactcctcactttggtcagccagaaaatgtgcgtagtggtttaccctgaagtagaacgcggaagcggcaccgaggaggctaacgaagacatggaagaacagcaacagccaatgtaccagcccactccaacaaaagacaaggacgttgccgggcagcctcagccatag

SEQ ID NO: 94258 - DNA, 693 bp, Artificial Sequence
  derived and/or modified sequence
tgatgcctgcaggagcacagccagcccagccagctgctgtgcaccctgctgctgtgctggtgtgtgctgggccgggagcggcccttcaggaaggcccagagcaccagcagccccctggagggcgtgccccgcttcctgaagaggctgctgctgacctgggtgaactgcagctctgtgcgctgggccaccagggtgcaggacatcttcaccgctgggaagctgctggccctggccctgatcatcatcatgggcatcgtgcagatctgcaagggggagtacttctggctggagcccaagaatgcctttgagaacttccaggagccagacatcggcctggtggccctggccttcctgcagggcagctttgcctacggcggctggaacttcctgaactacgtgacagaggagctggtggacccctacaagctgttctttgctggggcccgggagggccacctgcccagcgtgctggccatgattcatgtgaagcgctgcacccccatcccagccctgctcttcacctgcatcagcaccctgctgatgctggtgaccagtgacatgtacaccctcatcaactacgtgggcttcatcaactacctgttctacggcgtgacagtggccggccagatcgtgctgcgctggaagaagccagacatcccccggcccatcaagcccctgccctaccagggctag

SEQ ID NO: 94259 - DNA, 1293 bp, Artificial Sequence
  derived and/or modified sequence
atgggccagtatggccaggagctgtcctggaagtgcctggtgaaggctgtgtgcctgcaggagcacagccagcccagccagctgctgtgcaccctgctgctgtgctggtgtgtgctgggccgggagcggcccttcaggaaggcccagagcaccagcagccccctggagggcgtgccccgcttcctgaagaggctgctgctgacctgggtgaactgcagctctgtgcgctgggccaccagggtgcaggacatcttcaccgctgggaagctgctggccctggccctgatcatcatcatgggcatcgtgcagatctgcaagggggagtacttctggctggagcccaagaatgcctttgagaacttccaggagccagacatcggcctggtggccctggccttcctgcagggcagctttgcctacggcggctggaacttcctgaactacgtgacagaggagctggtggacccctacaagaacctgccccgggccatcttcatcagcatccccctggtgacctttgtgtatgtgtttgccaacgtggcctacgtgacagccatgagcccccaggagctgctggccagcaatgctgtggccgtgacctttggagagaagctgctgggcgtgatggcctggatcatgcccatctctgtggccctgagcaccttcggcggcgtgaatggcagcctcttcaccagcagccgcctcttctttgctggggcccgggagggccacctgcccagcgtgctggccatgattcatgtgaagcgctgcacccccatcccagccctgctcttcacctgcatcagcaccctgctgatgctggtgaccagtgacatgtacaccctcatcaactacgtgggcttcatcaactacctgttctacggcgtgacagtggccggccagatcgtgctgcgctggaagaagccagacatcccccggcccatcaagatcaacctgctcttccccatcatctacctgctcttctgggccttcctgctggtgttcagcctgtggagcgagcctgtggtgtgtggcatcggcctggccatcatgctgactggagtgcctgtgtacttcctgggcgtgtactggcagcacaagcccaagtgcttcagtgacttcatcgagctgctgaccctggtgtcccagaagatgtgtgtggtggtgtacccagaggtggagcggggcagcggcacagaggaggccaatgaagacatggaggagcagcagcagcccatgtaccagcccacccccaccaaggacaaggatgtggccggccagccccagccctag

SEQ ID NO: 94260 - DNA, 693 bp, Artificial Sequence
  derived and/or modified sequence
tgatgcctgcaggagcacagccagcccagccagctgctgtgcaccctgctcctgtgttggtgcgtgctaggccgagagcgcccttttaggaaagcccagtctacaagctcacctctggaaggcgtgccccgcttcctgaagaggctattgctgacatgggttaactgttcaagcgtacgctgggccactagagtacaggacatctttactgccggcaagctgctggcattggccctcattataattatgggaattgtgcagatttgcaagggagaatacttctggttggagcccaaaaacgcttttgaaaactttcaggaacccgatattggactagtggccctggcttttttgcaggggtcgttcgcctacggtggatggaacttccttaactatgtaactgaggagcttgtggatccgtacaaactgttcttcgcaggagcccgcgaggggcacttaccaagcgtgcttgccatgatccacgtgaaaaggtgcacacccattcctgccctgcttttcacgtgtatttcaactctgctgatgctagtcacatccgacatgtatactctgattaactatgtggggttcattaactacctgttctacggagtcaccgtcgcagggcagattgttctgagatggaaaaagcccgatatacctagacctattaagcctcttccttatcagggatag

SEQ ID NO: 94261 - DNA, 1293 bp, Artificial Sequence
  derived and/or modified sequence
atgggccagtacggccaggagctgagctggaagtgcctggtgaaggcagtgtgcctgcaggagcattcgcaacctagccagcttctctgcacactgctgttgtgctggtgtgtgttggggcgcgagcgacccttccgcaaagcacagagcacctcctcccctctggaaggcgtgccacggtttctaaagaggctgctgctaacatgggttaattgtagctcagtaagatgggccacccgggtccaggacatttttacagccgggaaactgctggccctggccctgatcatcatcatgggcatcgtccagatatgcaagggagaatacttttggcttgagccgaagaatgcatttgagaactttcaggaaccagacattggactcgtcgccctggcctttttacagggctcattcgcatatgggggatggaacttcctgaattacgtcacagaggagttggtggacccttacaagaacttgccacgggccatatttatatctatccccttggtgacttttgtttacgtctttgccaatgtggcttacgtcactgcgatgtctccacaggaattgttagcttctaacgcagttgcagttactttcggtgagaaactgctgggagtgatggcatggatcatgcctatctcagtcgccctgtcaacgttcggtggcgtgaatggtagcctgtttactagttcaaggttatttttcgccggcgcccgggaggggcatctccctagcgttctggctatgatccatgtgaaaagatgcacccccattcccgctcttctgtttacatgcattagcactctgctgatgttagtgactagtgacatgtataccctaatcaactatgtcggatttattaactatctcttctacggtgtgaccgtggcaggccaaatcgtgttgaggtggaaaaaacccgatattcctcgcccgatcaaaatcaatcttcttttccctatcatctacctcctgttctgggctttcctgcttgtcttcagcctgtggtcagagccggtcgtctgcgggataggactcgccatcatgctgaccggcgtccccgtctacttcctgggcgtatattggcagcacaagccaaaatgcttctctgacttcatagagctcttgaccctggtctctcaaaagatgtgcgtggtggtgtatccagaggtggaaagaggatctggtaccgaagaagctaatgaggatatggaggaacagcaacagcctatgtaccaacccactccaactaaggataaagacgtcgccggacaacctcagccatag

SEQ ID NO: 94262 - DNA, 693 bp, Artificial Sequence
  derived and/or modified sequence
tgatgcctgcaggagcacagccaaccctcacagcttctgtgtacactgttgctgtgctggtgcgtgctgggccgtgagcggccattcaggaaggcccagtccacaagcagccccctcgagggagttcctaggttcctgaagaggctcttgcttacctgggtgaactgcagctccgtgcggtgggctacccgcgtgcaggacatttttacagcaggaaagctgttggccctagccttgattatcatcatgggaatcgtgcagatctgcaagggagaatacttctggctggagccaaaaaacgccttcgaaaactttcaagagcctgacattggtctagtagcattagcctttctgcagggctcttttgcttatggtggctggaatttcctgaactacgtgactgaggagctcgtggacccgtacaagctgttcttcgcaggcgctagagaggggcacttgcccagcgtgttagctatgatacacgttaaacggtgtaccccaatccctgccctcctctttacatgtatctcaactctgctgatgcttgtaacttcagacatgtacaccctgattaactacgttgggttcatcaactatctgttctacggagttaccgtcgccggacaaatagtgttacgttggaaaaaaccagacatacctcggcctatcaagcctctaccatatcaagggtag

SEQ ID NO: 94263 - DNA, 1293 bp, Artificial Sequence
  derived and/or modified sequence
atgggtcaatatgggcaggagctttcctggaaatgccttgtaaaagccgtatgtctgcaggagcactctcaaccctctcagcttctgtgcactttactcttgtgttggtgtgttctcggcagggaacgaccctttagaaaagctcagtccacttcctcgccacttgaaggagtacctcggttcctgaagaggctgctattgacgtgggtgaattgttcctccgtccgctgggctacccgggtacaagatatttttaccgccggaaagcttttggctctggcgctaattattataatgggtattgtgcagatttgtaagggcgaatacttctggttggaacctaagaacgcgttcgagaactttcaggaaccagacatcggcctcgtagcactcgcgttcctccaaggatccttcgcttatgggggatggaattttctaaattacgtgactgaagagttggtagatccgtataagaatcttcctagagccatcttcatctccatcccactggtgacgtttgtatatgtgttcgctaatgtggcttacgttacggctatgtcccctcaggagctactggctagtaatgctgtggcagttacgttcggcgagaagctcctgggtgtgatggcctggataatgccaatctccgtcgccctgagcacctttggtggagttaatggatctctcttcacttcaagtcgtttattctttgcgggtgccagagaaggacatctccccagtgtccttgcgatgattcatgtaaaaagatgtacgcccatccctgctctgctgtttacatgcatctctacgctgctgatgctggtcacaagcgacatgtacacgctcattaactacgtgggttttattaactacctattttacggtgtaaccgtcgcgggacagatcgttctccggtggaagaagcctgatatcccccgacctatcaagatcaaccttttgtttccgattatctacctgttgttttgggcgttcctgctggtcttcagcttgtggagtgaaccagtagtgtgtgggattggactggcaattatgctgacaggcgtcccagtgtatttcttaggagtttactggcagcataaaccaaaatgtttcagcgacttcatagaactgttaaccctggtatcacagaagatgtgcgtggttgtatacccggaggtggagcgaggaagcggcaccgaggaggccaacgaggatatggaagagcagcaacagccaatgtatcagccaacacctactaaagacaaagacgttgctggacaacctcagccatag

SEQ ID NO: 94264 - DNA, 1752 bp, Artificial Sequence
  derived and/or modified sequence
caacctccagcctgggcacccagacccagagggctgctgggagggacatgcctcaccccttttgctccagctggaggggagggagtctgtgggagctggccagagcgtggcagaaggcagagaagtgaacgccccagcaaaagtgctcctcacatgggtcaactgttccagtgtgcggtgggccacccgggttcaagacatcttcacagctgggaagctcctggccttggccctgattatcatcatggggattgtacagatatgcaaaggagagtacttctggctggagccaaagaatgcatttgagaatttccaggaacctgacatcggcctcgtcgcactggctttccttcagggctcctttgcctatggaggctggaactttctgaattacgtgactgaggagcttgttgatccctacaagaaccttcccagagccatcttcatctccatcccactggtcacatttgtgtatgtctttgccaatgtcgcttatgtcactgcaatgtccccccaggagctgctggcatccaacgccgtcgctgtgacttttggagagaagctcctaggagtcatggcctggatcatgcccatttctgttgccctgtccacatttggaggagttaatgggtctctcttcacctcctctcggctgttcttcgctggagcccgagagggccaccttcccagtgtgttggccatgatccacgtgaagcgctgcaccccaatcccagccctgctcttcacatgcatctccaccctgctgatgctggtcaccagcgacatgtacacactcatcaactatgtgggcttcatcaactacctcttctatggggtcacggttgctggacagatagtccttcgctggaagaagcctgatatcccccgccccatcaagatcaacctgctgttccccatcatctacttgctgttctgggccttcctgctggtcttcagcctgtggtcagagccggtggtgtgtggcattggcctggccatcatgctgacaggagtgcctgtctatttcctgggtgtttactggcaacacaagcccaagtgtttcagtgacttcattgagctgctaaccctggtgagccagaagatgtgtgtggtcgtgtaccccgaggtggagcggggctcagggacagaggaggctaatgaggacatggaggagcagcagcagcccatgtaccaacccactcccacgaaggacaaggacgtggcggggcagccccagccctgaggaccaccattccctggctactctctccttcctcccccttttatcctacctccctgccttggtcctgccaacacatgcgagtacacacacacccctctctctgcttttgtcaggcagtggtaggactttggtgtgggtggtgagaaattgtaaacaaaaactgacattcatacccaaagaaccagcctctcaccccagggtccatgtcccaggccccactccagtgctgcccacactcccagctgctggaggagaggggagatgccaaggtgccctgcaggacctccctccgggccacaccctcagctgcctcttcaggaaccggagctcattactgccttccctcccagggaggccccttcagagaggagaggccacaggagctgcattgtggggggacaggctcaagcaattctgtccccatcaaggggtcagctggagagacccaagaccctatctgttcaccagggacccaaaatccaaggggatgcttccctctgccctctttc

SEQ ID NO: 94265 - DNA, 1819 bp, Artificial Sequence
  derived and/or modified sequence
gtggtgattcagcagaaaccccagctccagcagctggcgcaggagctaacaggataagaaggaaggggaagagagagccaggaagggaggaggggaggggatggggcagtatgggcaggagcttagctggaagtgtttggtaaaagctgtgtgcctccaggagcactcacagccctcacagcttctctgcaccctcctcctctgctggtgtgtccttggaagagagaggcccttccggaaggctcagagcacctcctctcctttggagggggttccgagatttctaaaacgtttgctcctcacatgggtcaactgttccagtgtgcggtgggccacccgggttcaagacatcttcacagctgggaagctcctggccttggccctgattatcatcatggggattgtacagatatgcaaaggagagtacttctggctggagccaaagaatgcatttgagaatttccaggaacctgacatcggcctcgtcgcactggctttccttcagggctcctttgcctatggaggctggaactttctgaattacgtgactgaggagcttgttgatccctacaagaaccttcccagagccatcttcatctccatcccactggtcacatttgtgtatgtctttgccaatgtcgcttatgtcactgcaatgtccccccaggagctgctggcatccaacgccgtcgctgtgacttttggagagaagctcctaggagtcatggcctggatcatgcccatttctgttgccctgtccacatttggaggagttaatgggtctctcttcacctcctctcggctgttcttcgctggagcccgagagggccaccttcccagtgtgttggccatgatccacgtgaagcgctgcaccccaatcccagccctgctcttcacatgcatctccaccctgctgatgctggtcaccagcgacatgtacacactcatcaactatgtgggcttcatcaactacctcttctatggggtcacggttgctggacagatagtccttcgctggaagaagcctgatatcccccgccccatcaagatcaacctgctgttccccatcatctacttgctgttctgggccttcctgctggtcttcagcctgtggtcagagccggtggtgtgtggcattggcctggccatcatgctgacaggagtgcctgtctatttcctgggtgtttactggcaacacaagcccaagtgtttcagtgacttcattgagctgctaaccctggtgagccagaagatgtgtgtggtcgtgtaccccgaggtggagcggggctcagggacagaggaggctaatgaggacatggaggagcagcagcagcccatgtaccaacccactcccacgaaggacaaggacgtggcggggcagccccagccctgaggaccaccattccctggctactctctccttcctcccccttttatcctacctccctgccttggtcctgccaacacatgcgagtacacacacacccctctctctgcttttgtcaggcagtggtaggactttggtgtgggtggtgagaaattgtaaacaaaaactgacattcatacccaaagaaccagcctctcaccccagggtccatgtcccaggccccactccagtgctgcccacactcccagctgctggaggagaggggagatgccaaggtgccctgcaggacctccctccgggccacaccctcagctgcctcttcaggaaccggagctcattactgccttccctcccagggaggccccttcagagaggagaggccacaggagctgcattgtggggggacaggctcaagcaattctgtccccatca

SEQ ID NO: 94266 - protein, 311 aa, Artificial Sequence
  derived and/or modified sequence
MGQLFQCAVGHPGSRHLHSWEAPGLGPDYHHGDCTDMQRNLPRAIFISIPLVTFVYVFANVAYVTAMSPQELLASNAVAVTFGEKLLGVMAWIMPISVALSTFGGVNGSLFTSSRLFFAGAREGHLPSVLAMIHVKRCTPIPALLFTCISTLLMLVTSDMYTLINYVGFINYLFYGVTVAGQIVLRWKKPDIPRPIKINLLFPIIYLLFWAFLLVFSLWSEPVVCGIGLAIMLTGVPVYFLGVYWQHKPKCFSDFIELLTLVSQKMCVVVYPEVERGSGTEEANEDMEEQQQPMYQPTPTKDKDVAGQPQP

SEQ ID NO: 94267 - DNA, 936 bp, Artificial Sequence
  derived and/or modified sequence
atgggccagctgttccagtgcgccgtgggccaccccggcagcagacacctgcacagctgggaggcccccggcctgggccccgactaccaccacggcgactgcaccgacatgcagagaaacctgcccagagccatcttcatcagcatccccctggtgaccttcgtgtacgtgttcgccaacgtggcctacgtgaccgccatgagcccccaggagctgctggccagcaacgccgtggccgtgaccttcggcgagaagctgctgggcgtgatggcctggatcatgcccatcagcgtggccctgagcaccttcggcggcgtgaacggcagcctgttcaccagcagcagactgttcttcgccggcgccagagagggccacctgcccagcgtgctggccatgatccacgtgaagagatgcacccccatccccgccctgctgttcacctgcatcagcaccctgctgatgctggtgaccagcgacatgtacaccctgatcaactacgtgggcttcatcaactacctgttctacggcgtgaccgtggccggccagatcgtgctgagatggaagaagcccgacatccccagacccatcaagatcaacctgctgttccccatcatctacctgctgttctgggccttcctgctggtgttcagcctgtggagcgagcccgtggtgtgcggcatcggcctggccatcatgctgaccggcgtgcccgtgtacttcctgggcgtgtactggcagcacaagcccaagtgcttcagcgacttcatcgagctgctgaccctggtgagccagaagatgtgcgtggtggtgtaccccgaggtggagagaggcagcggcaccgaggaggccaacgaggacatggaggagcagcagcagcccatgtaccagcccacccccaccaaggacaaggacgtggccggccagccccagccctag

SEQ ID NO: 94268 - DNA, 936 bp, Artificial Sequence
  derived and/or modified sequence
atgggtcaactgtttcaatgcgcggtgggacatcctggttcacgtcatctccacagctgggaggccccagggttgggccctgattatcaccatggagattgcaccgatatgcagcggaatcttccccgcgctattttcatcagtatacccctcgtgacattcgtgtatgtgtttgcaaacgtggcctatgtgacagcaatgtcccctcaggagcttctggcctccaacgcagtggctgtgaccttcggagaaaagctactcggcgtaatggcctggattatgccgatttccgtggcattaagtacttttggcggggttaatggctctctgtttacttcaagcagacttttttttgccggggcacgggagggccacctgccgagcgtcctcgccatgatacatgttaaaaggtgcactcctattcccgcgctgctctttacatgtatctctacattgctgatgcttgtcaccagcgacatgtacactttaataaactacgtcgggtttataaactatctcttctatggtgtgaccgtagcaggccagattgttttacgctggaagaagcccgatatccccagaccaatcaagataaacctcctctttcccataatctacctgctcttctgggcctttctgctggtgttcagcttgtggagtgagccagttgtctgcggtatagggcttgccatcatgttgacgggtgtcccggtttatttcctgggggtgtattggcaacacaagccaaagtgcttttcagatttcatcgagctgctcacactggtctcgcagaaaatgtgtgtggtcgtgtatcctgaggtggaaagaggaagcgggacagaggaggctaacgaggatatggaagaacagcagcaacccatgtaccagccgacccctacaaaagacaaggacgtagcaggacagccccaaccctag

SEQ ID NO: 94269 - DNA, 936 bp, Artificial Sequence
  derived and/or modified sequence
atgggccagctgttccagtgtgctgtgggccaccctggcagccgccacctgcacagctgggaggcccctggcctgggccctgactaccaccacggggactgcacagacatgcagaggaacctgccccgggccatcttcatcagcatccccctggtgacctttgtgtatgtgtttgccaacgtggcctacgtgacagccatgagcccccaggagctgctggccagcaatgctgtggccgtgaccttcggggagaagctgctgggcgtgatggcctggatcatgcccatctctgtggccctgagcacctttggaggagtgaatggcagcctcttcaccagcagccgcctcttctttgctggggcccgggagggccacctgcccagcgtgctggccatgatccacgtgaagcgctgcacccccatcccagccctgctcttcacctgcatcagcaccctgctgatgctggtgaccagtgacatgtacaccctcatcaactacgtgggcttcatcaactacctgttctatggagtgacagtggccggccagatcgtgctgcgctggaagaagccagacatcccccggcccatcaagatcaacctgctcttccccatcatctacctgctcttctgggccttcctgctggtgttcagcctgtggagcgagcctgtggtgtgtggcatcggcctggccatcatgctgactggagtgcctgtgtacttcctgggcgtgtactggcagcacaagcccaagtgcttcagtgacttcatcgagctgctgaccctggtgtcccagaagatgtgtgtggtggtgtacccagaggtggagcggggcagcggcacagaggaggccaatgaagacatggaggagcagcagcagcccatgtaccagcccacccccaccaaggacaaggatgtggccggccagccccagccctag

SEQ ID NO: 94270 - DNA, 936 bp, Artificial Sequence
  derived and/or modified sequence
atgggccagctgttccagtgcgccgtgggccaccccggcagccggcacctacactcatgggaggcccctggactgggtccagactatcatcatggagactgtacagatatgcagcgcaatctcccccgggccatctttatatctattccgctggtgactttcgtgtacgttttcgcaaatgtcgcctatgtaacggctatgtcgccacaagagctgctagcaagcaacgcagtggcagtgacctttggcgaaaagctgctgggcgtcatggcatggataatgcccatttcagttgccctatcaacgtttggtggtgtaaatggaagcctatttaccagtagtaggctcttctttgccggtgcgcgtgaaggtcacctgcccagtgtgttggcgatgatccacgtcaaacgctgcacgcccattccagctctcctatttacttgtatctcgaccctcctgatgctagttactagcgacatgtataccctgattaattatgttggtttcatcaactatcttttttacggcgtaactgttgccggccaaatcgtgttgcgctggaagaagccggatataccgcggcccattaagatcaatctactgtttcccattatatatttgttgttctgggcgttccttctcgtgtttagtctctggtctgagcccgtggtctgcggcatcggactcgccatcatgctaacaggcgtacccgtttactttcttggagtttactggcagcacaagccgaagtgcttcagcgacttcatcgaacttttgaccctcgtatcccaaaagatgtgtgttgttgtttatccggaagtggagagagggtcaggcaccgaggaggcgaacgaggacatggaggaacaacagcaacccatgtaccaaccgacgccgaccaaagataaggatgtagcaggtcagccccaaccttag

SEQ ID NO: 94271 - DNA, 936 bp, Artificial Sequence
  derived and/or modified sequence
atgggacagctctttcaatgcgccgtggggcaccctggctccagacaccttcatagctgggaggctccgggtctagggccagactaccatcacggggattgtacagacatgcagcgtaatctgcctagggccattttcatcagtattcccctcgttacattcgtgtacgtgttcgctaatgtggcctacgtgactgctatgagcccccaggagctcttagccagtaacgccgtggccgttacattcggcgagaagctgctgggagtaatggcctggatcatgccgataagtgtggctctgtccactttcggcggagtgaatggttcactcttcacatcaagcaggctgttttttgctggagctagagagggtcacctgcccagcgttctggccatgattcacgtgaagcgctgcacacccatccctgccctgttgtttacctgtatttcaactctccttatgctggttacaagcgacatgtatactctcattaactatgtgggatttattaattacctgttctatggagtcactgtcgccggacaaattgtgttaagatggaaaaagccagatataccaagaccaattaagatcaatttgcttttcccaattatttatctactgttctgggccttcctcctggtgtttagtctctggtcagaacctgtagtttgcggaatagggctcgcgatcatgcttaccggggtaccagtgtatttccttggcgtctactggcagcacaagccaaaatgtttcagtgacttcattgagcttcttactctggttagccagaagatgtgcgtagtggtctatccagaggttgagagaggaagcgggacagaagaagccaatgaggatatggaggagcaacagcaacccatgtaccagccaacccccactaaggacaaagatgtggctgggcagcctcagccatag

SEQ ID NO: 94272 - DNA, 3066 bp, Artificial Sequence
  derived and/or modified sequence
tgtgcctccaggagcactcacagccctcacagcttctctgcaccctcctcctctgctggtgtgtccttggaagagagaggcccttccggaaggctcagagcacctcctctcctttggagggggttccgagatttctaaaacgtttgctcctcacatgggtcaactgttccagtgtgcggtgggccacccgggttcaagacatcttcacagctgggaagctcctggccttggccctgattatcatcatggggattgtacagatatgcaaaggagagtacttctggctggagccaaagaatgcatttgagaatttccaggaacctgacatcggcctcgtcgcactggctttccttcagggctcctttgcctatggaggctggaactttctgaattacgtgactgaggagcttgttgatccctacaagctgttcttcgctggagcccgagagggccaccttcccagtgtgttggccatgatccacgtgaagcgctgcaccccaatcccagccctgctcttcacatgcatctccaccctgctgatgctggtcaccagcgacatgtacacactcatcaactatgtgggcttcatcaactacctcttctatggggtcacggttgctggacagatagtccttcgctggaagaagcctgatatcccccgccccatcaagcccctgccctaccaggggtgagtgtgggaccacagagccgagggaagcccagcctttgcccttgaggatgtgtctctgtgggtgaagaagagagagaatgccccagtccctagtcctgggggccacgtggcctacacagttcatacgcctcatgcctctgctccacagatcaacctgctgttccccatcatctacttgctgttctgggccttcctgctggtcttcagcctgtggtcagagccggtggtgtgtggcattggcctggccatcatgctgacaggagtgcctgtctatttcctgggtgtttactggcaacacaagcccaagtgtttcagtgacttcattgagctgctaaccctggtgagccagaagatgtgtgtggtcgtgtaccccgaggtggagcggggctcagggacagaggaggctaatgaggacatggaggagcagcagcagcccatgtaccaacccactcccacgaaggacaaggacgtggcggggcagccccagccctgaggaccaccattccctggctactctctccttcctcccccttttatcctacctccctgccttggtcctgccaacacatgcgagtacacacacacccctctctctgcttttgtcaggcagtggtaggactttggtgtgggtggtgagaaattgtaaacaaaaactgacattcatacccaaagaaccagcctctcaccccagggtccatgtcccaggccccactccagtgctgcccacactcccagctgctggaggagaggggagatgccaaggtgccctgcaggacctccctccgggccacaccctcagctgcctcttcaggaaccggagctcattactgccttccctcccagggaggccccttcagagaggagaggccacaggagctgcattgtggggggacaggctcaagcaattctgtccccatcaaggggtcagctggagagacccaagaccctatctgttcaccagggacccaaaatccaaggggatgcttccctctgccctctttcctgcccctccccatcatacctgcacccaccccagccagggctccctgtccagaattcggttctcctcaggacgccaactcccagagctaaggaccaaggagaagaacagcctctccacccccaagccaggcggttgaggaacatattgagaaaggttcagattgcagaaacccagccctgcccctgcctcctgcatccagcccccaacatggtgccaaagcttccagaagccaaaaagcttctgatttttaaggtagtgggcatctctctcctaatgacgaagctgctcagcaactccacctgcccgccgcaggaaggagcagtcccctgctatccctgcagccactcccagcacacccgcacacagccagcaccaccgcccccaccgtgcacttctcctctctgggccttggcttgggaccaggtacgaaggatccccaagcccttcaggcctgagatcagagccagatcagccttaagtcacctcccatccaagaacttggcctaaaaatactcccctatttctaaccctcaggacggatctgatattaaatgccttccctgggaggaagggtgctttccccctccctagaggtgcccattccataccctgggagactgaggagagcattggctgaagcccagttcctttcccatccatccccaactccaataatcccccactcctcgcaggtctcagtgtcatgctgtcttggggcagggtgaaagggtagtggcagcagggcgcccactctggagatcctcaaaaaaggccctcctctgtggctggcagcctctgacctttccctgggcttcaaaggaaggctatggagtttgctgtgggccctgcaaccttcccagccactcctgctgcactaaggacttaggatccttttatcacaaatcgggattctctcccccaccccgaattctgtctgcttaaactggaatacacaggagcccttcctggcctggatggtgtctcccagcttccccgcccagcttgcccaccccatagttggtgagatgccaagtttggtctgagttgtgaccccttcagagtagatgcccggcaggctggggttggcccctggagggtcaggggaccatcttcttattccctcttttctcattcctccaacttcctcccctccttcaattatttttttgtaaagttgatgccttactttttggataaatatttttgaagctggtatttctatttcttttggattttttttaatgtaaggttgttttgggggatggagttagaaccttaatgataatttctttcgtttggtgtaggttttagagatttgttttgtggagaggtttttttcttttgatgtaataaaatttaaaatggaaatgaa

SEQ ID NO: 94273 - DNA, 1499 bp, Artificial Sequence
  derived and/or modified sequence
agcctgggcacccagacccagagggctgctgggagggacatgcctcaccccttttgctccagctggaggggagggagtctgtgggagctggccagagcgtggcagaaggcagagaagtgaacgccccagcaaaagtgctcctcacatgggtcaactgttccagtgtgcggtgggccacccgggttcaagacatcttcacagctgggaagctcctggccttggccctgattatcatcatggggattgtacagatatgcaaaggaaccttcccagagccatcttcatctccatcccactggtcacatttgtgtatgtctttgccaatgtcgcttatgtcactgcaatgtccccccaggagctgctggcatccaacgccgtcgctgtgacttttggagagaagctcctaggagtcatggcctggatcatgcccatttctgttgccctgtccacatttggaggagttaatgggtctctcttcacctcctctcggctgttcttcgctggagcccgagagggccaccttcccagtgtgttggccatgatccacgtgaagcgctgcaccccaatcccagccctgctcttcacatgcatctccaccctgctgatgctggtcaccagcgacatgtacacactcatcaactatgtgggcttcatcaactacctcttctatggggtcacggttgctggacagatagtccttcgctggaagaagcctgatatcccccgccccatcaagatcaacctgctgttccccatcatctacttgctgttctgggccttcctgctggtcttcagcctgtggtcagagccggtggtgtgtggcattggcctggccatcatgctgacaggagtgcctgtctatttcctgggtgtttactggcaacacaagcccaagtgtttcagtgacttcattgagctgctaaccctggtgagccagaagatgtgtgtggtcgtgtaccccgaggtggagcggggctcagggacagaggaggctaatgaggacatggaggagcagcagcagcccatgtaccaacccactcccacgaaggacaaggacgtggcggggcagccccagccctgaggaccaccattccctggctactctctccttcctcccccttttatcctacctccctgccttggtcctgccaacacatgcgagtacacacacacccctctctctgcttttgtcaggcagtggtaggactttggtgtgggtggtgagaaattgtaaacaaaaactgacattcatacccaaagaaccagcctctcaccccagggtccatgtcccaggccccactccagtgctgcccacactcccagctgctggaggagaggggagatgccaaggtgccctgcaggacctccctccgggccacaccctcagctgcctcttcaggaaccggagctcattactgccttccctcccagggaggccccttcagagaggagaggccacaggagctgcattgtggggggacaggctcaagcaattctgt

SEQ ID NO: 94274 - protein, 269 aa, Artificial Sequence
  derived and/or modified sequence
MNQEDLDPDSTTDVGDVTNTEEELIRECEEMWKDMEECQNKLSLIGTETLTDSNAQLSLLIMQVKCLTAELSQWQKKTPETIPLTEDVLITLGKEEFQKLRQDLEMVLSTKESKNEKLKEDLEREQRWLDEQQQIMESLNVLHSELKNKVETFSESRIFNELKTKMLNIKEYKEKLLSTLGEFLEDHFPLPDRSVKKKKKNIQESSVNLITLHEMLEILINRLFDVPHDPYVKISDSFWPPYVELLLRNGIALRHPEDPTRIRLEAFHQ

SEQ ID NO: 94275 - protein, 132 aa, Artificial Sequence
  derived and/or modified sequence
MNQEDLDPDSTTDVGDVTNTEEELIRECEEMWKDMEECQNKLSLIGTETLTDSNAQLSLLIMQVKCLTAELSQWQKKTPETIPLTEDVLITLGKEEFQKLRQDLEMVLSTKESKNEKLKEDLEREQRWLDEQ

SEQ ID NO: 94276 - DNA, 399 bp, Artificial Sequence
  derived and/or modified sequence
atgaaccaggaggacctggaccccgacagcaccaccgacgtgggcgacgtgaccaacaccgaggaggagctgatcagagagtgcgaggagatgtggaaggacatggaggagtgccagaacaagctgagcctgatcggcaccgagaccctgaccgacagcaacgcccagctgagcctgctgatcatgcaggtgaagtgcctgaccgccgagctgagccagtggcagaagaagacccccgagaccatccccctgaccgaggacgtgctgatcaccctgggcaaggaggagttccagaagctgagacaggacctggagatggtgctgagcaccaaggagagcaagaacgagaagctgaaggaggacctggagagagagcagagatggctggacgagcagtag

SEQ ID NO: 94277 - DNA, 810 bp, Artificial Sequence
  derived and/or modified sequence
atgaaccaggaagacctcgacccagacagtactacggacgtcggtgatgtgacaaacactgaggaggagttgatacgggaatgcgaagaaatgtggaaagatatggaggagtgccaaaacaaactgtctctgatcggtaccgagaccctcacagattccaatgcccagctgtcgcttctcatcatgcaggttaaatgcctgactgccgaattatcccagtggcagaaaaaaacacccgagactatccctctcaccgaagatgtcctgattacattagggaaggaggagtttcagaaactgcggcaggatctggaaatggtcctcagcacgaaggaatccaagaatgaaaagttgaaagaggacctggagagagaacaaaggtggttggacgaacagcagcaaatcatggagagcttgaatgtcctgcattctgagctgaaaaacaaggtcgaaacgtttagtgaatcacgaatcttcaatgagctgaagacaaagatgctgaacatcaaagagtataaagaaaaactgctctccacactgggagagttcctggaggatcacttccctctgccagacaggtctgtaaagaaaaagaagaaaaatatccaggaatcatcagtgaatcttatcacccttcatgagatgttggaaattctgattaaccggctctttgatgtgcctcacgacccatatgtgaaaatcagcgattccttctggcctccctacgtcgaactccttcttcgcaacgggattgcattgcggcaccccgaggacccaacaaggatccggctagaagcatttcaccaatag

SEQ ID NO: 94278 - DNA, 810 bp, Artificial Sequence
  derived and/or modified sequence
atgaaccaggaggatctggaccctgactcaactacagacgtgggtgacgtgacaaataccgaggaggagttgatccgtgaatgcgaagagatgtggaaagacatggaggagtgccagaacaagctcagcctcatcggcaccgaaacgctgaccgattctaatgcccagctgtctctgttgattatgcaggtgaaatgcctgactgccgagctgtctcagtggcagaaaaaaactcccgagactatacccctcactgaagatgtgctgatcactctgggaaaagaggagtttcaaaagctccgccaggatctcgaaatggtcctgtcgaccaaggagtccaaaaacgaaaaattgaaagaggacttagagcgggaacagcggtggctcgacgaacagcagcagatcatggagtccctcaacgtactccactccgaactgaagaataaagtggagacattctcagaatcacggattttcaatgaactaaagacaaagatgctaaatattaaagagtacaaggagaaattgctgagtaccctgggtgaatttcttgaagaccacttccccctgcctgatagatcagtgaagaaaaagaagaagaacattcaggaatcctcagtgaacctgattacactgcatgagatgctggagatcttgatcaataggttattcgatgtgccccatgacccatacgtaaagatttccgacagtttttggcctccttacgtggaactgttgcttcgaaacggcatcgcactcagacatcccgaagatcccacccggatccggcttgaggcgttccaccagtag

SEQ ID NO: 94279 - DNA, 399 bp, Artificial Sequence
  derived and/or modified sequence
atgaatcaggaagaccttgatcccgatagcaccaccgacgtcggagacgtgacgaacaccgaggaagaactgatccgtgaatgtgaggaaatgtggaaagacatggaagagtgtcaaaataagctgtcactgatcggaactgaaacgctgaccgattccaacgcacagctcagtctcctgatcatgcaggtgaaatgcctgactgcggagctctcacagtggcaaaagaagacgccagaaacgattccgctgacggaggacgtgctcatcaccctcgggaaggaagaattccaaaagttgcggcaggatctagagatggtcttgagtacaaaggaatccaagaacgagaagctgaaggaggatctggaaagagagcagaggtggcttgacgaacagtag

SEQ ID NO: 94280 - DNA, 810 bp, Artificial Sequence
  derived and/or modified sequence
atgaatcaagaggatttagatcccgattctaccactgatgttggtgacgtgaccaatactgaggaggagctgatccgggaatgtgaggaaatgtggaaagatatggaagagtgtcaaaacaaattatccctgattggcacggaaacactcaccgactccaacgcccagctgagccttttgatcatgcaggtgaaatgccttacagcagagctatctcagtggcaaaaaaagactccagagaccatccctcttaccgaggacgtcttgatcaccctgggcaaagaagaattccagaaattgaggcaggatcttgagatggtgctatcaacaaaagaaagtaagaatgagaagctgaaggaggatctggaacgcgagcagcggtggctcgatgaacagcagcaaatcatggaaagtctgaatgtactgcatagcgagcttaagaacaaggtagaaaccttctcagaatcaagaatctttaacgaactgaagacaaaaatgctaaacataaaggagtacaaggagaagctgctgtctaccctcggcgaatttctcgaggatcattttccgcttcctgacagatctgtgaaaaagaaaaagaagaatatccaggaatcttccgtgaacctgatcaccctgcatgagatgctggaaatccttattaaccgcctgtttgacgtacctcacgacccctatgtgaagatcagtgatagcttttggcccccttatgtcgaactgctgttaaggaacggcattgcccttcgacaccccgaggacccaacaaggattagactagaggcattccatcagtag

SEQ ID NO: 94281 - DNA, 810 bp, Artificial Sequence
  derived and/or modified sequence
atgaaccaggaggacctggaccctgacagcaccacagatgtgggagatgtgaccaacacagaggaggagctgatcagagaatgtgaggagatgtggaaggacatggaggagtgccagaacaagctgagcctgattggaacagagaccctgacagacagcaatgcccagctgagcctgctgatcatgcaggtgaagtgcctgacagctgagctgagccagtggcagaagaagaccccagagaccatccccctgacagaagatgtgctgatcaccctgggcaaggaggagttccagaagctgcggcaggacctggagatggtgctgagcaccaaggagagcaagaatgagaagctgaaggaggacctggagcgggagcagcgctggctggatgagcagcagcagatcatggagagcctgaatgtgctgcacagcgagctgaagaacaaggtggagaccttcagcgagagccgcatcttcaatgagctgaagaccaagatgctgaacatcaaggagtacaaggagaagctgctgagcaccctgggggagttcctggaggaccacttccccctgcctgacagatctgtgaagaagaagaagaagaacatccaggagagctctgtgaacctgatcaccctgcacgagatgctggagatcctgatcaacagactctttgatgtgccccatgacccctacgtgaagatcagtgacagcttctggccaccctacgtggagctgctgctgagaaatggaattgccctgcggcaccctgaggaccccacccgcatccggctggaggccttccaccagtag

SEQ ID NO: 94282 - DNA, 399 bp, Artificial Sequence
  derived and/or modified sequence
atgaaccaggaggacctggaccctgacagcaccacagatgtgggagatgtgaccaacacagaggaggagctgatcagagaatgtgaggagatgtggaaggacatggaggagtgccagaacaagctgagcctgattggaacagagaccctgacagacagcaatgcccagctgagcctgctgatcatgcaggtgaagtgcctgacagctgagctgagccagtggcagaagaagaccccagagaccatccccctgacagaagatgtgctgatcaccctgggcaaggaggagttccagaagctgcggcaggacctggagatggtgctgagcaccaaggagagcaagaatgagaagctgaaggaggacctggagcgggagcagcgctggctggatgagcagtag

SEQ ID NO: 94283 - DNA, 810 bp, Artificial Sequence
  derived and/or modified sequence
atgaaccaggaggacctggaccccgacagcaccaccgacgtgggcgacgttaccaacaccgaggaggaattgatccgagaatgtgaagagatgtggaaggacatggaggagtgtcaaaacaagctatcactaattggtaccgagacgctaaccgactctaacgcccagctgagcttactgatcatgcaggtcaagtgcctgacagcggaactttcccagtggcagaaaaaaacacccgagactatcccgttgaccgaggacgtcctcattacattaggaaaagaggaattccagaaattacgtcaggaccttgagatggtccttagcactaaggaaagcaaaaatgaaaaactgaaggaagacctagagcgagagcaacggtggttggatgagcaacaacagatcatggaatctctcaacgtgctgcacagcgagttgaaaaacaaggtagaaacgttctccgaatctcggatcttcaacgaactaaagacaaaaatgttgaatatcaaagaatacaaggaaaagctgctgtcaaccctgggcgagtttctcgaagatcatttccccttgccagacaggagtgtgaagaagaagaagaaaaatatccaggaatcctccgttaacctcatcaccctgcacgagatgctggagatactgattaatcgtttgttcgatgtgccccatgatccgtacgtgaaaatatccgactccttctggcctccttatgtcgaacttctgttgaggaatggcatcgccctaagacacccagaggatcccacacggatacggctggaagcctttcatcagtag

SEQ ID NO: 94284 - DNA, 1734 bp, Artificial Sequence
  derived and/or modified sequence
cgcgcagaagtccggggctggcaagcgcttcctgcgcagcgcctaggcgacctggagtttgtgacgctgtgatggtctagaggctggagattcaagatctgggtgccatcattttctggttctgttgatgaccctcttccaggttacatacagcttacatcttgcatcctcaagcgtttttcttataaggctaaaaattcacaaagcatatatcaatgaatcaggaggatctagatccggatagtactacagatgtgggagatgttacaaatactgaagaagaacttattagagaatgtgaagaaatgtggaaagatatggaagaatgtcagaataaattatcacttattggaactgaaacactcaccgattcaaatgctcagctatcattgttaattatgcaagtaaaatgtttaaccgctgaactcagtcaatggcagaaaaaaacacctgaaacaattcccttgactgaagacgttctcataacattaggaaaagaagagttccaaaagctgagacaagatcttgaaatggtactgtccactaaggagtcaaagaatgaaaagttaaaggaagacttagaaagggaacaacggtggttggatgaacagcaacagataatggaatctcttaatgtactacacagtgaattgaaaaataaggttgaaacattttctgaatcaagaatctttaatgaactgaaaactaaaatgcttaatataaaagaatataaggagaaactcttgagtaccttgggcgagtttctagaagaccattttcctctgcctgatagaagtgttaaaaagaaaaagaaaaacattcaagaatcatctgtaaacctgataacactgcatgaaatgttagagattcttataaatagattatttgatgttccacatgatccatatgtcaaaattagtgattccttttggccaccttatgttgagctgctgctgcgtaatggaattgccttgagacatccagaagatccaacccgaataagattagaagctttccatcagtaaaaggatgttttcttttttcacacagtaaaaattcttatcattcaaggatattggaaccacaggactatttggataaaaaacattatttgcaaattaatgcgcataggccatcttacttttattgcaaaatggcatgtgctgccatctattattcatttttaaatggtcatttcttattcagtgagtgctttagtgttttaaactatatggataagaatgcaggtagataatattctaggcataaaacatttaatgtaccttacctcatgcaatattctttggattctttgttgatttatgatattgctaatataatattttcttaaaatatataacaatatcttttatgcattttgagttccagctggtgcttctttatatttagaaattataatgggaaggtcatttaatttacagatggttttaaaattgaggtaatatctgaggtggcataatttaaaaatatttagcaaatttgtttcatatatactgtcttatttctagatttgtttaaaattggaatatgaaaaactaatggataaagctagcataaaattgatattttagtttgtattattaatatatcatgttaccttatatattaatctactcttgattctgctaattattaccaacaaaattgtattcatgacattttattaatcctctgtgaattttctgtaaataaaattatttctgaaaatctcta

SEQ ID NO: 94285 - DNA, 810 bp, Artificial Sequence
  derived and/or modified sequence
atgaaccaggaggacctggaccccgacagcaccaccgacgtgggcgatgtgaccaacacagaggaggagctgatcagagaatgcgaggagatgtggaaagacatggaagaatgtcagaataaactttccttgatcggtactgagactctgacagacagcaatgctcagctctccctgttgattatgcaggtgaaatgtcttactgctgaactcagccagtggcagaaaaaaactccagaaacaatcccactcacagaggacgtcctcatcacactgggcaaggaagagtttcagaagctgcgtcaagacctagaaatggtgttaagcactaaggaaagtaagaatgagaagctcaaagaagatcttgagagagaacagagatggctagacgaacaacagcaaattatggagagcctaaacgtattgcatagtgaactgaagaacaaagtggagaccttcagcgagagtcgaatctttaatgagttgaagacaaaaatgctgaatatcaaagagtacaaggagaagctcttatctacacttggcgagttcctggaggatcatttcccgctgccggacaggtccgtgaagaaaaaaaaaaagaatatccaggagtcctcagtgaacctgataactctgcacgagatgctcgaaattctcattaacaggttatttgatgtgccacacgatccatatgttaaaatttccgacagcttctggccaccctacgtcgagcttctcttgcggaacgggatcgcacttcggcaccctgaggatcccaccaggatcaggctcgaggccttccaccagtag

SEQ ID NO: 94286 - DNA, 399 bp, Artificial Sequence
  derived and/or modified sequence
atgaaccaggaggacctggaccccgacagcaccaccgacgtgggcgacgtgactaacacagaagaggagctcatccgggagtgcgaagagatgtggaaggatatggaagaatgtcagaacaagctgtctctgatcgggactgaaacgttaaccgatagtaacgcccagctgtccctgttgattatgcaagttaagtgcttgactgccgagttgagtcagtggcagaaaaagactcccgaaactattcccttgaccgaggatgtactcattaccttgggaaaggaggagttccaaaaactgagacaagatcttgaaatggtgttgagcacgaaagaatccaagaacgagaagctcaaggaagatctcgaaagagagcagagatggctggacgagcagtag

SEQ ID NO: 94287 - DNA, 810 bp, Artificial Sequence
  derived and/or modified sequence
atgaaccaggaggacctggaccccgacagcaccaccgacgtgggcgatgtgactaacacagaagaggagctgatcagggagtgtgaagagatgtggaaggacatggaggaatgccagaacaaactgtccctgatcggcaccgagacccttacagacagtaacgctcaactgagtttactgattatgcaagttaaatgtctgacagcagagctgtcacagtggcagaagaagaccccagagacaatacctctcacagaggacgtgttaatcaccctggggaaagaggaatttcagaagctccggcaggacttggaaatggttttgtctactaaggaaagcaaaaatgaaaagctaaaagaggatctcgagcgggagcagcggtggctggacgaacaacagcagatcatggaatcactcaacgtgttgcactcggagctaaagaacaaggttgaaacttttagtgagtcccgaattttcaacgagctcaaaactaagatgttaaacattaaagaatataaagagaaactcctgtcaaccctgggcgagtttctggaggatcatttccccctcccagacagatccgtaaaaaagaagaaaaagaacatccaggagagcagcgtgaatctgataacgctacatgaaatgctggagattctcatcaacagactgttcgacgtgcctcatgacccctacgtgaagatcagcgacagcttctggccgccatatgtcgagctgttgttgcgtaacgggatagctcttcggcaccccgaggaccctacgcggatacgcctggaggcctttcatcagtag

SEQ ID NO: 94288 - DNA, 1576 bp, Artificial Sequence
  derived and/or modified sequence
taaatattttttgctttagtttttcttataaggctaaaaattcacaaagcatatatcaatgaatcaggaggatctagatccggatagtactacagatgtgggagatgttacaaatactgaagaagaacttattagagaatgtgaagaaatgtggaaagatatggaagaatgtcagaataaattatcacttattggaactgaaacactcaccgattcaaatgctcagctatcattgttaattatgcaagtaaaatgtttaaccgctgaactcagtcaatggcagaaaaaaacacctgaaacaattcccttgactgaagacgttctcataacattaggaaaagaagagttccaaaagctgagacaagatcttgaaatggtactgtccactaaggagtcaaagaatgaaaagttaaaggaagacttagaaagggaacaacggtggttggatgaacagcaacagataatggaatctcttaatgtactacacagtgaattgaaaaataaggttgaaacattttctgaatcaagaatctttaatgaactgaaaactaaaatgcttaatataaaagaatataaggagaaactcttgagtaccttgggcgagtttctagaagaccattttcctctgcctgatagaagtgttaaaaagaaaaagaaaaacattcaagaatcatctgtaaacctgataacactgcatgaaatgttagagattcttataaatagattatttgatgttccacatgatccatatgtcaaaattagtgattccttttggccaccttatgttgagctgctgctgcgtaatggaattgccttgagacatccagaagatccaacccgaataagattagaagctttccatcagtaaaaggatgttttcttttttcacacagtaaaaattcttatcattcaaggatattggaaccacaggactatttggataaaaaacattatttgcaaattaatgcgcataggccatcttacttttattgcaaaatggcatgtgctgccatctattattcatttttaaatggtcatttcttattcagtgagtgctttagtgttttaaactatatggataagaatgcaggtagataatattctaggcataaaacatttaatgtaccttacctcatgcaatattctttggattctttgttgatttatgatattgctaatataatattttcttaaaatatataacaatatcttttatgcattttgagttccagctggtgcttctttatatttagaaattataatgggaaggtcatttaatttacagatggttttaaaattgaggtaatatctgaggtggcataatttaaaaatatttagcaaatttgtttcatatatactgtcttatttctagatttgtttaaaattggaatatgaaaaactaatggataaagctagcataaaattgatattttagtttgtattattaatatatcatgttaccttatatattaatctactcttgattctgctaattattaccaacaaaattgtattcatgacattttattaatcctctgtgaattttctgtaaataaaattatttctgaaaatctct

SEQ ID NO: 94289 - DNA, 810 bp, Artificial Sequence
  derived and/or modified sequence
atgaaccaagaggatctggatccagactctacaaccgatgtgggcgacgtgaccaatacggaagaggagctaatccgggagtgcgaagagatgtggaaggacatggaggaatgtcagaacaaactgagcctcatcgggaccgaaacccttaccgactctaacgctcagctcagccttctgataatgcaggtgaaatgcctcaccgcagaactgagccagtggcagaaaaagacaccagagaccattccactaactgaggacgttctgatcactctgggcaaggaagaattccagaagctccgccaggatttagagatggtactctctaccaaagaatcaaagaatgagaagctgaaggaggatttggagcgggaacagagatggctcgatgagcagcaacagatcatggagtctctgaacgtgctccatagcgagctaaagaataaggtggagacatttagtgagtctcgaatttttaatgagctgaagacaaagatgttaaatatcaaggagtacaaggagaaattgctgtctacccttggggaattccttgaagatcactttcctctcccagacagaagtgtgaagaaaaaaaaaaaaaatatccaggaatcgtccgtcaacctgatcacactgcacgaaatgttggaaatccttatcaataggcttttcgacgtccctcacgatccatatgtgaagattagcgacagcttctggcccccttatgtagagctgcttttgcggaatggaatcgccttacgccaccctgaagaccccacccggatcaggctggaggcctttcaccagtag

SEQ ID NO: 94290 - DNA, 810 bp, Artificial Sequence
  derived and/or modified sequence
atgaatcaagaggacctggacccggatagcacaacggatgtcggcgacgtcaccaacacagaagaggaactcataagagagtgcgaagagatgtggaaagacatggaagagtgccagaacaaactgtcactgatcggcaccgaaacactcacagacagtaacgcccagttatccctactcatcatgcaggtcaagtgcttgacagctgaactgtcccagtggcagaaaaaaacacccgaaacaattccgttaaccgaagatgtgctcattactctggggaaagaggagtttcagaaactccgtcaagacctagaaatggtccttagtactaaagaatccaagaatgagaagctaaaggaagatctggaacgggagcaacgctggcttgatgagcaacagcagatcatggagtctctcaacgtgttacatagtgagttaaagaataaggtcgaaacattctctgaatctaggatttttaatgaactcaagacaaaaatgcttaacatcaaggaatacaaagaaaagctcctgtccacattgggagagttcctcgaggaccattttcctttgccagatcgctccgtcaaaaagaagaagaagaacatccaggaatcatcagtaaatctgatcaccttgcatgaaatgctcgaaattttaatcaatcgattgttcgacgtccctcatgatccctatgtgaagatcagcgactctttctggcccccttatgtggagctgctcctgcggaatggaatagccttgaggcaccctgaagatccaacaagaatccggttagaagcattccaccaatag

SEQ ID NO: 94291 - DNA, 399 bp, Artificial Sequence
  derived and/or modified sequence
atgaaccaagaggacttggaccctgattccaccaccgatgtgggggacgttacaaacacagaggaagagcttatcagagagtgtgaggaaatgtggaaggatatggaagaatgtcaaaacaagctaagtctcatcggtacggaaaccctaaccgatagtaacgctcagctgtcccttctcatcatgcaagtcaaatgtctcaccgcagagctatcccagtggcaaaagaagactcccgaaacaatcccattgactgaggatgtactgattaccttgggaaaagaggaatttcagaaactgagacaagatttggagatggtgctctcaaccaaggaatccaagaacgaaaagctgaaggaggacttagagagagaacagaggtggctcgacgagcagtag

SEQ ID NO: 94292 - DNA, 810 bp, Artificial Sequence
  derived and/or modified sequence
atgaatcaagaggacctggaccctgattctacaactgacgtcggggacgtcactaataccgaggaagaactcatccgggagtgtgaagagatgtggaaggatatggaagagtgccagaacaagctgagcctgattggaactgagacgttgaccgatagcaacgcccagctgtccctcctgatcatgcaggtcaaatgtctcaccgcggagctttctcaatggcagaaaaagactccagaaaccatcccgctgactgaggatgtcctcattacactcgggaaggaagaatttcagaagcttaggcaggacctggagatggttttgtccacaaaagaaagcaagaatgaaaagcttaaagaggatctcgaaagagagcagcgctggttagacgagcaacaacagattatggagagcttaaacgttctacactctgagctgaagaataaagtggaaaccttttccgagagtcgtatattcaatgaactgaagacgaagatgctaaacattaaggaatacaaggagaaattgctgagcacactgggcgaatttttagaagaccactttcccctgccagacagatcagtgaaaaaaaagaagaagaacattcaagagtctagcgtgaatctgatcaccctccatgagatgctggaaatactcattaaccgactcttcgatgtacctcacgacccctatgtgaaaattagtgactctttctggccgccatacgtggaactactgctccgtaatggcatagccctgcggcaccctgaagatcctacccgaattcgcttggaggcgttccatcaatag

SEQ ID NO: 94293 - DNA, 760 bp, Artificial Sequence
  derived and/or modified sequence
ttcatgtcttcttactcagttgtcaatttctcagtaaccttatatgaccaccttatttaaaattatattgtccttgccctagcatttcctatgtttcttccttgtcttttctccatggcacttataaatcatttgatatactacagtatatatatgttttattttttattttattgtctgttttccttacttagaataaggttcacggtaggagggatttttgtctattttgttcattgctatattcttaccccctagatgagtatctggcaggtaataagtgttcaaccaatactgctgaatgaataaatattttttgctttagtttttcttataaggctaaaaattcacaaagcatatatcaatgaatcaggaggatctagatccggatagtactacagatgtgggagatgttacaaatactgaagaagaacttattagagaatgtgaagaaatgtggaaagatatggaagaatgtcagaataaattatcacttattggaactgaaacactcaccgattcaaatgctcagctatcattgttaattatgcaagtaaaatgtttaaccgctgaactcagtcaatggcagaaaaaaacacctgaaacaattcccttgactgaagacgttctcataacattaggaaaagaagagttccaaaagctgagacaagatcttgaaatggtactgtccactaaggagtcaaagaatgaaaagttaaaggaagacttagaaagggaacaacggtggttggatgaacag

SEQ ID NO: 94294 - DNA, 1697 bp, Artificial Sequence
  derived and/or modified sequence
gcagaagtccggggctggcaagcgcttcctgcgcagcgcctaggcgacctggagtttgtgacgctgtgatggtctagaggctggagattcaagatctgggtgccatcattttctggttctgttgatgaccctcttccagtttttcttataaggctaaaaattcacaaagcatatatcaatgaatcaggaggatctagatccggatagtactacagatgtgggagatgttacaaatactgaagaagaacttattagagaatgtgaagaaatgtggaaagatatggaagaatgtcagaataaattatcacttattggaactgaaacactcaccgattcaaatgctcagctatcattgttaattatgcaagtaaaatgtttaaccgctgaactcagtcaatggcagaaaaaaacacctgaaacaattcccttgactgaagacgttctcataacattaggaaaagaagagttccaaaagctgagacaagatcttgaaatggtactgtccactaaggagtcaaagaatgaaaagttaaaggaagacttagaaagggaacaacggtggttggatgaacagcaacagataatggaatctcttaatgtactacacagtgaattgaaaaataaggttgaaacattttctgaatcaagaatctttaatgaactgaaaactaaaatgcttaatataaaagaatataaggagaaactcttgagtaccttgggcgagtttctagaagaccattttcctctgcctgatagaagtgttaaaaagaaaaagaaaaacattcaagaatcatctgtaaacctgataacactgcatgaaatgttagagattcttataaatagattatttgatgttccacatgatccatatgtcaaaattagtgattccttttggccaccttatgttgagctgctgctgcgtaatggaattgccttgagacatccagaagatccaacccgaataagattagaagctttccatcagtaaaaggatgttttcttttttcacacagtaaaaattcttatcattcaaggatattggaaccacaggactatttggataaaaaacattatttgcaaattaatgcgcataggccatcttacttttattgcaaaatggcatgtgctgccatctattattcatttttaaatggtcatttcttattcagtgagtgctttagtgttttaaactatatggataagaatgcaggtagataatattctaggcataaaacatttaatgtaccttacctcatgcaatattctttggattctttgttgatttatgatattgctaatataatattttcttaaaatatataacaatatcttttatgcattttgagttccagctggtgcttctttatatttagaaattataatgggaaggtcatttaatttacagatggttttaaaattgaggtaatatctgaggtggcataatttaaaaatatttagcaaatttgtttcatatatactgtcttatttctagatttgtttaaaattggaatatgaaaaactaatggataaagctagcataaaattgatattttagtttgtattattaatatatcatgttaccttatatattaatctactcttgattctgctaattattaccaacaaaattgtattcatgacattttattaatcctctgtgaattttctgtaaataaaattatttctgaaaatctcta

SEQ ID NO: 94295 - DNA, 810 bp, Artificial Sequence
  derived and/or modified sequence
atgaaccaggaggacctggaccccgacagcaccaccgacgtgggcgacgtgaccaacaccgaggaggagctgatcagagagtgcgaggagatgtggaaggacatggaggagtgccagaacaagctgagcctgatcggcaccgagaccctgaccgacagcaacgcccagctgagcctgctgatcatgcaggtgaagtgcctgaccgccgagctgagccagtggcagaagaagacccccgagaccatccccctgaccgaggacgtgctgatcaccctgggcaaggaggagttccagaagctgagacaggacctggagatggtgctgagcaccaaggagagcaagaacgagaagctgaaggaggacctggagagagagcagagatggctggacgagcagcagcagatcatggagagcctgaacgtgctgcacagcgagctgaagaacaaggtggagaccttcagcgagagcagaatcttcaacgagctgaagaccaagatgctgaacatcaaggagtacaaggagaagctgctgagcaccctgggcgagttcctggaggaccacttccccctgcccgacagaagcgtgaagaagaagaagaagaacatccaggagagcagcgtgaacctgatcaccctgcacgagatgctggagatcctgatcaacagactgttcgacgtgccccacgacccctacgtgaagatcagcgacagcttctggcccccctacgtggagctgctgctgagaaacggcatcgccctgagacaccccgaggaccccaccagaatcagactggaggccttccaccagtag

SEQ ID NO: 94296 - protein, 582 aa, Artificial Sequence
  derived and/or modified sequence
METESGNQEKVMEEESTEKKKEVEKKKRSRVKQVLADIAKQVDFWFGDANLHKDRFLREQIEKSRDGYVDISLLVSFNKMKKLTTDGKLIARALRSSAVVELDLEGTRIRRKKPLGERPKDEDERTVYVELLPKNVNHSWIERVFGKCGNVVYISIPHYKSTGDPKGFAFVEFETKEQAAKAIEFLNNPPEEAPRKPGIFPKTVKNKPIPALRVVEEKKKKKKKKGRMKKEDNIQAKEENMDTSNTSISKMKRSRPTSEGSDIESTEPQKQCSKKKKKRDRVEASSLPEVRTGKRKRSSSEDAESLAPRSKVKKIIQKDIIKEASEASKENRDIEISTEEEKDTGDLKDSSLLKTKRKHKKKHKERHKMGEEVIPLRVLSKSEWMDLKKEYLALQKASMASLKKTISQIKSESEMETDSGVPQNTGMKNEKTANREECRTQEKVNATGPQFVSGVIVKIISTEPLPGRKQVRDTLAAISEVLYVDLLEGDTECHARFKTPEDAQAVINAYTEINKKHCWKLEILSGDHEQRYWQKILVDRQAKLNQPREKKRGTEKLITKAEKIRLAKTQQASKHIRFSEYD

SEQ ID NO: 94297 - protein, 589 aa, Artificial Sequence
  derived and/or modified sequence
MIPNIEGMETESGNQEKVMEEESTEKKKEVEKKKRSRVKQVLADIAKQVDFWFGDANLHKDRFLREQIEKSRDGYVDISLLVSFNKMKKLTTDGKLIARALRSSAVVELDLEGTRIRRKKPLGERPKDEDERTVYVELLPKNVNHSWIERVFGKCGNVVYISIPHYKSTGDPKGFAFVEFETKEQAAKAIEFLNNPPEEAPRKPGIFPKTVKNKPIPALRVVEEKKKKKKKKGRMKKEDNIQAKEENMDTSNTSISKMKRSRPTSEGSDIESTEPQKQCSKKKKKRDRVEASSLPEVRTGKRKRSSSEDAESLAPRSKVKKIIQKDIIKEASEASKENRDIEISTEEEKDTGDLKDSSLLKTKRKHKKKHKERHKMGEEVIPLRVLSKSEWMDLKKEYLALQKASMASLKKTISQIKSESEMETDSGVPQNTGMKNEKTANREECRTQEKVNATGPQFVSGVIVKIISTEPLPGRKQVRDTLAAISEVLYVDLLEGDTECHARFKTPEDAQAVINAYTEINKKHCWKLEILSGDHEQRYWQKILVDRQAKLNQPREKKRGTEKLITKAEKIRLAKTQQASKHIRFSEYD

SEQ ID NO: 94298 - DNA, 1749 bp, Artificial Sequence
  derived and/or modified sequence
atggagaccgaatcagggaaccaggaaaaagtgatggaggaggagtccacagaaaaaaagaaagaagtggagaaaaaaaagcgaagccgcgttaagcaagttcttgccgacattgcgaaacaggtggatttttggttcggcgacgccaacttgcataaagatcgattcctgagagaacagatcgaaaagtccagagatgggtatgtcgacataagtctgctggtgtcttttaacaagatgaagaagttaacaacggatggcaagctcatcgccagggccctcaggagctcagctgttgtcgagctcgatctggagggcactcgaatcagaaggaaaaagcctttgggggagagacccaaagacgaggacgaacgcacagtttacgtagagttgctgccgaaaaacgtcaaccattcatggattgagagggtcttcggcaaatgcggaaacgtggtctatattagcatcccacactacaagtccaccggcgaccccaagggattcgcttttgtggaattcgaaactaaagaacaggccgcaaaggcaattgaattcctcaataatccccctgaggaggcaccccgcaaacctggcatattccctaaaaccgttaagaataaacctatcccggccctacgcgttgtggaggaaaaaaagaaaaagaaaaagaagaagggccgcatgaagaaggaggataatatccaggcaaaagaagaaaatatggacacctctaacacttccatttcaaagatgaaaagaagcagacctacttcagagggctcagatatcgaaagcaccgaaccacagaaacagtgctcaaagaaaaaaaagaaaagggaccgcgtggaagcctcctcattgccagaagtccgaaccggcaagagaaagcgaagctcttcagaggatgccgaaagtttggcacctaggtctaaggttaaaaagatcatccaaaaggacattattaaggaggcttccgaggctagcaaggagaatcgggacatcgaaattagcactgaggaagaaaaggataccggtgatctgaaggacagcagtcttttgaagacaaaacgcaaacacaagaagaaacataaggagcgacataaaatgggcgaggaagtgataccgctaagagtgctgagtaagagtgagtggatggatttaaagaaagaataccttgcgttgcagaaagcttctatggctagtctgaagaagaccatttcacaaattaagtcagaatccgaaatggaaaccgattccggcgtgccacaaaatacgggcatgaaaaacgagaaaacagctaacagagaagagtgccggacacaggagaaggtgaatgcgactggtccccagttcgtatccggagtaatcgtcaaaattatcagcactgaacctctacccggccggaagcaagtgagagataccctagctgccatttccgaggtactctatgtagacctactggaaggagacaccgaatgccacgcccgattcaagacccctgaagacgcacaggccgtcataaatgcctatacagaaatcaacaagaagcactgctggaagctggaaatactctctggagaccacgaacagaggtactggcagaaaatattggtagatcgccaggcgaagctgaatcagcctcgggaaaaaaagcgaggcacagagaagttgattactaaggcagagaaaatcagactggctaagactcagcaggcaagcaagcacatccggttctctgagtacgactag

SEQ ID NO: 94299 - DNA, 1749 bp, Artificial Sequence
  derived and/or modified sequence
atggagacagaatctggcaaccaggagaaggttatggaggaggagtctaccgagaagaagaaggaagtggagaaaaaaaaacggtcacgggttaaacaagtgctggccgatattgctaaacaggtcgatttttggttcggtgacgcaaatctccacaaggataggttcctgcgagaacaaattgagaagagccgggacggatatgttgatatctccctgttagtgtccttcaacaagatgaaaaaactcacaacggacggaaagttgatcgcccgcgcgttacgctcctccgcagtcgtcgaactcgatctcgaaggtactcgcatccggagaaaaaaacccctcggcgaaaggccaaaagacgaggatgagagaactgtctacgttgaactgctacctaaaaatgtgaaccatagctggatcgaacgggtgtttggcaaatgcggcaacgttgtgtacatttctattccacactataagtcgaccggcgaccctaaagggtttgcttttgtggagttcgagacaaaggaacaggctgcaaaggctattgaatttctgaataaccctcctgaggaggcaccccggaaaccaggaatcttccccaaaaccgtgaaaaataagcctattcctgcattgagggttgtggaggaaaagaaaaagaaaaaaaaaaaaaagggccgcatgaaaaaggaagataacatccaggctaaagaagaaaacatggacacaagtaatactagtatctctaaaatgaaacgaagtcgccctacctccgagggatctgatatcgaatcgaccgaaccccagaagcaatgctcaaaaaaaaaaaaaaaaagagatagagtcgaggcctcatccctccctgaggtgcgaactggaaaaagaaagcggagctcaagcgaggacgctgaaagtctggctcccaggtcaaaagtgaagaagataattcaaaaggatatcatcaaggaggccagcgaggcctctaaggagaatcgagatatcgagatctctaccgaagaagaaaaagacactggggatctgaaagattcaagcttgctgaaaacaaagcggaagcataagaaaaagcataaagagaggcataagatgggtgaggaggtaattccactccgggtcctctcaaagagcgaatggatggatctcaaaaaggaatacttggccctccagaaagcctccatggcatcactgaaaaagaccatttcccagatcaaatctgagagcgagatggagactgatagcggggtgccacagaacaccgggatgaagaatgagaaaaccgccaacagagaggagtgccggacacaggagaaggtgaatgccactggaccccagttcgtttctggcgtgatcgtgaaaataatctcaactgaacctttacccggccggaagcaggttagagatacactggcggccatctccgaggtgttgtatgtagacctgctggagggcgacaccgagtgccacgcgagattcaagacccctgaggatgcgcaggcggttattaacgcgtacaccgagatcaataaaaagcattgctggaagcttgagatcctgtcaggagaccacgaacagcgatactggcagaaaatcttggtcgatcgacaggcaaaacttaaccaaccaagggagaaaaagagaggcacggagaagctgatcactaaagccgagaagatcaggctggccaagactcaacaagcttctaagcatatccgattctccgagtacgactag

SEQ ID NO: 94300 - DNA, 1770 bp, Artificial Sequence
  derived and/or modified sequence
atgattcccaacatcgaaggcatggagaccgagtctggaaaccaggagaaagtcatggaggaggaatctactgaaaaaaagaaggaagtagagaaaaaaaagcgcagtagagtgaagcaagtgcttgctgacatcgcaaagcaggtggacttttggttcggggacgcgaatctgcataaggatcgcttcctgcgggagcagattgaaaaatctcgcgatggttatgttgatatctcattattagtttcttttaacaagatgaaaaagctcaccactgatggaaagctgattgcccgcgctctgagatctagtgcagtcgtggaacttgatctagagggcactaggattcgaaggaaaaaacccctgggagaacgtcccaaagacgaggacgagcgtacagtttacgtcgagctcctgcccaagaatgtgaaccacagctggatcgagcgcgtgtttgggaagtgcggcaatgttgtgtacataagtataccccactacaagtctactggcgatcccaaaggcttcgcatttgtcgaatttgagacgaaggagcaggcagcgaaggctatcgagtttctgaacaatccccccgaagaggcccccaggaaacctggcatatttcctaaaacagtcaagaacaagcctattcccgcactccgagtggtcgaagaaaagaaaaagaagaaaaagaagaaaggtcgcatgaagaaagaagataacattcaagccaaagaggagaatatggacacttctaatacttctatttccaaaatgaagagatctcgaccaacctccgagggtagtgatatcgagagtaccgagccgcagaaacagtgctctaagaagaagaagaaacgcgacagggtggaggcctcgtctctgccggaggtgcggaccggcaaacggaagcgaagcagctctgaggacgccgagtccctggccccacgcagtaaagtgaagaaaataatacagaaagatataattaaagaggcaagcgaagctagcaaggaaaaccgagatatcgaaattagcaccgaagaagaaaaggatactggagacctgaaggattcaagcctactgaagacaaaacggaaacacaaaaagaagcacaaggaaaggcacaagatgggtgaggaagtgataccgctccgcgtcttgagcaaatcggagtggatggacctcaagaaggagtatctggccttgcagaaggcgagcatggcctcactgaaaaagacaatctctcagattaaatctgaaagtgaaatggagaccgactccggagtcccccagaacactggtatgaaaaatgagaaaacagctaatcgcgaggagtgtcgcacccaggaaaaggttaatgcgactgggccccagtttgtgagcggcgtgatagttaagatcataagtaccgaaccactgcctggacgcaaacaagtccgcgacacacttgccgctatttctgaggtgctatatgttgatcttttggagggggacaccgagtgccacgctagattcaagacccctgaggacgcccaagcagtcataaacgcatatactgagatcaataagaagcattgctggaaactggaaattttatccggtgatcacgagcagagatattggcaaaagatcttagtcgacagacaggcaaagctgaatcaacctcgagagaagaaaagggggactgaaaagttgattaccaaagccgagaagattagattggcaaaaacccagcaagccagcaaacacatccgcttcagtgaatatgactag

SEQ ID NO: 94301 - DNA, 2157 bp, Artificial Sequence
  derived and/or modified sequence
ggggcccggcgtggggaggtttggggcgcgcccggcctatgacggcgtccttgcggaagtacgggtgccgagagaagcagtagtcaataaagagagtgccgtatttcgcagattggagctgagctgtggctgccagaagatagcgaacgaatggaaactgaaagtggaaatcaggaaaaggtaatggaagaagaaagcactgaaaagaaaaaagaagttgaaaaaaagaaacggtcacgagttaaacaggtgcttgcagatattgctaagcaagtggacttctggtttggggatgcaaatcttcacaaggatagatttcttcgagaacagatagaaaaatctagagatggatatgttgatatatcactacttgtgtcttttaacaaaatgaaaaaattgactactgatgggaagttaattgccagagcattgagaagttcagctgttgtagagcttgatttggaaggcaccagaatccggaggaaaaaacctctgggggaaagaccaaaggatgaggatgaacgcacagtgtatgtggagttacttcccaaaaatgttaatcacagctggattgaaagagtatttgggaaatgtggcaatgttgtttatataagtataccacattataagtctactggagatccaaagggatttgcgtttgtggaatttgaaacaaaagaacaagcagcaaaagcaattgagtttcttaacaacccaccagaagaagcaccaagaaaacctggcatatttcctaaaacagtgaaaaataagcccattccagccttaagagttgtggaagagaagaaaaagaaaaagaagaagaaaggccgaatgaaaaaggaagacaatatccaagccaaagaagaaaacatggacacaagcaacaccagcatcagtaaaatgaaaagatccagacccacatctgagggctctgacattgagtccactgaaccccaaaagcagtgctcaaagaaaaagaaaaaacgggacagagttgaagcatctagcttacctgaagtcagaacagggaagaggaagagaagcagctctgaagatgcagaatccctagctccccgatcaaaagtaaagaaaattattcagaaagacatcattaaggaagcatcagaagcttccaaggaaaatagagatatagaaatctctactgaagaggaaaaggatactggagatctaaaagatagctctctcttgaaaacaaaaaggaaacataagaaaaaacataaagagagacataaaatgggagaagaagttataccattaagagtgctatcaaagagcgaatggatggatttgaaaaaagagtatttagcgctacaaaaagctagcatggcttctttaaaaaaaacaatatcccaaataaaatcagagtcagaaatggaaacagacagtggagtacctcaaaacactggaatgaaaaatgaaaaaacagccaacagggaagagtgtcgcacccaggagaaagttaatgcaacaggaccacagttcgtgagtggagtgattgtgaagatcattagcacagagcctctacctggcaggaaacaagtccgggatactttggcagcaatctcagaagttctttatgttgatttgctagaaggggatacagaatgccatgctagatttaaaactcctgaggatgctcaagcagtaataaatgcctatacagaaattaacaagaaacactgctggaaactcgagatcctttctggtgatcacgaacaaaggtattggcagaagattttggttgatagacaggcaaaacttaatcagcctcgggaaaagaaaagaggcactgaaaagttaatcaccaaagctgaaaagattagactggcaaagactcaacaagcgagtaaacatataagattttctgaatatgattgaaaaaaaaaacagttcacctcttaatacttcacaagatacttgagctgttcttgggagattcacttttattatggtagcactgcataattaatgtgtttttaattaaaagaaatatctttgttcctcaacttgtaaataagacttttttctagagacaaatatgatgtataccacaatttttcttaaacattttatttgttgaaattatcttagatgtcagtgtcaggtgatttagtaaataaatgtgttttgaacatt

SEQ ID NO: 94302 - DNA, 2286 bp, Artificial Sequence
  derived and/or modified sequence
aagccaaaaaccgccgctttcaaatcgccaatcaaattcttccttggcttcgagtctctcagccggccgcgctctccgatgcccagccctcctggaaccacctcgcctgtgacgtaggtggagcgcgcactgcctccgggcccgtctttctcaattgggaccggaaaacgttgtcgctcatcctatgacgcgaaagtaaccgagactatcaggatccggagacggaaatgtccgaaggccgcagtacttgaccctgtattttgggagtcgaacggagaatggaaactgaaagtggaaatcaggaaaaggtaatggaagaagaaagcactgaaaagaaaaaagaagttgaaaaaaagaaacggtcacgagttaaacaggtgcttgcagatattgctaagcaagtggacttctggtttggggatgcaaatcttcacaaggatagatttcttcgagaacagatagaaaaatctagagatggatatgttgatatatcactacttgtgtcttttaacaaaatgaaaaaattgactactgatgggaagttaattgccagagcattgagaagttcagctgttgtagagcttgatttggaaggcaccagaatccggaggaaaaaacctctgggggaaagaccaaaggatgaggatgaacgcacagtgtatgtggagttacttcccaaaaatgttaatcacagctggattgaaagagtatttgggaaatgtggcaatgttgtttatataagtataccacattataagtctactggagatccaaagggatttgcgtttgtggaatttgaaacaaaagaacaagcagcaaaagcaattgagtttcttaacaacccaccagaagaagcaccaagaaaacctggcatatttcctaaaacagtgaaaaataagcccattccagccttaagagttgtggaagagaagaaaaagaaaaagaagaagaaaggccgaatgaaaaaggaagacaatatccaagccaaagaagaaaacatggacacaagcaacaccagcatcagtaaaatgaaaagatccagacccacatctgagggctctgacattgagtccactgaaccccaaaagcagtgctcaaagaaaaagaaaaaacgggacagagttgaagcatctagcttacctgaagtcagaacagggaagaggaagagaagcagctctgaagatgcagaatccctagctccccgatcaaaagtaaagaaaattattcagaaagacatcattaaggaagcatcagaagcttccaaggaaaatagagatatagaaatctctactgaagaggaaaaggatactggagatctaaaagatagctctctcttgaaaacaaaaaggaaacataagaaaaaacataaagagagacataaaatgggagaagaagttataccattaagagtgctatcaaagagcgaatggatggatttgaaaaaagagtatttagcgctacaaaaagctagcatggcttctttaaaaaaaacaatatcccaaataaaatcagagtcagaaatggaaacagacagtggagtacctcaaaacactggaatgaaaaatgaaaaaacagccaacagggaagagtgtcgcacccaggagaaagttaatgcaacaggaccacagttcgtgagtggagtgattgtgaagatcattagcacagagcctctacctggcaggaaacaagtccgggatactttggcagcaatctcagaagttctttatgttgatttgctagaaggggatacagaatgccatgctagatttaaaactcctgaggatgctcaagcagtaataaatgcctatacagaaattaacaagaaacactgctggaaactcgagatcctttctggtgatcacgaacaaaggtattggcagaagattttggttgatagacaggcaaaacttaatcagcctcgggaaaagaaaagaggcactgaaaagttaatcaccaaagctgaaaagattagactggcaaagactcaacaagcgagtaaacatataagattttctgaatatgattgaaaaaaaaaacagttcacctcttaatacttcacaagatacttgagctgttcttgggagattcacttttattatggtagcactgcataattaatgtgtttttaattaaaagaaatatctttgttcctcaacttgtaaataagacttttttctagagacaaatatgatgtataccacaatttttcttaaacattttatttgttgaaattatcttagatgtcagtgtcaggtgatttagtaaataaatgtgttttgaacatta

SEQ ID NO: 94303 - DNA, 1047 bp, Artificial Sequence
  derived and/or modified sequence
ggggcccggcgtggggaggtttggggcgcgcccggcctatgacggcgtccttgcggaagtacgggtgccgagagaagcagtagtcaataaagagagtgccgtatttcgcagattggagctgagctgtggctgccagaagatagcgaacgaatggaaactgaaagtggaaatcaggaaaaggtaatggaagaagaaagcactgaaaagaaaaaagaagttgaaaaaaagaaacggtcacgagttaaacaggtgcttgcagatattgctaagcaagtggacttctggtttggggatgcaaatcttcacaaggatagatttcttcgagaacagatagaaaaatctagagatggatatgttgatatatcactacttgtgtcttttaacaaaatgaaaaaattgactactgatgggaagttaattgccagagcattgagaagttcagctgttgtagagcttgatttggaaggcaccagaatccggaggaaaaaacctctgggggaaagaccaaaggatgaggatgaacgcacagtgtatgtggagttacttcccaaaaatgttaatcacagctggattgaaagagtatttgggaaatgtggcaatgttgtttatataagtataccacattataagtctactggagatccaaagggatttgcgtttgtggaatttgaaacaaaagaacaagcagcaaaagcaattgagtttcttaacaacccaccagaagaagcaccaagaaaacctggcatatttcctaaaacagtgaaaaataagcccattccagccttaagagttgtggaagagaagaaaaagaaaaagaagaagaaaggccgaatgaaaaaggaagacaatatccaagccaaagaagaaaacatggacacaagcaacaccagcatcagtaaaatgaaaagatccagacccacatctgagggctctgacattgagtccactgaaccccaaaagcagtgctcaaagaaaaagaaaaaacgggacagagttgaagcatctagcttacctgaagtcagaacagggaagaggaagagaagcagc

SEQ ID NO: 94304 - DNA, 753 bp, Artificial Sequence
  derived and/or modified sequence
gatggagaggagggggtgttgcgatggagagtgtccacgtcccttaatcttacacttttcacttactgacttaaaagtgcagcttagtgagataaaggtgtaattttttatattattctaggataatctggccctgtgttttaaaaggtacaaagaaactaaagctatgatccctaacatagaaggtaaattatttttaaatttaatttattaaatataaaaatgaatgttctttctgtttgtcttctgatggccaaatgtgagtccattattctctcagacagttaaaggctaatctaaatatttaactatattagctattgtggtgatttaaatatttacatctttttcttgtaattcacaggaatggaaactgaaagtggaaatcaggaaaaggtaatggaagaagaaagcactgaaaagaaaaaagaagttgaaaaaaagaaacggtcacgagttaaacaggtgcttgcagatattgctaagcaagtggacttctggtttggggatgcaaatcttcacaaggatagatttcttcgagaacagatagaaaaatctagagatggatatgttgatatatcactacttgtgtcttttaacaaaatgaaaaaattgactactgatgggaagttaattgccagagcattgagaagttcagctgttgtagagcttgatttggaaggcaccagaatccggaggaaaaaacctctgggggaaagaccaaaggatgaggatgaacgcacagtgtatgtg

SEQ ID NO: 94305 - DNA, 2332 bp, Artificial Sequence
  derived and/or modified sequence
ggaaaacgttgtcgctcatcctatgacgcgaaagtaaccgagactatcaggatccggagacggaaatgtccgaaggccgcagtacttgaccctgtattttgggagtcgaacggagactctgccatcgtcctcaaagagtaaaaaatccagttacggaagggaactaacacttgctagatatggtgtgcagagtgcgtttgcaaagaaacttaagagaaaacaaatgataggacacagggtggtggaagatctcaaagagataatctggccctgtgttttaaaaggtacaaagaaactaaagctatgatccctaacatagaaggaatggaaactgaaagtggaaatcaggaaaaggtaatggaagaagaaagcactgaaaagaaaaaagaagttgaaaaaaagaaacggtcacgagttaaacaggtgcttgcagatattgctaagcaagtggacttctggtttggggatgcaaatcttcacaaggatagatttcttcgagaacagatagaaaaatctagagatggatatgttgatatatcactacttgtgtcttttaacaaaatgaaaaaattgactactgatgggaagttaattgccagagcattgagaagttcagctgttgtagagcttgatttggaaggcaccagaatccggaggaaaaaacctctgggggaaagaccaaaggatgaggatgaacgcacagtgtatgtggagttacttcccaaaaatgttaatcacagctggattgaaagagtatttgggaaatgtggcaatgttgtttatataagtataccacattataagtctactggagatccaaagggatttgcgtttgtggaatttgaaacaaaagaacaagcagcaaaagcaattgagtttcttaacaacccaccagaagaagcaccaagaaaacctggcatatttcctaaaacagtgaaaaataagcccattccagccttaagagttgtggaagagaagaaaaagaaaaagaagaagaaaggccgaatgaaaaaggaagacaatatccaagccaaagaagaaaacatggacacaagcaacaccagcatcagtaaaatgaaaagatccagacccacatctgagggctctgacattgagtccactgaaccccaaaagcagtgctcaaagaaaaagaaaaaacgggacagagttgaagcatctagcttacctgaagtcagaacagggaagaggaagagaagcagctctgaagatgcagaatccctagctccccgatcaaaagtaaagaaaattattcagaaagacatcattaaggaagcatcagaagcttccaaggaaaatagagatatagaaatctctactgaagaggaaaaggatactggagatctaaaagatagctctctcttgaaaacaaaaaggaaacataagaaaaaacataaagagagacataaaatgggagaagaagttataccattaagagtgctatcaaagagcgaatggatggatttgaaaaaagagtatttagcgctacaaaaagctagcatggcttctttaaaaaaaacaatatcccaaataaaatcagagtcagaaatggaaacagacagtggagtacctcaaaacactggaatgaaaaatgaaaaaacagccaacagggaagagtgtcgcacccaggagaaagttaatgcaacaggaccacagttcgtgagtggagtgattgtgaagatcattagcacagagcctctacctggcaggaaacaagtccgggatactttggcagcaatctcagaagttctttatgttgatttgctagaaggggatacagaatgccatgctagatttaaaactcctgaggatgctcaagcagtaataaatgcctatacagaaattaacaagaaacactgctggaaactcgagatcctttctggtgatcacgaacaaaggtattggcagaagattttggttgatagacaggcaaaacttaatcagcctcgggaaaagaaaagaggcactgaaaagttaatcaccaaagctgaaaagattagactggcaaagactcaacaagcgagtaaacatataagattttctgaatatgattgaaaaaaaaaacagttcacctcttaatacttcacaagatacttgagctgttcttgggagattcacttttattatggtagcactgcataattaatgtgtttttaattaaaagaaatatctttgttcctcaacttgtaaataagacttttttctagagacaaatatgatgtataccacaatttttcttaaacattttatttgttgaaattatcttagatgtcagtgtcaggtgatttagtaaataaatgtgttttgaacatta

SEQ ID NO: 94306 - DNA, 1749 bp, Artificial Sequence
  derived and/or modified sequence
atggagacagaaagtggcaaccaggagaaggtgatggaggaggagagcacagagaagaagaaggaggtggagaagaagaagaggagccgggtgaagcaggtgctggccgacatcgccaagcaggtggacttctggtttggagatgccaacctgcacaaggaccgcttcctgcgggagcagatcgagaagagcagagatggctacgtggacatcagcctgctggtgtccttcaacaagatgaagaagctgaccacagatggcaagctgattgcccgggccctgcggagcagcgctgtggtggagctggacctggagggcacccgcatccggaggaagaagcccctgggggagcggcccaaggatgaagatgagaggacagtgtatgtggagctgctgcccaagaatgtgaaccacagctggattgagcgggtgtttggaaaatgtggaaatgtggtgtacatcagcatcccccactacaagagcactggagaccccaagggctttgcctttgtggagtttgagaccaaggagcaggccgccaaggccatcgagttcctgaacaaccccccagaggaggcccccaggaagccaggcatcttccccaagacagtgaagaacaagcccatcccagccctgcgggtggtggaggagaagaagaagaagaagaagaagaagggccgcatgaagaaggaggacaacatccaggccaaggaggagaacatggacaccagcaacaccagcatcagcaagatgaagaggagccggcccaccagcgagggcagtgacatcgagagcacagagccccagaagcagtgcagcaagaagaagaagaagagggacagagtggaggccagcagcctgcctgaggtgaggacaggcaagaggaagaggagcagcagtgaagatgctgagagcctggcccccaggagcaaggtgaagaagatcatccagaaggacatcatcaaggaggccagcgaggccagcaaggagaacagagacatcgagatcagcacagaggaggagaaggacaccggggacctgaaggacagcagcctgctgaagaccaagaggaagcacaagaagaagcacaaggagcggcacaagatgggagaggaggtgatccccctgcgggtgctgagcaagtctgagtggatggacctgaagaaggagtacctggccctgcagaaggcctccatggccagcctgaagaagaccatcagccagatcaagtctgagagcgagatggagacagattctggagtgccccagaacacaggcatgaagaatgagaagacagccaaccgggaggagtgcaggacccaggagaaggtgaatgccaccggcccccagtttgtgtctggagtcatcgtgaagatcatcagcacagagcccctgcccggcaggaagcaggtgcgggacaccctggccgccatcagcgaggtgctgtatgtggacctgctggagggggacacagagtgccacgcccgcttcaagaccccagaagatgcccaggccgtcatcaatgcctacacagagatcaacaagaagcactgctggaagctggagatcctgagcggggaccacgagcagcgctactggcagaagatcctggtggaccggcaggccaagctgaaccagccccgggagaagaagaggggcacagagaagctgatcaccaaggccgagaagatccggctggccaagacccagcaggccagcaagcacatccgcttctctgaatatgactag

SEQ ID NO: 94307 - DNA, 1770 bp, Artificial Sequence
  derived and/or modified sequence
atgatccccaacatcgagggcatggagacagagagcggcaaccaggagaaggtgatggaggaggagagcacagagaagaagaaggaggtggagaagaagaagaggagccgggtgaagcaggtgctggccgacatcgccaagcaggtggacttctggtttggagatgccaacctgcacaaggaccgcttcctgcgggagcagatcgagaagagcagagatggctacgtggacatcagcctgctggtgtccttcaacaagatgaagaagctgaccacagatggcaagctgattgcccgggccctgcggagcagcgctgtggtggagctggacctggagggcacccgcatccggaggaagaagcccctgggggagcggcccaaggatgaagatgagaggacagtgtatgtggagctgctgcccaagaatgtgaaccacagctggattgaaagagtgtttggaaaatgtggaaatgtggtgtacatcagcatcccccactacaagagcactggagaccccaagggctttgcctttgtggagtttgagaccaaggagcaggccgccaaggccatcgagttcctgaacaaccccccagaggaggcccccaggaagccaggcatcttccccaagacagtgaagaacaagcccatcccagccctgcgggtggtggaggagaagaagaagaagaagaagaagaagggccgcatgaagaaggaggacaacatccaggccaaggaggagaacatggacaccagcaacaccagcatcagcaagatgaagaggagccggcccaccagcgagggcagtgacatcgagagcacagagccccagaagcagtgcagcaagaagaagaagaagagggacagagtggaggccagcagcctgcctgaggtgaggacaggcaagaggaagaggagcagcagtgaagatgctgagagcctggcccccaggagcaaggtgaagaagatcatccagaaggacatcatcaaggaggccagcgaggccagcaaagaaaatagagacatcgagatcagcacagaggaggagaaggacacaggagacctgaaggacagcagcctgctgaagaccaagaggaagcacaagaagaagcacaaggagcggcacaagatgggagaggaggtgatccccctgcgggtgctgagcaagtctgagtggatggacctgaagaaggagtacctggccctgcagaaggcctccatggccagcctgaagaagaccatcagccagatcaagtctgagagcgagatggagacagacagcggcgtgccccagaacacaggcatgaagaatgagaagacagccaaccgggaggagtgcaggacccaggagaaggtgaatgccaccggcccccagtttgtgtctggagtgattgtgaagatcatcagcacagagcccctgcccggcaggaagcaggtgcgggacaccctggccgccatcagcgaggtgctgtatgtggacctgctggagggggacacagaatgtcatgcccgcttcaagaccccagaagatgcccaggccgtcatcaatgcctacacagagatcaacaagaagcactgctggaagctggagatcctgagcggggaccacgagcagcgctactggcagaagatcctggtggaccggcaggccaagctgaaccagccccgggagaagaagaggggcacagagaagctgatcaccaaggccgagaagatccggctggccaagacccagcaggccagcaagcacatccgcttctctgaatatgactag

SEQ ID NO: 94308 - DNA, 1749 bp, Artificial Sequence
  derived and/or modified sequence
atggagaccgagagcggcaaccaggagaaggtgatggaggaggagtctaccgagaagaaaaaagaggtggagaagaaaaaaagaagtcgagtgaagcaagtactggcggatatcgccaaacaggtcgatttctggtttggagacgccaacctgcataaggatcgtttcctcagggaacagattgagaaatcgcgcgacggctatgtagacatctctctgctggtctctttcaataagatgaaaaagctgaccacagacggtaagttgattgccagagcactgagatcctccgcggtcgtcgaacttgatctcgagggaacaagaatcagacggaaaaaaccactgggcgaacggcctaaggacgaggacgaacggacagtgtacgttgagctacttcctaaaaacgtgaatcatagttggattgagcgtgtatttggaaagtgcggcaatgtggtctatatctcgatcccccactacaagagtaccggcgacccaaaaggtttcgccttcgtggagttcgagactaaagaacaggcagccaaggccatagagtttctgaacaatcctcccgaagaggccccacgtaagcccggaatatttccaaagaccgtaaagaataaaccaatccctgctctccgggtcgtcgaggaaaaaaaaaaaaagaaaaagaaaaagggacgcatgaaaaaggaggataacatccaagctaaggaggagaacatggatacatctaacacaagtatcagcaagatgaagcggtcaaggccgactagcgaggggtccgatatagaatccacagagccccaaaagcagtgctctaagaagaagaagaaacgtgatagagtagaggcatcctctctgccagaagtacgcacgggcaaacggaagaggagctcctccgaagacgccgagtcccttgccccgcggagtaaggtcaagaagatcatccagaaagatatcataaaggaggcctccgaagcaagcaaggagaatcgggatattgagatcagtacagaggaggagaaggacacaggtgacttaaaggactcatccttgctgaaaactaaacgtaaacataaaaaaaagcacaaggaacgccataagatgggagaagaagtgattccccttcgcgtactatcgaagagcgagtggatggacttgaaaaaagagtacctggccctgcaaaaagcttccatggccagccttaaaaagacaatctcacaaataaagagcgagtctgagatggagaccgattcaggtgtcccacagaacactggaatgaaaaacgagaaaacagcaaatagggaagaatgccggacccaggaaaaggtgaacgcaaccgggccacagtttgtgtcaggcgtgatcgtgaaaataataagtactgaacctctgcccggcaggaagcaggtccgcgataccttggccgctatctctgaagtattgtatgttgatctcctggagggagacaccgaatgccatgctcgattcaagacaccagaggatgctcaggccgtgatcaacgcatataccgaaatcaataaaaaacactgttggaaattagaaattctttctggagatcacgagcagcgctattggcagaaaatcctggtggacagacaggcaaagttaaaccagccgagagagaagaaacggggaacagaaaagctgattacaaaggctgaaaaaatccgcttggcaaaaactcagcaggctagtaagcacatacgcttctctgagtacgactag

SEQ ID NO: 94309 - DNA, 1749 bp, Artificial Sequence
  derived and/or modified sequence
atggagaccgagagcggcaaccaggagaaggtgatggaggaggagagcactgagaagaaaaaggaggtggagaaaaagaaacgatcaagagtgaagcaagtactcgccgatatcgcaaagcaggtcgacttttggttcggggacgccaatcttcataaagaccgcttcttaagggaacagatcgaaaagtccagagacggctacgtggatatatcactgctagtctctttcaacaagatgaaaaagctgactaccgatggcaagctcatagcccgggcattgcgctcctccgctgtcgtcgaactggacctggaggggacgcgcatccggcgtaaaaaacctcttggtgagcggcccaaggatgaggatgagcgaacggtgtacgtcgagttgctgcctaaaaatgttaaccacagctggatcgagcgtgtgttcggaaagtgcggcaatgttgtctatatttctatcccgcattataagagcacaggggatccgaaaggatttgcttttgtagagtttgagaccaaggaacaggctgcaaaagccatagagttcctgaataaccctcccgaagaggccccccggaaaccaggtatcttcccaaaaaccgtgaagaataagcctatacctgctctgagggtcgtggaggaaaaaaagaagaagaagaaaaagaagggccgcatgaagaaggaggataatatccaggctaaggaggaaaatatggatacgagcaacacctccatatcaaaaatgaagcgcagccgcccaacatctgaggggagcgacatagaatccaccgagcctcaaaagcagtgttctaaaaaaaaaaagaagcgcgaccgagtagaggcgtcttccttgcccgaggtcagaactgggaagcgcaaacggtcctcatcagaagatgccgaatccttagcaccacgctccaaggttaagaaaatcatccaaaaggacattattaaagaggcttccgaggcgtctaaggaaaatagagatattgagatctcgaccgaggaagagaaagacacgggcgatctgaaagatagtagtttgttaaaaaccaagagaaaacacaagaaaaagcacaaagaacgccacaaaatgggcgaagaggtaatccccttgagagttcttagcaagtctgaatggatggatttgaaaaaggaatacctcgccctccaaaaggcctctatggccagtcttaaaaaaaccatcagtcagatcaaatccgagtcagagatggagactgacagtggcgtaccacagaataccggaatgaagaacgaaaaaacagctaatcgagaagaatgccggacacaagaaaaagttaatgcaactggaccacagttcgtgagtggcgttattgtgaaaattatttcaactgagccgttaccaggaagaaaacaagtgagagataccctcgcagctatctctgaagtgctatatgtcgatctgcttgagggggacaccgaatgtcacgctcgatttaagacacccgaggacgcccaggcagtgatcaatgcctacacagagataaataaaaagcactgttggaaactggagattctgtcaggcgaccacgaacagcgctactggcagaagatattagtggatcgtcaggccaagctgaatcagcccagagaaaaaaagcgcgggaccgagaagttgattacaaaggctgagaagattcgcctagccaagacccagcaagcgtctaagcacatccgttttagtgagtacgattag

SEQ ID NO: 94310 - DNA, 1770 bp, Artificial Sequence
  derived and/or modified sequence
atgatccccaacatcgagggcatggagaccgagagcggcaaccaggagaaggtcatggaagaagaatccactgagaagaaaaaagaggtcgaaaagaaaaagaggagcagagtgaaacaagtgctcgccgatatagccaagcaggtagatttctggtttggagacgcaaatttgcataaagacagattcctgcgggaacaaattgagaaaagcagggacgggtatgtcgatatcagtttactcgtcagctttaacaagatgaagaagctgacaacggacggtaaattgatcgcaagggcattgcgcagttccgccgtggtggaattagatctggaagggactcgcataagaagaaaaaaacccctgggagagcgcccgaaggacgaggacgaacgaacagtttacgtggaactgcttccgaagaacgtgaaccactcatggattgagcgtgtttttggcaagtgcggaaacgtagtctatataagtattccccactataagagtaccggcgatcccaaaggattcgcctttgtggaattcgagacaaaggaacaggctgccaaggcaatcgaatttttgaataatcctccagaggaggcgccacggaaaccagggatttttcctaaaaccgtgaagaacaaacctatccctgcactgagggtggtcgaggagaaaaagaaaaaaaaaaagaagaaagggagaatgaagaaagaggacaatattcaagcaaaagaagagaacatggatacttccaatacatctatcagtaaaatgaagcgaagccggccgacctctgaaggatccgacatcgagagcacagaacctcagaaacagtgctcaaaaaaaaagaagaaaagggatagggtggaagcgtcatcactgccagaggtccgaaccgggaaacgaaagcgaagtagttcggaggatgcggagtcattagcacctcgctcaaaagtcaagaagataattcaaaaggacatcataaaggaggcctccgaggcaagcaaggaaaacagggatattgagattagcacagaagaggagaaggatactggcgacctgaaagactcttctttgctcaagaccaagcgcaaacacaaaaagaagcataaggagcggcataagatgggagaggaagtgattcccctaagggtcttgtctaagagcgagtggatggacctgaagaaagagtatctcgccctgcaaaaagcgagtatggcctcacttaaaaaaacaatatcccaaatcaaatccgagtcagaaatggagaccgattctggggtgccccaaaatacagggatgaagaatgaaaagacagccaacagggaagaatgtcgtactcaggaaaaggtgaacgccaccggacctcagttcgtcagtggcgtgatcgtgaaaattatcagcacagagcccctgcctggcaggaagcaggtccgtgatactctggccgcaattagtgaggttttgtatgtagatctgctggaaggcgacacggaatgccacgcccggttcaaaacccctgaggacgcccaggccgttataaacgcctacacagaaattaacaaaaaacactgctggaagctggagattctcagcggtgatcatgaacagcgatattggcagaagattctcgtggacaggcaggccaaactcaatcagccacgggaaaagaagaggggcactgagaagctcatcaccaaggccgaaaagatacgcttggctaagacccaacaggcttccaagcacataaggttctctgagtacgactag

SEQ ID NO: 94311 - DNA, 1749 bp, Artificial Sequence
  derived and/or modified sequence
atggagaccgagtcgggcaaccaagaaaaagtcatggaggaggagtccacagagaaaaagaaagaggtcgagaagaagaaacggtcgagggtgaaacaagtcctggccgatatcgctaagcaagtcgatttctggtttggcgacgcaaatttacacaaagaccgttttctccgcgagcaaatagagaagtcacgagacgggtatgtcgacatcagtctgcttgtttcattcaataagatgaagaagctcaccactgacgggaaactgatcgctagagcgctgaggtcctccgcagtggtggaattagatctggaaggcacccggatccggagaaagaagccgctgggcgaacggccaaaagacgaagatgaacgcacagtatacgtggaactgttgccaaagaacgtgaaccacagctggatcgagcgagtttttggtaagtgtggcaacgtcgtgtatattagtatacctcattacaagtcaaccggagaccctaagggattcgcattcgtcgagtttgagactaaagagcaggccgctaaagcaatcgagtttctcaacaaccctcccgaagaggcacctaggaagcctggcatctttccaaagacggtgaagaacaaacctatccctgccctcagagtggtggaggagaaaaaaaagaaaaagaaaaagaaagggcgaatgaaaaaagaagataatatccaggctaaagaggagaacatggacacctccaatacatctattagcaaaatgaagagaagtcggccaacatccgaaggttccgacatcgagtcgacagagccccagaagcagtgctcaaagaaaaagaagaagagagatcgcgtggaggcttcaagcctccccgaggtcaggaccggtaaaagaaagcggtcatccagcgaagatgccgaatcgctcgccccacgctcgaaagtcaaaaaaatcatccagaaggacatcataaaagaagccagcgaggcttctaaagagaaccgcgacattgaaattagcacggaagaggagaaggatacaggagaccttaaagatagctccttactcaaaactaagcggaagcacaagaagaagcacaaggagcggcacaaaatgggcgaggaagttattcccctcagggtcttaagtaaatccgagtggatggacctgaagaaggagtatctggctttgcaaaaggcctctatggcttctcttaaaaagaccattagccagataaagtcggagtcagaaatggagacggactcgggcgtcccacagaacacagggatgaagaacgagaagaccgctaatcgggaggaatgtaggacccaagagaaggtgaacgcgaccgggccacaattcgtgagcggggtcatcgtaaagataatttccacagagccgttacccggtagaaaacaggtcagagacaccttggccgctatttcggaggtactatacgttgacctgctggaaggcgacaccgagtgccatgccaggttcaagacaccagaggacgcgcaggcagtgatcaacgcctacaccgagattaataagaaacattgttggaagttggaaattctgtccggcgaccatgagcagcgatattggcagaagatcctggtggatcgccaagcgaagttaaaccagcccagagagaagaagcggggaacagaaaagctgatcacaaaagcagagaaaatcaggctggcgaaaacgcagcaggcttcaaaacatattcgattcagtgagtacgactag

SEQ ID NO: 94312 - DNA, 1749 bp, Artificial Sequence
  derived and/or modified sequence
atggagactgaatctgggaatcaggagaaggttatggaggaggagagtacagagaaaaaaaaggaagtggaaaaaaagaagagaagtagggttaaacaggtgttggctgatatcgcgaaacaggtggacttttggtttggtgacgctaatctgcacaaggacaggttcctgcgcgagcagatagagaaatcaagggatggttatgtggatatatcactgctggtgagcttcaacaaaatgaagaaactgactacagacggtaagttgatcgcaagggccctccggtcatcagcagtggttgaactggacctagaagggacccgaattcgcagaaaaaaacccttgggcgaacgcccaaaggatgaggacgaaaggacagtgtatgtcgaattgctcccaaagaacgtgaatcattcatggatcgaacgagtctttgggaagtgtgggaatgtcgtgtacatctccattccccactacaagagcactggagatcctaagggatttgcattcgtggagtttgagactaaagagcaggcagcaaaagccatcgagtttctgaataacccacctgaagaagctcctaggaagccagggatctttccaaaaaccgtgaaaaataaaccaatacctgcattgcgtgtggtcgaggagaaaaagaagaagaagaagaaaaagggcaggatgaaaaaggaggataatattcaagcgaaagaggaaaatatggacacctctaatactagcataagtaagatgaagagaagtcggccaacctccgaagggtccgatattgaatccacagaaccccagaagcagtgcagtaagaaaaagaaaaagagagaccgtgtggaagcctccagcctgcctgaggtgaggactgggaagcggaagcgcagttcctcagaggacgctgagtccctggccccaagaagcaaggtgaaaaagatcattcagaaagatatcatcaaggaggcctcggaagccagcaaggagaatcgcgatatcgagatttccacagaggaggaaaaagatacgggggacctgaaggacagttctttgcttaagacaaaacgtaagcataaaaagaaacataaagaacggcacaagatgggcgaagaagtcatacctctcagggtgctttccaaatccgaatggatggatctcaagaaagaatacctcgctctgcagaaagcttccatggcctctttaaagaagaccatctcacagataaagagcgaatccgagatggagacagactccggtgtaccccaaaatacaggcatgaagaatgagaagaccgcaaaccgcgaggagtgccgtacccaggagaaggtgaatgctactggtcctcagtttgtgtctggtgtgattgtcaaaattatcagtacagagcccctccccggaaggaagcaggtccgagacactctggctgccatctctgaagtgctgtacgtagacctcctggagggagataccgaatgccatgcacgctttaaaacccccgaggacgcccaggccgtgatcaatgcgtacactgaaattaacaagaagcactgttggaagttagaaattctttcgggagaccatgaacagagatactggcaaaagatcctagtcgaccgtcaggcgaagttgaaccagccacgtgagaagaagcggggaacagaaaagctcattactaaagcggaaaaaatccgcttagccaaaacgcagcaggcttcaaagcatattcgcttcagcgagtacgactag

SEQ ID NO: 94313 - DNA, 1770 bp, Artificial Sequence
  derived and/or modified sequence
atgattcccaatatagaaggcatggagaccgagagcggaaaccaggaaaaagtcatggaggaagagagtacagagaagaaaaaggaggtggaaaaaaagaagcgatctcgggtgaaacaggtgttggcggacatagctaagcaggtagatttctggtttggcgacgcaaacctgcacaaggacaggtttctgagggaacaaatcgagaaaagtcgcgacggatacgttgatatctcgctgctggtgtcctttaataagatgaagaaacttaccaccgacggtaaactcattgctcgagcgcttcggtcatccgctgtggtggagctcgacctcgagggcacccgcattcgccgaaagaagcccctgggagaaagaccaaaagatgaagatgagaggactgtctatgtggagctactgcctaagaatgtgaatcactcctggatagaaagagtttttggaaagtgcggaaatgtggtctatatttcaatcccgcactataaatccaccggagacccaaagggatttgcttttgtggagttcgaaaccaaggagcaggccgcaaaagctatcgagtttcttaataacccgcctgaggaggccccacgtaaacctggaattttccccaagaccgtaaagaacaaacctatcccagctctgcgggtggtggaagagaaaaagaaaaagaagaaaaagaaggggcgtatgaaaaaggaagacaatatccaagcgaaggaggagaatatggatacctcaaacacttccatctccaagatgaaacgatcgagacccacctctgaaggttctgatatcgagagcaccgagccacagaagcaatgttccaagaagaaaaaaaaaagggatcgggttgaggccagcagcttaccagaggtgaggactggaaaacgtaaaagatcaagtagcgaggacgccgaatcgctggcccctaggtctaaggtaaagaaaattatacagaaggacataatcaaggaagcctctgaagcaagtaaagagaaccgcgatatcgaaattagcacagaggaggagaaggacactggagacctgaaagactcatcgttactcaagacaaagcgtaagcacaagaaaaagcataaagagagacataaaatgggggaggaagtaataccattaagagtcctgtctaaatctgagtggatggacttgaagaaggagtacctggccctgcaaaaggcctccatggcctcacttaaaaagactataagtcaaattaagtcagagagtgagatggaaaccgactccggcgtgcctcaaaacacaggaatgaaaaatgagaaaaccgccaaccgggaggagtgccggacccaggagaaggtgaatgccacaggaccgcagtttgtctccggagttattgttaagatcattagcaccgaacctcttcctgggaggaagcaagttagggatacccttgccgctatctctgaggtgttgtacgtcgatctattggaaggagacactgaatgtcacgctcgctttaagacgccggaagacgcccaggcggtgatcaatgcctacacggagataaacaagaagcactgttggaagctcgagattctcagcggcgatcacgaacaacgttactggcagaaaatcctcgttgaccgccaagccaaattgaatcaaccacgcgagaaaaaaaggggcactgaaaagctgatcaccaaagcggagaagatacgactggctaaaacgcagcaggcttctaagcatatccgattctccgaatacgactag

SEQ ID NO: 94314 - DNA, 1749 bp, Artificial Sequence
  derived and/or modified sequence
atggagaccgagagcggcaaccaggagaaggtgatggaggaggagagcaccgagaagaagaaggaggtggagaagaagaagagaagcagagtgaagcaggtgctggccgacatcgccaagcaggtggacttctggttcggcgacgccaacctgcacaaggacagattcctgagagagcagatcgagaagagcagagacggctacgtggacatcagcctgctggtgagcttcaacaagatgaagaagctgaccaccgacggcaagctgatcgccagagccctgagaagcagcgccgtggtggagctggacctggagggcaccagaatcagaagaaagaagcccctgggcgagagacccaaggacgaggacgagagaaccgtgtacgtggagctgctgcccaagaacgtgaaccacagctggatcgagagagtgttcggcaagtgcggcaacgtggtgtacatcagcatcccccactacaagagcaccggcgaccccaagggcttcgccttcgtggagttcgagaccaaggagcaggccgccaaggccatcgagttcctgaacaacccccccgaggaggcccccagaaagcccggcatcttccccaagaccgtgaagaacaagcccatccccgccctgagagtggtggaggagaagaagaagaagaagaagaagaagggcagaatgaagaaggaggacaacatccaggccaaggaggagaacatggacaccagcaacaccagcatcagcaagatgaagagaagcagacccaccagcgagggcagcgacatcgagagcaccgagccccagaagcagtgcagcaagaagaagaagaagagagacagagtggaggccagcagcctgcccgaggtgagaaccggcaagagaaagagaagcagcagcgaggacgccgagagcctggcccccagaagcaaggtgaagaagatcatccagaaggacatcatcaaggaggccagcgaggccagcaaggagaacagagacatcgagatcagcaccgaggaggagaaggacaccggcgacctgaaggacagcagcctgctgaagaccaagagaaagcacaagaagaagcacaaggagagacacaagatgggcgaggaggtgatccccctgagagtgctgagcaagagcgagtggatggacctgaagaaggagtacctggccctgcagaaggccagcatggccagcctgaagaagaccatcagccagatcaagagcgagagcgagatggagaccgacagcggcgtgccccagaacaccggcatgaagaacgagaagaccgccaacagagaggagtgcagaacccaggagaaggtgaacgccaccggcccccagttcgtgagcggcgtgatcgtgaagatcatcagcaccgagcccctgcccggcagaaagcaggtgagagacaccctggccgccatcagcgaggtgctgtacgtggacctgctggagggcgacaccgagtgccacgccagattcaagacccccgaggacgcccaggccgtgatcaacgcctacaccgagatcaacaagaagcactgctggaagctggagatcctgagcggcgaccacgagcagagatactggcagaagatcctggtggacagacaggccaagctgaaccagcccagagagaagaagagaggcaccgagaagctgatcaccaaggccgagaagatcagactggccaagacccagcaggccagcaagcacatcagattcagcgagtacgactag

SEQ ID NO: 94315 - DNA, 1770 bp, Artificial Sequence
  derived and/or modified sequence
atgatccccaacatcgagggcatggagaccgagagcggcaaccaggagaaggtgatggaggaggagagcaccgagaagaagaaggaggtggagaagaagaagagaagcagagtgaagcaggtgctggccgacatcgccaagcaggtggacttctggttcggcgacgccaacctgcacaaggacagattcctgagagagcagatcgagaagagcagagacggctacgtggacatcagcctgctggtgagcttcaacaagatgaagaagctgaccaccgacggcaagctgatcgccagagccctgagaagcagcgccgtggtggagctggacctggagggcaccagaatcagaagaaagaagcccctgggcgagagacccaaggacgaggacgagagaaccgtgtacgtggagctgctgcccaagaacgtgaaccacagctggatcgagagagtgttcggcaagtgcggcaacgtggtgtacatcagcatcccccactacaagagcaccggcgaccccaagggcttcgccttcgtggagttcgagaccaaggagcaggccgccaaggccatcgagttcctgaacaacccccccgaggaggcccccagaaagcccggcatcttccccaagaccgtgaagaacaagcccatccccgccctgagagtggtggaggagaagaagaagaagaagaagaagaagggcagaatgaagaaggaggacaacatccaggccaaggaggagaacatggacaccagcaacaccagcatcagcaagatgaagagaagcagacccaccagcgagggcagcgacatcgagagcaccgagccccagaagcagtgcagcaagaagaagaagaagagagacagagtggaggccagcagcctgcccgaggtgagaaccggcaagagaaagagaagcagcagcgaggacgccgagagcctggcccccagaagcaaggtgaagaagatcatccagaaggacatcatcaaggaggccagcgaggccagcaaggagaacagagacatcgagatcagcaccgaggaggagaaggacaccggcgacctgaaggacagcagcctgctgaagaccaagagaaagcacaagaagaagcacaaggagagacacaagatgggcgaggaggtgatccccctgagagtgctgagcaagagcgagtggatggacctgaagaaggagtacctggccctgcagaaggccagcatggccagcctgaagaagaccatcagccagatcaagagcgagagcgagatggagaccgacagcggcgtgccccagaacaccggcatgaagaacgagaagaccgccaacagagaggagtgcagaacccaggagaaggtgaacgccaccggcccccagttcgtgagcggcgtgatcgtgaagatcatcagcaccgagcccctgcccggcagaaagcaggtgagagacaccctggccgccatcagcgaggtgctgtacgtggacctgctggagggcgacaccgagtgccacgccagattcaagacccccgaggacgcccaggccgtgatcaacgcctacaccgagatcaacaagaagcactgctggaagctggagatcctgagcggcgaccacgagcagagatactggcagaagatcctggtggacagacaggccaagctgaaccagcccagagagaagaagagaggcaccgagaagctgatcaccaaggccgagaagatcagactggccaagacccagcaggccagcaagcacatcagattcagcgagtacgactag

SEQ ID NO: 94316 - DNA, 3225 bp, Artificial Sequence
  derived and/or modified sequence
atggtttactttggatccagccaggacgaggaagaagtggaagaggaagatgatgaaactgaagatgtaaaaaccgccaccaataacgcttcctcctcttgtcagtccactcctcggaaaggcaagactcacaagcatgtccataatggtcatgtgttcaacggtagcagtagatccacacgagagaaagaaccagtgcaaaagcacaaatcaaaagaggccacccctgcgaaggagaaacactccgatcatagagcagactcaaggagggagcaggcgagcgccaaccatccagctgctgccccatccacagggtccagtgcaaagggacttgccgccacccatcaccacccacccttgcataggtccgcacaagatctgcgcaagcaggtaagcaaggttaatggggtgacacggatgtccagtctaggcgcgggtgtcaccagcgctaaaaagatgcgcgaggtgagaccctcacctagtaagaccgtgaagtacacggctaccgtgaccaagggtgctgttacctataccaaggctaagcgggagctggtaaaagatactaagcccaatcatcacaagcctagctctgccgttaaccacacgatttccgggaagacagagagctccaacgccaagacgcgtaagcaggtgttgtctctgggtggtgccagcaagtcaaccggccctgccgtcaacgggctgaaggtgtccggccgcctgaaccctaagtcatgtaccaaagaagtgggcgggcgccagttaagggagggactgcaacttagggagggcctcaggaatagcaagcggagactggaggaagcacaccaggcagagaaaccgcagtctcccccgaaaaaaatgaaaggtgctgccggcccagccgaaggcccaggcaagaaggcccctgccgagcgcggactgttgaacggacatgttaagaaagaggtccctgaaaggtctctggagcggaatcggccaaaaagagcaactgcagggaagtcgacacccgggagacaagcccatgggaaggccgatagcgcatcctgcgagaatcggtctacctctcagcctgagtccgtgcataaaccccaggacagcggcaaagcagaaaagggcggaggaaaggccgggtgggcagccatggacgaaatccctgtgctccggccttccgccaaggagttccacgaccctcttatctatatcgagagcgtgagggcccaggtcgagaaattcgggatgtgccgggttatccccccgcctgactggcggccagagtgcaaactaaatgatgaaatgaggttcgttacacagattcagcacattcataaactgggtcgacgctgggggccaaacgtgcagcgccttgcctgtattaagaagcacctgaagagtcaaggaattacaatggatgagctgcccttgatcgggggttgtgagttggacctcgcctgcttcttccgcctcattaacgaaatggggggaatgcagcaagtgacggacctcaagaagtggaataaactcgctgatatgctgcgcatcccgagaaccgcgcaggatcgacttgccaagctgcaggaggcttactgtcagtatctattaagctacgattccctctcccccgaggaacataggagactcgagaaggaagtcctgatggaaaaggaaattctggaaaaacggaaagggcccctggaaggacacaccgagaacgatcatcacaaattccatccactgccacggttcgagccaaagaacggcctgattcacggtgttgctccaagaaacggcttccggagcaagttaaaggaggtgggacaggcccagctcaaaactggcaggcgtaggctttttgcccaggagaaggaggtggttaaagaagaagaagaagacaagggtgtcctcaacgacttccataagtgtatctataagggcagatccgtgtcattgactactttttaccgcacagcaagaaatatcatgagcatgtgtttctccaaggaacccgctcccgcggaaattgagcaagagtattggagattggtggaggaaaaggattgccatgtagctgtgcactgcgggaaagtcgacacaaatactcacggctctggattccctgtgggaaagagcgagccgtttagccgacacggttggaacctcactgttctgccaaacaacactggcagcatcctccgtcacttaggagctgtgccaggggtgaccataccctggctcaacatcggcatggtgttctctaccagctgttggtcccgtgatcagaatcatctgccttatattgattatttgcataccggagctgactgcatctggtattgtatccctgccgaggaagagaacaaactggaagacgtagtccacacattgctgcaggccaacggcacacccgggcttcagatgcttgaatcaaatgtgatgataagcccagaggtcctctgcaaagagggaataaaggtacaccgaactgtgcagcagtcaggccagttcgtcgtgtgctttccaggatcattcgtgtcaaaggtatgttgcgggtatagtgtctcagagaccgtccatttcgcaactacacagtggactagcatgggttttgaaacagcaaaagaaatgaagaggcgccatattgcaaaaccattttctatggagaagctgctgtatcaaattgcacaggcagaagctaaaaaagaaaatgggcctaccctgtcaaccatatctgctttgctggacgagctgcgtgataccgagcttcgccagagacgacagctgtttgaagccggactgcactcttcagctcgatacggttcacatgacggctcatctacagtggccgatgggaaaaagaagccacgtaagtggctccagctggaaacaagcgaacggcgctgccagatctgccaacatctgtgttacttgagcatggtggtgcaggagaacgaaaatgtggttttctgtctcgaatgcgctctacggcatgtcgagaaacagaagtcttgtcgtggtctcaaattgatgtacaggtacgacgaagagcaaatcatcagtctggtcaatcagatctgtggaaaggtgagcggcaagaacggctccatcgagaattgtctttcgaagcctacccctaagagaggccctagaaaacgggcgaccgttgacgtccccccttccagattgagtgcctccagctcttcgaagtccgcatcaagttccagttag

SEQ ID NO: 94317 - DNA, 3225 bp, Artificial Sequence
  derived and/or modified sequence
atggtgtacttcggcagcagccaggatgaggaggaggtggaggaggaggatgatgaaacagaagatgtgaagacagccaccaacaatgccagcagcagctgccagagcacccccaggaagggcaagacccacaagcacgtgcacaatggacatgtgttcaacggcagcagccgcagcacccgggagaaggagcctgtgcagaagcacaagagcaaggaggccaccccagccaaggagaagcacagcgaccacagagctgacagcagaagagagcaggccagcgccaaccaccctgctgctgcccccagcacaggcagcagcgccaagggcctggccgccacccaccaccacccccccctgcacaggtctgcccaggacctgaggaagcaggtgtccaaggtgaatggagtgaccaggatgagcagcctgggcgctggggtgaccagcgccaagaagatgagggaggtgcggcccagccccagcaagacagtgaagtacacagccaccgtgaccaagggagctgtgacctacaccaaggccaagcgggagctggtgaaggacaccaagcccaaccaccacaagcccagcagcgctgtgaaccacaccatcagcggcaagacagagagcagcaatgccaagaccaggaagcaggtgctgagcctgggcggggccagcaagagcacaggccctgctgtgaatggcctgaaggtgtctggccgcctgaaccccaagagctgcaccaaggaggtgggcggccggcagctgcgggagggcctgcagctgcgggagggcctgaggaacagcaagaggcggctggaggaggcccaccaggccgagaagccccagagcccccccaagaagatgaagggagctgctggccctgctgagggccctgggaagaaggccccagctgagcggggcctgctgaatggccacgtgaagaaggaggtgcctgagaggagcctggagaggaaccggcccaagagggccacagctgggaagagcaccccaggccggcaggcccacggcaaggctgacagcgccagctgtgaaaatagaagcaccagccagcctgagagcgtgcacaagccccaggacagcggcaaggccgagaagggcggcggcaaggccggctgggccgccatggatgagatccctgtgctgcggcccagcgccaaggagttccatgaccccctcatctacatcgagagcgtgcgggcccaggtggagaagtttggcatgtgcagggtcatccccccaccagactggaggcctgagtgcaagctgaatgatgagatgagatttgtgacccagatccagcacatccacaagctgggccgccgctggggccccaacgtgcagaggctggcctgcatcaagaagcacctgaagagccagggcatcaccatggatgagctgcccctcatcggcggctgtgagctggacctggcctgcttcttccgcctcatcaatgagatgggcggcatgcagcaggtgacagacctgaagaagtggaacaagctggccgacatgctgcgcatccccaggacagcccaggaccggctggccaagctgcaggaggcctactgccagtacctgctgtcctatgacagcctgagccctgaggagcaccggcggctggagaaggaggtgctgatggagaaggagatcctggagaagaggaagggccccctggagggccacacagaaaatgaccaccacaagttccaccccctgcccaggtttgagcccaagaatggcctcatccacggcgtggcccccagaaatggcttccgcagcaagctgaaggaggtgggccaggcccagctgaagacaggaagaagaagactctttgcccaggagaaggaggtggtgaaggaggaggaggaggacaagggcgtgctgaatgacttccacaagtgcatctacaagggccgctctgtgtccctgaccaccttctacagaacagccaggaacatcatgtccatgtgcttcagcaaggagcccgccccagctgagattgagcaggagtactggaggctggtggaggagaaggactgccacgtggccgtgcactgcggcaaggtggacaccaacacccacggcagcggcttccctgtgggcaagtctgagcccttcagccgccacggctggaacctgactgtgctgcccaacaacacaggcagcatcctgcggcacctgggcgctgtgcctggggtgaccatcccctggctgaacatcggcatggtgttcagcaccagctgctggagccgggaccagaaccacctgccctacatcgactacctgcacactggagctgactgcatctggtactgcatcccagctgaggaggagaacaagctggaggatgtggtgcacaccctgctgcaggccaacggcaccccaggcctgcagatgctggagagcaatgtgatgatcagccctgaggtgctgtgcaaggagggcatcaaggtgcacaggacagtgcagcagagcggccagtttgtggtgtgcttccctggcagctttgtgtccaaggtgtgctgcggctacagcgtgtctgagaccgtgcactttgccaccacccagtggacctccatgggctttgaaacagccaaggagatgaagagaagacacatcgccaagcccttctccatggagaagctgctgtaccagatcgcccaggccgaggccaagaaggaaaatggccccaccctgagcaccatcagcgccctgctggatgagctgcgggacacagagctgcggcagaggcggcagctgtttgaggccggcctgcacagcagcgcccgctatggcagccatgatggcagcagcacagtggctgatggcaagaagaagcccaggaagtggctgcagctggagaccagcgagcggcgctgccagatctgccagcacctgtgctacctgtccatggtggtgcaggagaatgaaaatgtggtgttctgcctggagtgtgccctgcggcacgtggagaagcagaagagctgccggggcctgaagctgatgtaccgctatgatgaggagcagatcatcagcctggtgaaccagatctgtgggaaggtgtctgggaagaatggcagcattgagaactgcctgagcaagcccacccccaagaggggccccaggaagagggccaccgtggatgtgccccccagccggctgagcgccagcagcagcagcaagagcgccagcagcagcagctag

SEQ ID NO: 94318 - DNA, 3225 bp, Artificial Sequence
  derived and/or modified sequence
atggtgtacttcggcagcagccaggacgaggaggaggtggaggaggaggacgacgaaacggaggacgtgaaaaccgccactaataacgcatctagctcatgtcagtctaccccacgaaagggcaaaactcacaaacacgtgcacaatggacacgtatttaacggtagctccagaagtaccagagaaaaggagcccgtccagaagcacaaatcaaaggaagcaaccccagccaaggagaagcactccgatcaccgggcagactcccggcgggagcaggcaagcgccaatcatccagctgccgctcccagcaccggttcaagcgcaaaggggctggctgcaacccatcatcatcctcctctgcatcggtccgcacaggatctccgcaaacaggtgtctaaggtgaacggtgtgaccagaatgagttccctgggcgccggcgtaacctcggcaaaaaaaatgcgcgaagtccgcccctccccctctaaaactgttaaatataccgcaactgtgaccaagggggccgtgacgtataccaaggctaagagagaactggtgaaggacactaagcccaaccaccataaaccgtcgtcagctgtcaaccacaccatctccggcaagacagaatcctccaatgcaaagactcgtaagcaggtgctgtccctgggcggggcatctaaatccacaggtcccgcggtcaacggactgaaggtcagcggccggctaaatcctaaaagttgcaccaaagaggtgggcggccgacagttaagggaaggtttgcagctacgcgagggtttaaggaattccaaaaggagattagaggaagcgcatcaggccgaaaagccacagtccccaccaaagaagatgaagggggccgctggccctgccgaaggcccaggcaagaaagctcctgccgaacgggggctgctgaacggacatgttaaaaaggaggtgcccgagcgcagcctggaacggaaccgcccaaagcgggctactgcaggaaagtcaacgcccgggagacaggctcatggaaaagctgacagcgctagttgtgaaaacaggtctaccagtcaacctgagagcgtccataaaccacaagatagcggtaaagcagaaaaggggggcggcaaggccgggtgggctgcaatggacgaaatcccggtgctgaggccttctgcaaaggagtttcacgatcctctcatctacatagagtcggtgagggcgcaggtggagaagttcggcatgtgcagggttatacccccccccgattggcggcctgaatgcaagctgaatgacgaaatgcgcttcgtaacccagatacaacacattcacaaactcggacggagatggggaccaaacgtgcagagacttgcttgcatcaaaaagcacttaaagtctcaaggaatcacaatggatgagttacctctcatcggcggctgcgagctcgatctggcatgcttctttcggctgattaatgagatgggcggaatgcagcaggtgaccgacttaaagaagtggaataaactggccgacatgctgcgaattccccggaccgcccaagatcgtctggctaagttacaggaggcctactgccagtacctgctcagttacgacagccttagccccgaagagcatagacggctcgagaaagaggtgctgatggaaaaagaaatactggagaaacggaagggccctctagaggggcacacagagaatgatcatcataaattccacccattgccgcgatttgaacccaaaaacggcctgatccatggagtggcaccgcgcaatgggttcaggtctaaactgaaagaggtcggacaggctcagctcaaaactggacgcaggagattattcgcccaagagaaagaggtggtcaaggaggaagaagaagacaagggagtgctgaatgattttcataagtgtatatataagggcaggtcagtctcactcaccacattttacaggaccgcaaggaatatcatgtcgatgtgcttttctaaggaacctgcacctgctgagatcgaacaggagtactggaggctggtggaggagaaggattgtcatgttgcagttcactgcggcaaggtcgatacaaacacccacggctcaggctttcccgtaggcaaaagcgagccttttagcaggcatggctggaacctaaccgtcctgcccaacaacaccggatcgatactccggcatctgggagccgtccccggcgtgactattccatggctgaacattggaatggtctttagtacatcctgctggtctagagaccagaaccacctgccttacattgattacctgcatactggggctgactgtatctggtactgtatcccagccgaagaggagaacaagctagaagacgtcgttcacactctgttacaggccaacggtaccccaggcctgcagatgctcgaatccaacgtcatgatctcacccgaagtgttgtgtaaagagggtataaaagttcatcggacagtgcagcagtcaggacagttcgtagtgtgttttcccggctccttcgtatcaaaagtctgctgtggatactctgtatccgagacagtgcattttgctaccacgcagtggacttccatgggcttcgagactgccaaggaaatgaagcgccgacatatcgcgaagcctttctccatggaaaagctcctttatcaaattgcgcaggccgaggccaaaaaggaaaacggccccacattaagcacaatcagcgccctactggatgaactccgcgataccgagctccgtcagcggaggcaattgttcgaggccgggcttcattcttctgcacggtacggctctcacgatggttcatcgaccgtcgcggacgggaaaaagaagcctaggaagtggctgcagctcgagacatcggaaaggcgatgtcagatttgccagcatctctgctacttatcgatggtcgtgcaggagaatgagaacgtcgtgttttgcttggaatgcgctctacgacacgtggagaaacagaaatcatgcaggggtctgaaactgatgtaccgctacgacgaggaacagatcattagcttagtgaaccaaatttgcggcaaggtgtcaggcaagaacggcagcatcgaaaactgtctgagcaagcctacccccaagaggggcccacgaaaacgcgctactgtggacgtgccaccgagtcgcctgtctgccagcagctcgtctaaaagcgcaagttcttcctcgtag

SEQ ID NO: 94319 - DNA, 3225 bp, Artificial Sequence
  derived and/or modified sequence
atggtttattttgggtcgtcccaggacgaagaagaagtggaagaggaggatgacgaaacagaagacgtcaaaaccgccaccaacaacgccagttcttcgtgccagagcactcctcgaaaaggcaagacacataaacacgttcacaacgggcacgtctttaatggctccagcaggagtacaagagaaaaggaacctgtacaaaaacataaatcaaaagaagctacacctgcaaaggaaaaacactctgaccaccgggctgactcacgccgagaacaggcctctgctaatcaccctgcggcagccccatctaccgggtcctctgctaagggcctcgctgctactcaccatcacccacccctgcatcgtagcgcacaggatttacgcaagcaggtgtctaaggtaaacggtgtgacgcgaatgtcctcgttaggggctggcgtgaccagcgccaaaaaaatgagggaagtccggccatccccaagcaagacggtgaagtacaccgccactgtcacaaagggcgctgtaacatacaccaaagcaaagagggagctggtgaaggatacgaaacctaatcaccataagccatcctccgccgttaaccatacaatctctggtaaaaccgaaagtagtaacgccaagacacgcaagcaagtattgtcactggggggtgcgtccaagtcaactggccctgcagttaatggactgaaggtgtccggacgcctgaatccaaagtcctgcaccaaggaggtgggtggtagacaattacgcgagggcctccagttgcgagagggcctgcgcaacagtaagcgcaggttggaggaggcccaccaggccgaaaaacctcagagcccgcctaaaaaaatgaaaggagcagctggacccgctgaggggccaggaaagaaagctccagctgaacgaggtctgctgaacggccatgtgaagaaagaagtacctgagagatcattggaaaggaacagacccaaacgggcaactgccggaaaatccacacctggcaggcaagcgcacggaaaagccgactccgcctcatgtgaaaaccgctctacaagccagcctgaatctgtgcacaaacctcaggactctgggaaggcagaaaagggtggtggcaaagccggatgggcagctatggatgagatcccagtgttgcggccttcggccaaagagttccacgaccctttaatatacattgagagcgtacgggcacaagttgaaaagttcgggatgtgtagagtaattcctccccctgattggaggcccgagtgcaagctcaatgatgaaatgaggtttgttacacagattcagcatattcacaagctcggccgaagatggggcccaaacgtacagcgtctcgcctgcatcaagaaacacttaaagtctcaaggtattaccatggatgagctgcccctgatcggcggttgcgagctggacctagcctgcttttttcgcctgatcaatgagatgggaggcatgcagcaagttacagatctgaagaaatggaataagttagccgacatgttacggattcctagaacggcccaggacagactggcaaaattgcaggaagcctattgtcagtatctgctgagctacgattctctgtcgccagaggaacacaggaggctagaaaaggaagttctgatggaaaaagagattcttgagaagcgaaagggaccactagaaggccacaccgagaacgaccatcacaaatttcatcctctgcccagattcgaacccaaaaatggcttaattcacggagttgcgcctaggaacggctttaggagtaagctgaaagaggtcgggcaagcccagcttaagacaggtcgacgccgtcttttcgcccaagagaaggaggttgtcaaagaggaggaagaagataagggcgttctgaatgacttccataagtgcatctataagggcagatcagtgtccttgacaaccttctaccggaccgcccgtaacatcatgagtatgtgctttagcaaggaacctgctcctgccgagatcgaacaagagtattggcggctcgtggaggagaaggactgccatgttgcggtgcattgtggtaaggtggacacaaacacacatggttcgggcttccccgtaggtaagagtgagccgttctcaagacatgggtggaacctcacagtgctgcctaataatacaggttctattctgagacacctgggagccgtgcccggagtcacaatcccatggcttaacattggcatggtcttctcaacatcttgttggtctagggatcaaaatcacctgccgtacatcgactatctccataccggagccgattgcatctggtattgtattcccgcagaggaggagaataaactggaggatgtggtgcacaccctgcttcaggccaatggcacgcccggtctgcagatgttagaatcgaacgtgatgattagccctgaggttctctgtaaagaaggcattaaagttcataggactgtgcagcagagcggacaatttgttgtttgtttcccaggctcctttgtttccaaagtctgctgtggctacagcgtgagcgagacggtccactttgccaccacacagtggacttcaatgggatttgagaccgcgaaggagatgaagaggcgccatattgccaagcccttcagtatggagaaattactgtatcagattgcccaggcagaggccaaaaaggaaaatggcccaacgctgtccacaatctctgctttactggacgagttacgagatacagagttacggcagcgcaggcagttgttcgaggcagggctgcacagcagcgctaggtacggctctcatgacgggagttccacagtcgcggatggcaaaaagaagccccgaaaatggttacagctggagacctcggagaggcgctgtcagatatgtcagcatctatgttatttgagtatggtggttcaggaaaacgaaaacgtggtgttttgcttggagtgcgcgctaaggcatgtggaaaaacaaaaatcgtgcaggggcctgaaactgatgtatagatatgacgaagaacaaattatctcactggtcaaccagatatgtggaaaagtgagtggcaagaacggtagcatcgagaactgtctcagcaaacccacacctaaaagaggcccacgcaagcgagccaccgtcgatgtccctccctctagactatctgcttctagctcatcgaaatccgcttcatcctccagttag

SEQ ID NO: 94320 - DNA, 3225 bp, Artificial Sequence
  derived and/or modified sequence
atggtgtacttcggcagcagccaggacgaggaggaggtggaggaggaggacgacgagaccgaggacgtgaagaccgccaccaacaacgccagcagcagctgccagagcacccccagaaagggcaagacccacaagcacgtgcacaacggccacgtgttcaacggcagcagcagaagcaccagagagaaggagcccgtgcagaagcacaagagcaaggaggccacccccgccaaggagaagcacagcgaccacagagccgacagcagaagagagcaggccagcgccaaccaccccgccgccgcccccagcaccggcagcagcgccaagggcctggccgccacccaccaccacccccccctgcacagaagcgcccaggacctgagaaagcaggtgagcaaggtgaacggcgtgaccagaatgagcagcctgggcgccggcgtgaccagcgccaagaagatgagagaggtgagacccagccccagcaagaccgtgaagtacaccgccaccgtgaccaagggcgccgtgacctacaccaaggccaagagagagctggtgaaggacaccaagcccaaccaccacaagcccagcagcgccgtgaaccacaccatcagcggcaagaccgagagcagcaacgccaagaccagaaagcaggtgctgagcctgggcggcgccagcaagagcaccggccccgccgtgaacggcctgaaggtgagcggcagactgaaccccaagagctgcaccaaggaggtgggcggcagacagctgagagagggcctgcagctgagagagggcctgagaaacagcaagagaagactggaggaggcccaccaggccgagaagccccagagcccccccaagaagatgaagggcgccgccggccccgccgagggccccggcaagaaggcccccgccgagagaggcctgctgaacggccacgtgaagaaggaggtgcccgagagaagcctggagagaaacagacccaagagagccaccgccggcaagagcacccccggcagacaggcccacggcaaggccgacagcgccagctgcgagaacagaagcaccagccagcccgagagcgtgcacaagccccaggacagcggcaaggccgagaagggcggcggcaaggccggctgggccgccatggacgagatccccgtgctgagacccagcgccaaggagttccacgaccccctgatctacatcgagagcgtgagagcccaggtggagaagttcggcatgtgcagagtgatccccccccccgactggagacccgagtgcaagctgaacgacgagatgagattcgtgacccagatccagcacatccacaagctgggcagaagatggggccccaacgtgcagagactggcctgcatcaagaagcacctgaagagccagggcatcaccatggacgagctgcccctgatcggcggctgcgagctggacctggcctgcttcttcagactgatcaacgagatgggcggcatgcagcaggtgaccgacctgaagaagtggaacaagctggccgacatgctgagaatccccagaaccgcccaggacagactggccaagctgcaggaggcctactgccagtacctgctgagctacgacagcctgagccccgaggagcacagaagactggagaaggaggtgctgatggagaaggagatcctggagaagagaaagggccccctggagggccacaccgagaacgaccaccacaagttccaccccctgcccagattcgagcccaagaacggcctgatccacggcgtggcccccagaaacggcttcagaagcaagctgaaggaggtgggccaggcccagctgaagaccggcagaagaagactgttcgcccaggagaaggaggtggtgaaggaggaggaggaggacaagggcgtgctgaacgacttccacaagtgcatctacaagggcagaagcgtgagcctgaccaccttctacagaaccgccagaaacatcatgagcatgtgcttcagcaaggagcccgcccccgccgagatcgagcaggagtactggagactggtggaggagaaggactgccacgtggccgtgcactgcggcaaggtggacaccaacacccacggcagcggcttccccgtgggcaagagcgagcccttcagcagacacggctggaacctgaccgtgctgcccaacaacaccggcagcatcctgagacacctgggcgccgtgcccggcgtgaccatcccctggctgaacatcggcatggtgttcagcaccagctgctggagcagagaccagaaccacctgccctacatcgactacctgcacaccggcgccgactgcatctggtactgcatccccgccgaggaggagaacaagctggaggacgtggtgcacaccctgctgcaggccaacggcacccccggcctgcagatgctggagagcaacgtgatgatcagccccgaggtgctgtgcaaggagggcatcaaggtgcacagaaccgtgcagcagagcggccagttcgtggtgtgcttccccggcagcttcgtgagcaaggtgtgctgcggctacagcgtgagcgagaccgtgcacttcgccaccacccagtggaccagcatgggcttcgagaccgccaaggagatgaagagaagacacatcgccaagcccttcagcatggagaagctgctgtaccagatcgcccaggccgaggccaagaaggagaacggccccaccctgagcaccatcagcgccctgctggacgagctgagagacaccgagctgagacagagaagacagctgttcgaggccggcctgcacagcagcgccagatacggcagccacgacggcagcagcaccgtggccgacggcaagaagaagcccagaaagtggctgcagctggagaccagcgagagaagatgccagatctgccagcacctgtgctacctgagcatggtggtgcaggagaacgagaacgtggtgttctgcctggagtgcgccctgagacacgtggagaagcagaagagctgcagaggcctgaagctgatgtacagatacgacgaggagcagatcatcagcctggtgaaccagatctgcggcaaggtgagcggcaagaacggcagcatcgagaactgcctgagcaagcccacccccaagagaggccccagaaagagagccaccgtggacgtgccccccagcagactgagcgccagcagcagcagcaagagcgccagcagcagcagctag

SEQ ID NO: 94321 - protein, 642 aa, Artificial Sequence
  derived and/or modified sequence
MACLLETPIRMSVLSEVTASSRHYVDRLFDPDPQKVLQGVIDMKNAVIGNNKQKANLIVLGAVPRLLYLLQQETSSTELKTECAVVLGSLAMGTENNVKSLLDCHIIPALLQGLLSPDLKFIEACLRCLRTIFTSPVTPEELLYTGPDHQTILFNHGAVQNIAHLLTSLSYKVRMQALKCFSVLAFENPQVSMTLVNVLVDGELLPQIFVKMLQRDKPIEMQLTSAKCLTYMCRAGAIRTDDNCIVLKTLPCLVRMCSKERLLEERVEGAETLAYLIEPDVELQRIASITDHLIAMLADYFKYPSSVSAITDIKRLDHDLKHAHELRQAAFKLYASLGANDEDIRKKIIETENMMDRIVTGLSESSVKVRLAAVRCLHSLSRSVQQLRTSFQDHAVWKPLMKVLQNAPDEILVVASSMLCNLLLEFSPSKEPILESGAVELLCGLTQSENPALRVNGIWALMNMAFQAEQKIKADILRSLSTEQLFRLLSDSDLNVLMKTLGLLRNLLSTRPHIDKIMSTHGKQIMQAVTLILEGEHNIEVKEQTLCILANIADGTTAKDLIMTNDDILQKIKYYMGHSHVKLQLAAMFCISNLIWNEEEGSQERQDKLRDMGIVDILHKLSQSPDSNLCDKAKMALQQYLA

SEQ ID NO: 94322 - DNA, 1929 bp, Artificial Sequence
  derived and/or modified sequence
atggcctgcctgctggagacccccatcagaatgagcgtgctgagcgaggtgaccgccagcagcagacactacgtggacagactgttcgaccccgacccccagaaggtgctgcagggcgtgatcgacatgaagaacgccgtgatcggcaacaacaagcagaaggccaacctgatcgtgctgggcgccgtgcccagactgctgtacctgctgcagcaggagaccagcagcaccgagctgaagaccgagtgcgccgtggtgctgggcagcctggccatgggcaccgagaacaacgtgaagagcctgctggactgccacatcatccccgccctgctgcagggcctgctgagccccgacctgaagttcatcgaggcctgcctgagatgcctgagaaccatcttcaccagccccgtgacccccgaggagctgctgtacaccggccccgaccaccagaccatcctgttcaaccacggcgccgtgcagaacatcgcccacctgctgaccagcctgagctacaaggtgagaatgcaggccctgaagtgcttcagcgtgctggccttcgagaacccccaggtgagcatgaccctggtgaacgtgctggtggacggcgagctgctgccccagatcttcgtgaagatgctgcagagagacaagcccatcgagatgcagctgaccagcgccaagtgcctgacctacatgtgcagagccggcgccatcagaaccgacgacaactgcatcgtgctgaagaccctgccctgcctggtgagaatgtgcagcaaggagagactgctggaggagagagtggagggcgccgagaccctggcctacctgatcgagcccgacgtggagctgcagagaatcgccagcatcaccgaccacctgatcgccatgctggccgactacttcaagtaccccagcagcgtgagcgccatcaccgacatcaagagactggaccacgacctgaagcacgcccacgagctgagacaggccgccttcaagctgtacgccagcctgggcgccaacgacgaggacatcagaaagaagatcatcgagaccgagaacatgatggacagaatcgtgaccggcctgagcgagagcagcgtgaaggtgagactggccgccgtgagatgcctgcacagcctgagcagaagcgtgcagcagctgagaaccagcttccaggaccacgccgtgtggaagcccctgatgaaggtgctgcagaacgcccccgacgagatcctggtggtggccagcagcatgctgtgcaacctgctgctggagttcagccccagcaaggagcccatcctggagagcggcgccgtggagctgctgtgcggcctgacccagagcgagaaccccgccctgagagtgaacggcatctgggccctgatgaacatggccttccaggccgagcagaagatcaaggccgacatcctgagaagcctgagcaccgagcagctgttcagactgctgagcgacagcgacctgaacgtgctgatgaagaccctgggcctgctgagaaacctgctgagcaccagaccccacatcgacaagatcatgagcacccacggcaagcagatcatgcaggccgtgaccctgatcctggagggcgagcacaacatcgaggtgaaggagcagaccctgtgcatcctggccaacatcgccgacggcaccaccgccaaggacctgatcatgaccaacgacgacatcctgcagaagatcaagtactacatgggccacagccacgtgaagctgcagctggccgccatgttctgcatcagcaacctgatctggaacgaggaggagggcagccaggagagacaggacaagctgagagacatgggcatcgtggacatcctgcacaagctgagccagagccccgacagcaacctgtgcgacaaggccaagatggccctgcagcagtacctggcctag

SEQ ID NO: 94323 - DNA, 1929 bp, Artificial Sequence
  derived and/or modified sequence
atggcctgccttctcgagacccctattcgcatgtcagtactctccgaagtaaccgcttcatcccgccactacgtggatcgattgtttgatcctgaccctcaaaaagtccttcagggggttatcgacatgaagaacgccgttatcgggaataacaagcagaaggcaaacctgatagtcttaggggccgtgccacggctcttatacctattacagcaggaaacaagcagcaccgaactcaagaccgaatgtgccgttgttctggggagtctcgccatgggaacagaaaataatgtgaaaagtcttctagactgccatattatccccgccctcctgcaggggctgcttagtcctgatctgaagtttatcgaggcatgcctccgctgtctccgcactatctttacgtccccagtgacgccagaggagctactctatactggtcctgaccaccagaccatcctgttcaaccatggagcagttcagaacatagcacacctgctcacatcactgagctacaaggtgagaatgcaggctctgaagtgtttttccgtccttgcgtttgaaaatccccaggtatccatgaccctcgtcaacgtgcttgtcgatggcgagctgttgccacaaatatttgtgaaaatgctgcagcgagataagcccatcgaaatgcagctaacttcggccaagtgcctgacatacatgtgccgggctggggcaatccgaactgatgataattgcatcgtcctgaaaacattgccctgtttagtgcggatgtgcagcaaggaacggctgttggaagagcgtgtagagggagccgagacgctggcctatctaatcgagcccgatgtcgagcttcagagaatcgcttctataaccgaccatctgatcgcaatgcttgcagactacttcaaataccccagctcggtgagcgccataacagatatcaaaaggctggatcatgacctgaaacatgcacatgagctgagacaggccgcatttaaactttacgcctcactgggcgcaaacgatgaggatatcaggaagaagattatcgaaaccgagaatatgatggatcgcatcgtgactggcttaagcgaaagttccgtgaaggtgcgtctggctgctgtgagatgtctgcactcattgtccaggtccgtccagcagctaagaacctcttttcaagatcacgccgtgtggaaacctctcatgaaggttttgcaaaatgcccccgatgaaatcttggtggtggccagttctatgctgtgcaacctgctgttggaattctcaccttcgaaagaaccaatcctcgagagtggagcagtggagctgctgtgtggcctgacacagtctgaaaaccctgcattgagggtgaacggcatctgggctctaatgaacatggctttccaggccgagcagaagatcaaagccgacattctccggtccttgagcacagagcagttgttccggctcctctcagactccgacctaaacgtcctgatgaaaactctgggcctcttgcgaaacttgctgagcactcgcccacatatcgacaagataatgtccacccacggtaagcaaataatgcaggccgttactttgatattagagggggaacataacatcgaagtgaaggaacagaccttgtgtattctcgcaaatattgccgacgggacaaccgcaaaggatcttatcatgaccaatgacgacattctccagaaaattaagtattacatgggtcactcccatgtcaagctgcagttagcggcgatgttctgcatatccaatctaatatggaacgaagaagaaggctcccaggaaagacaggacaaattgcgcgacatgggaatcgttgatatcctccataagttaagccagagtccggattctaacctgtgtgacaaagcgaagatggcgctccagcagtacctggcctag

SEQ ID NO: 94324 - DNA, 1929 bp, Artificial Sequence
  derived and/or modified sequence
atggcctgcctgctggagacccccatccgcatgtctgtgctgtctgaggtgacagccagcagccgccactacgtggaccggctgtttgatcctgacccccagaaggtgctgcagggcgtgattgacatgaagaatgctgtgattggcaacaacaagcagaaggccaacctgattgtgctgggcgctgtgccccggctgctgtacctgctgcagcaggagaccagcagcacagagctgaagacagaatgtgctgtggtgctgggcagcctggccatgggcacagaaaataatgtgaagagcctgctggactgccacatcatcccagccctgctgcagggcctgctgagcccagacctgaagttcatcgaggcctgcctgcgctgcctgcggaccatcttcaccagccctgtgaccccagaggagctgctgtacacaggccctgaccaccagaccatcctcttcaaccacggggctgtgcagaacatcgcccacctgctgaccagcctgagctacaaggtgaggatgcaggccctgaagtgcttctctgtgctggcctttgagaacccccaggtgtccatgaccctggtgaatgtgctggtggatggagagctgctgccccagatctttgtgaagatgctgcagagggacaagcccatcgagatgcagctgaccagcgccaagtgcctgacctacatgtgcagagctggggccatcagaacagatgacaactgcatcgtgctgaagaccctgccctgcctggtgaggatgtgcagcaaggagcggctgctggaggagcgggtggagggcgctgagaccctggcctacctgattgaaccagatgtggagctgcagagaattgccagcatcacagaccacctgattgccatgctggccgactacttcaagtaccccagctctgtgtctgccatcacagacatcaagaggctggaccatgacctgaagcacgcccacgagctgcggcaggccgccttcaagctgtatgccagcctgggcgccaatgatgaggacatcaggaagaagatcattgaaacagagaacatgatggaccgcatcgtgacaggcctgtctgagagctctgtgaaggtgcggctggccgctgtgcgctgcctgcacagcctgagccgctctgtgcagcagctgcggaccagcttccaggaccatgctgtgtggaagcccctgatgaaggtgctgcagaatgccccagatgagatcctggtggtggccagctccatgctgtgcaacctgctgctggagttcagccccagcaaggagcccatcctggagagcggggctgtggagctgctgtgtggcctgacccagagtgaaaatcctgccctgcgggtgaatggcatctgggccctgatgaacatggccttccaggccgagcagaagatcaaggctgacatcctgcggagcctgagcacagagcagctgttccggctgctgagtgacagcgacctgaatgtgctgatgaagaccctgggcctgctgaggaacctgctgagcacccggccccacatcgacaagatcatgagcacccacggcaagcagatcatgcaggccgtgaccctcatcctggagggggagcacaacatcgaggtgaaggagcagaccctgtgcatcctggccaacattgctgatggcaccacagccaaggacctgatcatgaccaatgatgacatcctgcagaagatcaagtactacatgggccacagccacgtgaagctgcagctggccgccatgttctgcatcagcaacctgatctggaatgaggaggagggcagccaggagcggcaggacaagctgcgggacatgggcatcgtggacatcctgcacaagctgagccagagcccagacagcaacctgtgtgacaaggccaagatggccctgcagcagtacctggcctag

SEQ ID NO: 94325 - DNA, 1929 bp, Artificial Sequence
  derived and/or modified sequence
atggcctgcctgctggagacccccatccggatgagcgtgctgagcgaggtgacagcatcttcaagacattacgtcgaccgcctgttcgacccggaccctcagaaagtgctgcagggggtgatagacatgaaaaatgccgttattggaaataataaacagaaggccaatcttatcgtgctgggtgcagtccctcgccttctctacctgttacagcaagaaacatcttccaccgagcttaaaactgagtgtgcggtggtgcttggctcacttgccatgggaaccgaaaataatgttaagtccctcctcgactgtcacatcattccggctcttctgcaaggcttattgtcccctgacttaaagttcatcgaagcgtgcctgagatgcctgagaactatcttcacaagtcctgtgaccccagaggagctcctctatactggacccgaccaccaaacgatattgtttaaccacggcgcggtgcagaatatcgcccatttattaaccagcttgtcatataaagtgcgaatgcaagcccttaagtgtttttcagtgcttgcatttgaaaatccgcaggttagtatgaccctagtgaacgtgctcgtggacggagaactcttacctcaaatcttcgttaagatgttgcagagggacaaacccatcgagatgcagcttaccagcgcaaagtgccttacttatatgtgtagggccggcgccattcgcaccgatgacaactgtatcgtgctgaagactctcccatgcttggtaagaatgtgtagcaaggagcgtctcctggaagagcgtgtggagggtgctgaaaccctcgcgtacttgatcgaaccggacgttgaactccagaggattgcctccattacagatcacctaatcgcgatgctggccgactatttcaaatatcccagctccgtgtcagctatcactgacataaagcgccttgatcatgacttaaaacacgcgcacgagctgcggcaggctgcattcaaattgtacgcctctctcggcgctaacgatgaggatattcgcaaaaagatcatcgaaacagagaacatgatggataggattgtcacggggcttagtgaaagttctgtgaaagtccgcttggcggcggtgaggtgcctgcacagtctgtcccggtccgtgcagcaattgcgtacctcttttcaagatcatgcggtctggaagcccttgatgaaggtccttcaaaatgcaccagacgaaattttggtggtggctagcagcatgctctgtaatctcctcctggagttttcccctagcaaggagccaattctggagtctggagccgtcgagctactttgtgggctcacacaatctgagaaccctgccttgagggtgaacggaatttgggcactgatgaatatggcttttcaggccgaacagaaaatcaaagctgacatcctgaggtccctttccacagaacagctcttccggctgctgtccgatagcgacttaaacgtgctgatgaaaactctagggctcttgcgaaatttgctgagtacacggcctcatattgacaaaatcatgtctacccacgggaagcagatcatgcaagctgttaccctaatccttgaaggggaacataacattgaggtaaaggagcagaccctatgtatcctggcgaatatcgcagatggcaccacagccaaggacctgatcatgaccaatgacgatattctgcaaaagattaagtattatatgggccactctcatgtgaaacttcagcttgccgcgatgttttgcatctctaacttgatttggaacgaagaggaggggtctcaggagcggcaggataagctcagggacatggggatcgtggacattctgcacaagctttcacagtctccggattccaacttatgtgacaaagcaaaaatggctctccagcagtatctggcttag

SEQ ID NO: 94326 - DNA, 1929 bp, Artificial Sequence
  derived and/or modified sequence
atggcctgcctactggagacgccaatcagaatgtctgtgctctccgaagtcaccgccagttcccgccattatgtggatagactgtttgaccctgacccccagaaagtactacagggcgtcattgatatgaaaaacgcagtaatcggcaataataagcagaaagctaacttgattgtgttgggggcagtccccaggctgctttatctgctacagcaggagacctcctcaaccgaattgaagacagaatgtgccgtagtgttgggaagtctggcgatgggaactgaaaataacgtgaaaagtctgctggactgccatattattccggcattgcttcagggcctcctgagccccgaccttaagttcatagaagcctgcctcaggtgcctgcggacgatcttcactagtccagtgacaccggaggaactgttatacacggggcctgaccaccagaccatcctctttaaccacggagccgtgcagaatatcgcacaccttcttacatccctgtcttacaaagtcagaatgcaggcactgaagtgcttcagtgtcctggcattcgagaatccccaagtgtcgatgacactggtgaatgtgctcgtggacggcgagttgcttccacagatctttgtcaaaatgctgcaaagagataaaccgattgagatgcagctaacgtctgctaaatgcctcacatacatgtgcagggctggcgcaatccgcacagatgacaattgtatcgtgctaaaaaccctgccctgtctggtacggatgtgttcaaaagagaggctactggaggaacgcgtggagggggcagagacccttgcctacctcatcgaaccagatgtcgaactccagagaattgcctccataactgaccacctgatagcaatgctggctgactactttaagtatccctcttccgtctccgccataacagacatcaaaagactcgatcacgaccttaagcacgcccacgagctccgacaggctgctttcaagttatacgctagcttgggtgctaacgacgaggacatcaggaaaaagatcattgaaacagagaatatgatggatagaatagtaacaggcctgtcagaaagttcagtgaaagtgagactcgcagccgtgaggtgcctgcattcgctctcccggtctgtgcagcagttaaggacatctttccaggaccatgctgtgtggaagccactgatgaaagtccttcagaacgcaccagatgagatccttgttgtggccagctccatgctctgcaacctgctgctcgaattttctccttccaaggaacccattctcgagtcgggcgcagtcgagctgctttgcggtctgacccagagtgaaaacccggctctccgcgtgaatggcatttgggcactcatgaatatggcatttcaggccgaacagaagatcaaggctgacattcttcgttcattaagcaccgaacagctctttcggctgttgtccgacagcgacttgaacgtgctgatgaaaactctcggtctgctgaggaacctccttagtacacggcctcacatcgataaaatcatgtcaacacacggcaagcagataatgcaggcagtgacgctgatcttggagggtgaacataatattgaagtcaaagagcagactctgtgcattctggctaacattgccgacggcacgaccgccaaggacctcatcatgacaaacgacgatatattgcagaaaataaagtattacatggggcactctcacgtcaagctgcagctggctgcaatgttctgtatttctaatctcatttggaatgaggaggaggggtcgcaagagcgacaggataagcttcgggacatgggcatcgtggacattctccacaaattatctcagtcaccagactctaacctctgtgataaggcgaaaatggctctgcagcagtatcttgcctag

SEQ ID NO: 94327 - DNA, 2465 bp, Artificial Sequence
  derived and/or modified sequence
gctcaagatggcgtgcttgttggagaccccaatccgcatgagcgtcctttcggaagtaacagctagcagtcgccactatgttgacaggctatttgaccctgatccccagaaagttctacaaggtgtcatagacatgaaaaatgctgtaattggaaacaacaagcagaaagccaatctcattgttttaggagctgttccaagattgttgtacttgcttcagcaagaaacctcaagcacagagctgaaaactgaatgtgcagtggtgttgggaagtcttgctatgggtactgaaaacaatgtcaagtctctactggactgccatattatccctgccttattgcaaggactactgtccccagacctgaagtttattgaagcttgcctccgatgcctgcgtaccatcttcaccagtcctgtcactccagaggagctactgtatacagggccagatcatcaaacaattttatttaaccacggtgcagttcagaatattgctcacctactaacctcactgtcctacaaagttcgaatgcaagcactgaaatgtttctcagttttagcttttgaaaacccccaggtatcgatgaccctggtaaatgttttggttgatggagaattgttaccacagatttttgtgaagatgttacagagggataagcctattgagatgcagctcacatcagcaaaatgtttaacttacatgtgtagagctggagcaattcggacagatgataactgtattgtattaaagacattaccttgtttggttcgaatgtgcagtaaggagagattactagaggagagagttgaaggagctgagacacttgcctatctgattgaaccagatgttgagctacagagaatcgctagcataactgatcacctcattgccatgcttgctgattatttcaagtatcccagctcagtgagtgccatcactgatattaaaaggcttgatcatgatttaaaacatgctcacgaactccgccaggctgcattcaagctctatgcctctcttggagcaaatgatgaagacatccggaagaagatcattgagactgaaaatatgatggaccgaattgtgactggcttgtctgagtctagtgtcaaggtgcggttagctgccgtcagatgtttgcacagtttatccagatctgtgcagcagcttcgaaccagtttccaggatcatgctgtttggaaacctttaatgaaggttttacaaaatgcaccagatgaaatcctagtggtagcatcttccatgctgtgtaatcttcttcttgaattttctccaagcaaagagccaattttggaatcaggagccgtagagctactttgtggattaactcagagtgaaaatcctgctttacgagtgaatggaatttgggctttaatgaatatggcatttcaggctgaacaaaaaataaaagcagatattttacgaagcttgagtactgaacagctattccggttattatcagattcagatttgaatgtgctgatgaagacattgggacttcttagaaatctcctctccactcgtcctcatatagataaaataatgagtactcatggaaagcaaattatgcaagccgtcactcttattctagaaggggaacataacattgaggtcaaagagcagacactgtgcatcttagccaacatagcggatgggacaacagcaaaagatcttattatgaccaatgatgatatcctacagaaaatcaagtattacatgggccattcacatgttaaactgcagcttgcagccatgttttgtatatcaaacctcatatggaatgaagaggaaggttcacaagaacgccaggataaattacgagacatgggcatcgtagatattctacacaaactgagtcagtcaccagattcaaacctttgtgacaaggcaaagatggcactgcagcagtacctggcatgatgggagtgcccctgggcacctgcgagcatcccacctccttgtttaaggaagtacaggaaccagcctcatttgattccttctatttgcacaagtcaccttggactgcagggagctgttttgcaaaagcagtttagtaggcttagatctcaaattcatcttgagaacatttttttgaggtagtaatttcctcagaagactcttgtgttttgttttggtttttttttctgagctactcggactctttattagaacaatcaatcattttcctttggacctacaatttttgcctatgctgcagccactttgtgagtgagaatgaatatgtctgtgtgaacacacaggcatgcgtgtgtatgtgcacgtacatgggccagaatgaatggatgtgtgtgtgtgagggatacctcagatttttcttttcttattttgtgtgaaaatctcttttctacagattttccagggtttaagcattgcttgctgtataaaaaactttactgaattatatacagtttgaatgaaatgttatttt

SEQ ID NO: 94328 - protein, 198 aa, Artificial Sequence
  derived and/or modified sequence
MACLLETPIRMSVLSEVTASSRHYVDRLFDPDPQKVLQGVIDMKNAVIGNNKQKANLIVLGAVPRLLYLLQQETSSTELKTECAVVLGSLAMGTENNVKSLLDCHIIPALLQGLLSPDLKFIEACLRCLRTIFTSPVTPEELLYTDATVIPHLMALLSRSRYTQEYICQIFSHCCKGPDHQTILFNHGAVQNIAHLLT

SEQ ID NO: 94329 - DNA, 597 bp, Artificial Sequence
  derived and/or modified sequence
atggcctgcctgctggagacccccatcagaatgagcgtgctgagcgaggtgaccgccagcagcagacactacgtggacagactgttcgaccccgacccccagaaggtgctgcagggcgtgatcgacatgaagaacgccgtgatcggcaacaacaagcagaaggccaacctgatcgtgctgggcgccgtgcccagactgctgtacctgctgcagcaggagaccagcagcaccgagctgaagaccgagtgcgccgtggtgctgggcagcctggccatgggcaccgagaacaacgtgaagagcctgctggactgccacatcatccccgccctgctgcagggcctgctgagccccgacctgaagttcatcgaggcctgcctgagatgcctgagaaccatcttcaccagccccgtgacccccgaggagctgctgtacaccgacgccaccgtgatcccccacctgatggccctgctgagcagaagcagatacacccaggagtacatctgccagatcttcagccactgctgcaagggccccgaccaccagaccatcctgttcaaccacggcgccgtgcagaacatcgcccacctgctgacctag

SEQ ID NO: 94330 - DNA, 597 bp, Artificial Sequence
  derived and/or modified sequence
atggcttgtctcctggaaacacccatacgcatgtccgtcctctctgaagtcactgccagctctcgccattatgttgaccggctcttcgacccagatccacagaaagttctgcagggagtgatcgatatgaagaacgccgtgataggcaacaacaagcagaaggccaacttgatcgtgctcggtgccgttccgcgcctgttgtatcttcttcagcaggaaacttccagcacggaacttaaaacagaatgtgccgtggttcttggaagtttagcaatggggaccgagaacaatgtgaaatccctgctcgattgccacatcattcctgccctgctccaaggtctgctgtctccggacctaaagttcatcgaggcatgtctgcggtgcctcagaacgatcttcactagtccagtgactcctgaggagcttctctacacagacgcgactgtgatcccccatcttatggcccttctgtcacggtccaggtacacccaggaatacatctgtcagatatttagtcactgctgcaagggtcccgaccatcaaacgatcctgtttaaccacggcgccgttcagaatatcgcccacctgctaacgtag

SEQ ID NO: 94331 - DNA, 597 bp, Artificial Sequence
  derived and/or modified sequence
atggcctgcctgctggagacccccatccgcatgtctgtgctgtctgaggtgacagccagcagccgccactacgtggaccggctgtttgatcctgacccccagaaggtgctgcagggcgtgattgacatgaagaatgctgtgattggcaacaacaagcagaaggccaacctgattgtgctgggcgctgtgccccggctgctgtacctgctgcagcaggagaccagcagcacagagctgaagacagaatgtgctgtggtgctgggcagcctggccatgggcacagaaaataatgtgaagagcctgctggactgccacatcatcccagccctgctgcagggcctgctgagcccagacctgaagttcatcgaggcctgcctgcgctgcctgcggaccatcttcaccagccctgtgaccccagaggagctgctgtacacagatgccaccgtcatcccccacctgatggccctgctgagccgcagccgctacacccaggagtacatctgccagatcttcagccactgctgcaagggccctgaccaccagaccatcctcttcaaccacggggctgtgcagaacatcgcccacctgctgacctag

SEQ ID NO: 94332 - DNA, 597 bp, Artificial Sequence
  derived and/or modified sequence
atggcctgcctgctggagacccccatccggatgagcgtgctgagcgaggtcacagcctcttcccgacactatgtagaccggttattcgatccagaccctcaaaaggtgctgcaaggtgtcattgatatgaaaaatgctgtgattgggaacaataaacagaaggcgaatctaattgtacttggcgccgtcccacgcttgctgtacctcctccagcaagagaccagctctaccgagctgaagactgaatgtgccgtcgttttgggaagcctggcaatgggtaccgagaacaatgtcaagtctcttctcgactgtcatattattccagctcttctgcagggcctcctttccccggatctaaagttcatagaggcttgtctccgctgtctgcgcaccattttcacgtcacctgtgacacccgaagagctactgtataccgatgccaccgtcatcccccacttaatggcccttctctcacggagccgttacacacaggagtatatctgccagatcttctcacattgttgtaagggccctgatcaccagacgattctattcaatcacggggccgtacaaaatatagcccaccttctgacttag

SEQ ID NO: 94333 - DNA, 597 bp, Artificial Sequence
  derived and/or modified sequence
atggcctgccttctggagactcccattcggatgagtgttctgtcagaggtgaccgcctcaagccgccactacgtggatcgactgtttgaccccgatccacaaaaagtactgcagggggttattgatatgaagaacgccgtgattgggaacaataaacaaaaggccaatctgatcgtgctcggagctgtacccagactgctatacctgctccagcaggaaaccagcagcactgaactgaagacagagtgcgcagtggtcctcggctcgctggcaatgggcacagagaacaatgtcaagagccttctggattgtcatatcatcccagcgttattgcagggactgctgagtcccgacttgaagtttatcgaggcgtgcctgaggtgcctgagaaccattttcacctcccccgtgacaccagaggagctcctgtacaccgacgcaacagtgatcccccatctgatggctctgctaagccggtctagatatactcaggaatatatctgccaaatcttctcacactgctgcaagggcccagaccatcaaaccatactcttcaatcatggagccgttcaaaacattgctcacctgttaacgtag

SEQ ID NO: 94334 - DNA, 731 bp, Artificial Sequence
  derived and/or modified sequence
ccacctctaacccaggctcagagtagctgctgtttctgagagaacgattccggtgcctagcgttggccaatagttggctgtcgaaagtgccggcccccgcgccggcgcctgcagcagccgggtgggaaggctcaagatggcgtgcttgttggagaccccaatccgcatgagcgtcctttcggaagtaacagctagcagtcgccactatgttgacaggctatttgaccctgatccccagaaagttctacaaggtgtcatagacatgaaaaatgctgtaattggaaacaacaagcagaaagccaatctcattgttttaggagctgttccaagattgttgtacttgcttcagcaagaaacctcaagcacagagctgaaaactgaatgtgcagtggtgttgggaagtcttgctatgggtactgaaaacaatgtcaagtctctactggactgccatattatccctgccttattgcaaggactactgtccccagacctgaagtttattgaagcttgcctccgatgcctgcgtaccatcttcaccagtcctgtcactccagaggagctactgtatacagatgccacagtgataccacacctcatggcactgcttagcaggtcccgctatacccaggagtacatctgtcagatcttctcacactgctgtaaagggccagatcatcaaacaattttatttaaccacggtgcagttcagaatattgctcacctactaacct

SEQ ID NO: 94335 - DNA, 906 bp, Artificial Sequence
  derived and/or modified sequence
atgtacaccagacgatacagttctatatcatccactattatggacgtggactccactatctcgtccggacgcagcacccctgccatgatgaacggacaggggtctactacctccagtagcaagaacattgcatataattgttgttgggatcagtgtcaggcctgtttcaatagcagcccagacttagccgaccacatccgatctattcatgtagacggccaaaggggaggagtgttcgtatgcctttggaaggggtgtaaggtatacaacaccccatctacttctcaatcttggctccagcgccatatgttgacacactccggggataagcccttcaaatgcgttgtcggaggatgtaatgccagtttcgcttcacaaggtggattggcccgccacgtgccaacacatttctctcagcaaaattccagtaaggtctctagccagcctaaagcgaaggaagagagccccagcaaagcaggtatgaataaacggcggaagttgaagaataaaagacgaagatctttgccccggcctcatgacttttttgatgcacaaacactggacgcgatccggcacagggctatatgcttcaatttgagcgctcacattgagagcctgggtaagggccactccgtcgtgttccacagcacggtgatcgccaaaaggaaggaagatagcggcaaaataaagctgctgctgcactggatgccagaagacatactgccggatgtctgggtgaatgagagcgagagacaccagctgaagacaaaggtcgtgcatctgtcaaaactgcccaaggatactgccttacttctcgaccccaacatctaccggaccatgccacagaagcggcttaaaagaaccctgatccgaaaggtgttcaatttgtatctttccaaacagtag

SEQ ID NO: 94336 - DNA, 906 bp, Artificial Sequence
  derived and/or modified sequence
atgtacacccggcgctacagcagcatcagcagcaccatcatggatgtggacagcaccatcagcagcggccgcagcaccccagccatgatgaatggccagggcagcaccaccagcagcagcaagaacatcgcctacaactgctgctgggaccagtgccaggcctgcttcaacagcagcccagacctggccgaccacatccgcagcatccacgtggatggccagagaggaggagtgtttgtgtgcctgtggaagggctgcaaggtgtacaacacccccagcaccagccagagctggctgcagaggcacatgctgacccacagcggggacaagcccttcaagtgtgtggtgggcggctgcaatgccagctttgccagccagggcggcctggcccggcacgtgcccacccacttcagccagcagaacagcagcaaggtgagcagccagcccaaggccaaggaggagagccccagcaaggccggcatgaacaagaggaggaagctgaagaacaagagaagaagaagcctgccccggccccatgacttctttgatgcccagaccctggatgccatccgccaccgggccatctgcttcaacctgagcgcccacatcgagagcctgggcaagggccacagcgtggtgttccacagcacagtgattgccaagaggaaggaggacagcggcaagatcaagctgctgctgcactggatgcctgaggacatcctgcctgatgtgtgggtgaatgaaagtgagcggcaccagctgaagaccaaggtggtgcacctgagcaagctgcccaaggacacagccctgctgctggaccccaacatctaccgcaccatgccccagaagaggctgaagaggaccctcatcaggaaggtgttcaacctgtacctgagcaagcagtag

SEQ ID NO: 94337 - DNA, 2533 bp, Artificial Sequence
  derived and/or modified sequence
aactctcctttccccgccctctttcccctcggcgcttcgctcctcacggacctcaggacggctctaactcggaaacagtccccaaacgggcccagatcctctggcggagcagaagagggccttgatgtacacacgtcggtactcaagcataagcagtactataatggatgtagacagcacaatttccagtgggcgttcaactccagcaatgatgaatggacaaggaagcactacttcttcaagcaaaaatattgcctataattgttgttgggaccagtgccaggcttgcttcaactctagcccagatctggcagatcacatccgttccatacatgtagatggtcagcgaggaggggtatttgtttgcttatggaaaggttgtaaagtatataacactccatctaccagtcaaagttggttacaaaggcatatgctgacacacagtggagacaaacctttcaagtgtgttgttggtggctgcaatgccagctttgcttctcagggagggctagctcgtcatgtacccacacacttcagtcagcagaactcctcaaaagtttctagccagccaaaggccaaagaagaatctccttctaaagctggaatgaacaaaaggaggaaattaaagaacaaaagacgacgctcattaccacggccacatgatttcttcgatgcacaaacactggatgcgataagacatcgagccatatgctttaacctctcagctcatatagaaagtttagggaagggacacagtgttgtttttcatagtactgtaatagctaagagaaaagaagattctgggaagatcaaacttttgcttcattggatgcctgaagacattctgcctgatgtgtgggtgaatgaaagtgaacgacatcagttaaaaactaaagtagttcatttatcaaagctacccaaagatactgccttgcttttggacccaaacatatacagaacaatgccgcagaagaggttgaagagaactctgataagaaaagtgttcaatttgtatttaagcaaacagtgaacgacgtttgcaatcaactaaaaattcgtctatcgaattagggctgaaaattactgttaaagagtgttgcagtatgtctggtggctcccttttcaggactagggctttctcatggagtacagtatgttaatatttacctatataactaatctgttaacggtttttgaaaaacctttcaaattatttgaataatcttcatattttcatttaacctatatgactctaattttttttctgaggaaatcatttggtttttgagttgttttttcttaatgtaagaaaaattgtattttttttacaagtatcttcaaactgaatcttttatgcaccaaagttggtcttgaaaaggaaaataaaatcactttcttgcttggtaagcaagaagccatatcgattttttttaacttacagaaatggaaatatgtgtaacttgttagtattgtattaaacaaatgttgcatagagataatagaacattgcttgtaaataattcagcagatttgtaatatatttttatattttgaaatgtactgtagatgttttctagaggcatgaaagttaaatgtatatattatggtagaaataatattgaaggatattgtacttcactagtgctgccagaggaattgttaataaaagcaccttctttaacaataaatgtctttcacagacttaagggactatgtactactgttaatatctctaagaacaaaacacattgaacatccttccagaaagtctttgagggaggacctatacccataatagaattatggcactcatttctgacagtgatcaagaaatcagttatttccttactgttggaaggacattgtaaagtatgtggttatatgcagtgaaactgcagaaaatactcctggttgaggagttttcactttactacagtgatataaaaaccagcagtttttacactaaattttttaaagaaatattagacaaaaatatagaattaaaacctttggttccaaaatgggaaaggttccacgatacataaatcatttctcatttgctttaaaaaatttaaaagtgtaaaaattatgagagactttattcgttaacaatgggggtaaagagctatatacatgaaaatgagtcttataaaattaagtgaagtgcaaataaaagcactgctactataagacattctggaatggttgtttaataagggtattatccatttgatctatagcaatgtgattttatttttaaaaagaaaagcagtgtgttttctttttttgttgttttcttttgcttaagcacttcatcaattgctttattctgtatctgcgaagtaatctgcaatctcttttgttctttttaaaatttgatttgttataaaattgccaaatagaagtgtttcagatacatagtttgtacctgtatttttattttattgcctcatgttcttgtaagtcattcttaattgaccaatgattgtagaccttgcttgagtattttttctaataaaacaaagcaaatcac

SEQ ID NO: 94338 - DNA, 906 bp, Artificial Sequence
  derived and/or modified sequence
atgtacacccggcggtacagcagcatcagcagcaccatcatggacgttgattctacaatttcttcagggcgctcgaccccagccatgatgaatggtcagggatccactactagttcctcaaagaacatcgcctataattgctgctgggatcagtgccaggcctgcttcaattcttcccctgaccttgcagatcacatacgatccattcacgtcgatggacaaagaggaggcgtatttgtatgtctttggaaaggatgcaaagtctacaatacgccctcaacctcccaatcgtggcttcagcgccacatgctgactcatagtggagataaaccttttaaatgtgtagtgggagggtgcaatgcctctttcgctagccagggcggtctagcccggcacgtacccacccactttagccagcagaatagttcaaaagtgtcgagtcaaccaaaagcgaaagaggaaagtcccagcaaagccggcatgaataaacggaggaagctgaaaaataaaagaagacggagcctcccaaggccccatgatttcttcgacgctcaaacacttgatgcaataaggcatcgcgcgatctgtttcaatctcagtgcacacatagagtcccttggcaagggtcactctgtagtctttcactcaaccgttatagctaagaggaaggaagactcaggcaaaattaagctcctgctacactggatgcctgaagacatccttccagatgtctgggtgaatgaatctgagaggcaccaacttaaaacaaaggtagtacacctttctaagctgcctaaagatactgcgttactcttggaccccaacatctataggactatgccgcaaaaacggctgaagcgaacactcatcaggaaggtctttaatctctatctgagtaagcaatag

SEQ ID NO: 94339 - DNA, 906 bp, Artificial Sequence
  derived and/or modified sequence
atgtatacccgaagatactcctccattagctccacaataatggatgtggatagtacaatcagtagcggtaggtcaaccccggcaatgatgaatggacagggatccactactagtagttccaagaacattgcatataattgctgctgggaccaatgccaggcgtgttttaacagtagtccggacctcgctgatcacattagaagcatccatgtggatgggcaaagaggaggcgtgttcgtatgtctttggaaaggatgcaaggtgtacaacactcccagtacaagtcaatcctggttgcaacgtcatatgctaacacactcaggcgataagcccttcaagtgcgtcgtgggtggctgtaacgctagcttcgccagccaagggggactggcacgccatgtacccacacatttcagtcagcagaattccagtaaggtgagctcccagcccaaggcaaaggaggaatcgcccagtaaagcaggcatgaacaagaggcgtaagctaaagaacaagcgcaggcgctccctgccaaggccacacgacttcttcgatgcccagacactggatgctatccgacacagggccatctgtttcaacctgagtgctcatatcgaatcactgggtaaggggcactccgtagtgttccacagtaccgtgatagccaagcgcaaagaagatagcggcaagattaaattgctattacattggatgccagaggatatcctccccgatgtctgggtgaatgaatcggagcgacaccaattgaagacaaaggtggttcacctgtccaagcttcctaaagataccgcactcctgctagaccccaacatctatcgaacgatgccacagaaacggctgaaaaggactctcatcaggaaagtcttcaacctgtacctcagcaaacagtag

SEQ ID NO: 94340 - DNA, 906 bp, Artificial Sequence
  derived and/or modified sequence
atgtacaccagaagatacagcagcatcagcagcaccatcatggacgtggacagcaccatcagcagcggcagaagcacccccgccatgatgaacggccagggcagcaccaccagcagcagcaagaacatcgcctacaactgctgctgggaccagtgccaggcctgcttcaacagcagccccgacctggccgaccacatcagaagcatccacgtggacggccagagaggcggcgtgttcgtgtgcctgtggaagggctgcaaggtgtacaacacccccagcaccagccagagctggctgcagagacacatgctgacccacagcggcgacaagcccttcaagtgcgtggtgggcggctgcaacgccagcttcgccagccagggcggcctggccagacacgtgcccacccacttcagccagcagaacagcagcaaggtgagcagccagcccaaggccaaggaggagagccccagcaaggccggcatgaacaagagaagaaagctgaagaacaagagaagaagaagcctgcccagaccccacgacttcttcgacgcccagaccctggacgccatcagacacagagccatctgcttcaacctgagcgcccacatcgagagcctgggcaagggccacagcgtggtgttccacagcaccgtgatcgccaagagaaaggaggacagcggcaagatcaagctgctgctgcactggatgcccgaggacatcctgcccgacgtgtgggtgaacgagagcgagagacaccagctgaagaccaaggtggtgcacctgagcaagctgcccaaggacaccgccctgctgctggaccccaacatctacagaaccatgccccagaagagactgaagagaaccctgatcagaaaggtgttcaacctgtacctgagcaagcagtag

SEQ ID NO: 94341 - DNA, 2941 bp, Artificial Sequence
  derived and/or modified sequence
gcgaaagccgggagggcgagcgagagagcaagcaggcagcaggctgccggcgggcgggcggacggcacagagggagggagcgagcgagcagtgagtaagccagcaagggcggtcgggtcccgaggtcagccgagatttctcaggtccctccggccccctccctggagtccacagcgcctccggtgtccagaggatcggacacggcccggcccggccatggcctcgttgctgaaggtggatcaggaagtgaagctcaagctctgagcttccgctcggctcagcccagcccccaactcccggggtcggcttcgcgggagaggaaaatataggatggctttctgtaccgcgtctgatgatggagagtcccggggacacctccgcggacacgtgttggactcagggctttaggcccgtgacagctgacagcttcagacacaggaggaagggagggaagggggaggacagaggagacaggcaggtgctgtcctcaaagccctgcgttcttctgagatggaaaaatggatcctcaaaaaaataaagtatttgcagtctgggggcctctcagcttcttattacagttacaaggttgattctttcagggagcggatcacaagtgaggcagaagacttggtggcaaattttttcccaaagaagttattagaacttgatagttttctgaaggaaccaatcttaaacatccatgacctaactcagatccactctgacatgaatctcccagtccctgaccccattcttctcaccaatagccatgatggactggatggtcccacttataagaagcgaaggttggatgagtgtgaagaagccttccaaggaaccaaggtgtttgtgatgcccaatgggatgctgaaaagcaaccagcagctggtggacattattgagaaagtgaaacctgagatccggctgttgattgagaaatgtaacacggtcaaaatgtgggtacagctcctgattcccaggatagaagatggaaacaactttggggtgtccattcaggaggaaacagttgcagagctaagaactgttgagagtgaagctgcatcttatctggaccagatttctagatattatattacaagagccaaattggtttctaaaatagctaaatatccccatgtggaggactatcgccgcaccgtgacagagattgatgagaaagaatatatcagccttcggctcatcatatcagagctgaggaatcaatatgtcactctacatgacatgatcctgaaaaatatcgagaagatcaaacggccccggagcagcaatgcagagactctgtactgaggccagggccagggccaggggactctgtgagtctggctcaagaccgacattgccttggtttgttacatgactatcgtgatggggaaactggctggaaatagtaatcacacctctctgtttttagttagagtctaatgaaactctcatctagttctgtgatgtgtttacctcttttttcaggcctcaggaactcttctatttccttccctaataccccacacccaacctgtcgtaatttctggagaactccaggtttgtgtgtgcaggatgttggcacaaaaatacctgtgttttcattctccccctctctccctcctgtgtcttgcgctttatgttttcttccgtttgataattagttggttaaaagctgagggaaccggaaggaaagtgctaggtgttttttaggaactagggtggcggggggacgaacttctcttcctcacatgaggttactgtttctttcctctgtggggcattggatcctcccacagttgccctggtgatgacttagggcttcccatctgtgtacatcccactttgaatcttgatcgtgacaagaaataccttaggccttcagtcaattccgaagctccttcagttgtttttataatgggcgttttcacatgcacatatgtgtatgcatgtatacgcccatacagacatgcacacacagactcctactccattagctaacataccctccctctccacaacccctgtcacatacctttcaggaggtgacagttgtcttagttgtcatctacccagacaaacgtcctgggcccgtcctccctcctgatactgtagcctcttggtacccagggtgagttggtggagaacagagagatgagaagcagagggcttggggaaagcctgttcctctctgactcagccctttttggcattattgcaagagcttgactcctggttgccttttcccagccagttttcagttggggtgaaggtttctgcaagtgtgaggtccagatgctgctgctcatgttgggctttccttttgggaactatttctctttatttatagtgtcgggcttccggggaaagcaatcattggtgtgtatgtgtatgtgcatgcacacacgtgcatatacacatttgtgtatgtggaaatgtgctgggcaagtcaaaactatagaagagttgcctcctgtctctcgaatcttccagagatatcacttaattgttaacagcttttgtgttaatccccttcagcccctagctcttttattctaccacggctggagagttgatacctgcagtcagcctgccagtgactcttagtgtctgtttctgacttatttttcctgtctctgtcttccaacccccaataatatttccaccggggatgcatcatttttactcccaatattctgtagagagggagtcaggatgctgtcttcccacgaatagtactcagtaacaaaccaattgcattttagttgggcagtgctcccacccaccctccagatcccttccagctaaaacccttcccccttccctccatgtgtttctcagtttcccgtttcgtttgttggactgttccactgcccctcctcctcaccctatcacccatggatcgtaatgtaaaattcttttaccatgtcaagaaattatt

SEQ ID NO: 94342 - DNA, 3082 bp, Artificial Sequence
  derived and/or modified sequence
aagtgtaggagccaaggccgcagagaatggggaggctccgctattctctaaattcagggggcggcgggcgcggtggctcacgcctgtaatctcagcacttggggaggccgaggagggcggatcacgtgaggtcaggagttcgagaccagcctggccaacacagtgaaaccccgtctctactaaaaatacaaaaactagccgggcgtggtggggcacgcctataatcccagcttaatcccagctactcgggaggctgaggcaggagaatcgcttgaacctgggaggtggaggttgcagtgagccgagatcgggccactgcactccagcctgggcgacagggcaaggctccatctcagaacaacaacagcaacaacaaaaggccgggcatggtggctcacgcttgtaattccagcactttgggaggccgaggcgggcggatcacaaggctggagtgaagcggaacaaacaaacatggctcactgcagatttgacttcctggctcaagcaatcctcttgcttcaacctccagtgtagcagggaccacagcatgaaagcccctttaggggaggtgactggaatcatccccaaagaattctcacctagtcctggtgtggctgcttcatagtcctgcgtttcttcctgcttggctgtccctaacatctcagaaacgcatagagaagtaacgggcttctagagaggttgattctttcagggagcggatcacaagtgaggcagaagacttggtggcaaattttttcccaaagaagttattagaacttgatagttttctgaaggaaccaatcttaaacatccatgacctaactcagatccactctgacatgaatctcccagtccctgaccccattcttctcaccaatagccatgatggactggatggtcccacttataagaagcgaaggttggatgagtgtgaagaagccttccaaggaaccaaggtgtttgtgatgcccaatgggatgctgaaaagcaaccagcagctggtggacattattgagaaagtgaaacctgagatccggctgttgattgagaaatgtaacacggtcaaaatgtgggtacagctcctgattcccaggatagaagatggaaacaactttggggtgtccattcaggaggaaacagttgcagagctaagaactgttgagagtgaagctgcatcttatctggaccagatttctagatattatattacaagagccaaattggtttctaaaatagctaaatatccccatgtggaggactatcgccgcaccgtgacagagattgatgagaaagaatatatcagccttcggctcatcatatcagagctgaggaatcaatatgtcactctacatgacatgatcctgaaaaatatcgagaagatcaaacggccccggagcagcaatgcagagactctgtactgaggccagggccagggccaggggactctgtgagtctggctcaagaccgacattgccttggtttgttacatgactatcgtgatggggaaactggctggaaatagtaatcacacctctctgtttttagttagagtctaatgaaactctcatctagttctgtgatgtgtttacctcttttttcaggcctcaggaactcttctatttccttccctaataccccacacccaacctgtcgtaatttctggagaactccaggtttgtgtgtgcaggatgttggcacaaaaatacctgtgttttcattctccccctctctccctcctgtgtcttgcgctttatgttttcttccgtttgataattagttggttaaaagctgagggaaccggaaggaaagtgctaggtgttttttaggaactagggtggcggggggacgaacttctcttcctcacatgaggttactgtttctttcctctgtggggcattggatcctcccacagttgccctggtgatgacttagggcttcccatctgtgtacatcccactttgaatcttgatcgtgacaagaaataccttaggccttcagtcaattccgaagctccttcagttgtttttataatgggcgttttcacatgcacatatgtgtatgcatgtatacgcccatacagacatgcacacacagactcctactccattagctaacataccctccctctccacaacccctgtcacatacctttcaggaggtgacagttgtcttagttgtcatctacccagacaaacgtcctgggcccgtcctccctcctgatactgtagcctcttggtacccagggtgagttggtggagaacagagagatgagaagcagagggcttggggaaagcctgttcctctctgactcagccctttttggcattattgcaagagcttgactcctggttgccttttcccagccagttttcagttggggtgaaggtttctgcaagtgtgaggtccagatgctgctgctcatgttgggctttccttttgggaactatttctctttatttatagtgtcgggcttccggggaaagcaatcattggtgtgtatgtgtatgtgcatgcacacacgtgcatatacacatttgtgtatgtggaaatgtgctgggcaagtcaaaactatagaagagttgcctcctgtctctcgaatcttccagagatatcacttaattgttaacagcttttgtgttaatccccttcagcccctagctcttttattctaccacggctggagagttgatacctgcagtcagcctgccagtgactcttagtgtctgtttctgacttatttttcctgtctctgtcttccaacccccaataatatttccaccggggatgcatcatttttactcccaatattctgtagagagggagtcaggatgctgtcttcccacgaatagtactcagtaacaaaccaattgcattttagttgggcagtgctcccacccaccctccagatcccttccagctaaaacccttcccccttccctccatgtgtttctcagtttcccgtttcgtttgttggactgttccactgcccctcctcctcaccctatcacccatggatcgtaatgtaaaattcttttaccatgtcaagaaattattaaaaatacaggtactttgacctctttct

SEQ ID NO: 94343 - DNA, 795 bp, Artificial Sequence
  derived and/or modified sequence
atggaccagctggagaagagaagcagagccagcggcagcagcgccggcagcatgaagcacaagagactgagcagacacagcaccgccagccacagcagcagccacaccagcggcatcgaggccgacaccaagcccagagacaccggccccgaggacagctacagcagcagcgccatccacagaaagctgaagacctgcagcagcatgaccagccacggcagcagccacaccagcggcgtggagagcggcggcaaggacagactggaggaggacctgcaggacgacgagatcgagatgctggtggacgaccccagagacctggagcagatgaacgaggagagcctggaggtgagccccgacatgtgcatctacatcaccgaggacatgctgatgagcagaaagctgaacggccacagcggcctgatcgtgaaggagatcggcagcagcaccagcagcagcagcgagaccgtggtgaagctgagaggccagagcaccgacagcctgccccagaccatctgcagaaagcccaagaccagcaccgacagacacagcctgagcctggacgacatcagactgtaccagaaggacttcctgagaatcgccggcctgtgccaggacaccgcccagagctacaccttcggctgcggccacgagctggacgaggagggcctgtactgcaacagctgcctggcccagcagtgcatcaacatccaggacgccttccccgtgaagagaaccagcaagtacttcagcctggacctgacccacgacgaggtgcccgagttcgtggtgtag

SEQ ID NO: 94344 - DNA, 795 bp, Artificial Sequence
  derived and/or modified sequence
atggatcagcttgagaaacgctctagagcctccggcagctcggcaggatccatgaaacacaaaagactctctagacactccacagcgtctcattcctcttcccacaccagtggaattgaagctgacaccaagccacgtgatacaggacctgaggactcctactccagtagcgctatccatcgtaagttgaaaacatgcagttccatgacctcacatggtagtagtcacaccagtggtgtcgagtccggcggcaaagacaggctcgaagaagatctgcaagacgacgaaattgaaatgctggttgatgatccacgcgatcttgagcagatgaacgaggagagtcttgaagtgtcccctgacatgtgtatctacatcactgaagacatgctcatgtcccgtaagctgaacggccattcaggccttatcgtgaaggagatagggtccagtacaagttcttcttccgagaccgttgttaaattaagaggccaatcaactgactcccttccacaaacgatttgtcggaagcccaaaacttctacagacaggcacagtctctccctggacgacattcgcctctatcaaaaggacttccttaggattgctggactctgtcaggacacagcccaaagctatacatttgggtgcggccacgaactggacgaagaaggtttgtattgcaactcatgcttggcccaacagtgcatcaatattcaggatgcttttccagtcaagcggaccagcaaatacttctctctcgacttgactcacgacgaagtccccgagttcgtggtgtag

SEQ ID NO: 94345 - DNA, 795 bp, Artificial Sequence
  derived and/or modified sequence
atggaccagctggagaagaggagccgggccagcggcagcagcgctggctccatgaagcacaagaggctgagccgccacagcacagccagccacagcagcagccacaccagcggcattgaagctgacaccaagccccgggacaccggcccagaagattcctacagcagcagcgccatccacaggaagctgaagacctgcagctccatgaccagccacggcagcagccacaccagcggcgtggagagcggcggcaaggaccggctggaggaggacctgcaggatgatgaaattgagatgctggtggatgacccccgggacctggagcagatgaatgaggagagcctggaggtgtccccagacatgtgcatctacatcacagaggacatgctgatgagcaggaagctgaatggccacagcggcctcatcgtgaaggagatcggcagcagcaccagcagcagcagcgagaccgtggtgaagctgcggggccagagcacagacagcctgccccagaccatctgcaggaagcccaagaccagcacagacagacacagcctgagcctggatgacatccggctgtaccagaaggacttcctgagaattgctggcctgtgccaggacacagcccagagctacaccttcggctgcggccacgagctggatgaggagggcctgtactgcaacagctgcctggcccagcagtgcatcaacatccaggatgccttccctgtgaagaggaccagcaagtacttcagcctggacctgacccatgatgaggtgcctgagtttgtggtgtag

SEQ ID NO: 94346 - DNA, 795 bp, Artificial Sequence
  derived and/or modified sequence
atggaccagctggagaagcggagccgggccagcggcagcagcgccggcagcatgaagcacaaaaggctttccaggcatagtaccgctagtcactcctcttcgcatacctcgggaattgaggctgatactaagcctagagacaccggacctgaggattcatatagctcatctgccatccatcgcaagttaaaaacttgttcatctatgactagccacggctcatcccatacctctggagtggagtccggcggcaaagatcgcttggaggaagacttgcaggatgatgaaatcgaaatgcttgtggacgacccccgagatctggaacaaatgaatgaagagagtctggaggtcagccccgatatgtgcatttatatcaccgaggatatgctgatgtctaggaaattgaatggccacagtggcttaatcgtaaaagaaatcggtagctctacttccagcagcagcgaaaccgtggttaaattaaggggacagtctacagacagcctcccccagacaatttgccggaaaccaaaaacctcaacagacagacactctctgtcgctcgatgacattcgcctctatcagaaggactttctcaggatcgccggcctttgtcaggatactgctcaaagttatacattcggatgcggacatgaactcgatgaggagggtctgtactgtaatagctgcctggctcagcaatgcatcaacatccaggatgccttccctgtcaagcgaacctcaaaatacttctctcttgatttaacccatgatgaggtgccagaatttgtcgtttag

SEQ ID NO: 94347 - DNA, 795 bp, Artificial Sequence
  derived and/or modified sequence
atggaccaattggaaaagcgttcgagagccagtggctctagcgcgggatcgatgaagcacaagagactgtcccggcactcaactgcatctcactctagtagccacacttctgggatcgaagccgacactaagcctagagacacgggacccgaagacagttattcgtcctccgccattcaccggaagcttaagacatgcagctctatgacgtcccatggatcatcccacacaagtggcgtggagtccggcggaaaggatcggttagaagaagatttacaggatgatgagattgaaatgctggttgacgacccacgtgacttggagcaaatgaacgaggaatccctggaagtctcccccgatatgtgtatctatatcacagaggacatgttgatgtccaggaagctgaacgggcacagcggactgatcgtcaaagagataggtagtagcacctcttcgtcttcagagaccgtggtgaagctcagagggcaatccaccgattccttgccgcagactatctgcagaaaaccaaagaccagtactgaccggcattccttatcactagacgacattagactctatcagaaggatttcctgcgcatcgcgggactttgtcaggatacagcacagtcctacacattcggctgcggtcacgaactggacgaagaaggtctgtattgcaactcctgcttggcacagcaatgcataaacattcaggatgccttcccagtgaaacgaacctctaagtatttctctttggatcttacacacgatgaagtccctgagtttgttgtgtag

SEQ ID NO: 94348 - DNA, 795 bp, Artificial Sequence
  derived and/or modified sequence
atgatcaccaccgccgtgaccctgttctgcagcatcctgatcgccggcatcagcctgatgtgcatgaaccagaccgcccaggccggcagctacgagggcttcgaccagagccagagccacaaggtggtggagcccggcaacaccgccttcgaggagagccccgcccccgtgaacgagcccgagctgttcaccagcagcatccccgagaccagctgctgcagctgcagcatgggcaacggcgagctgcactgccccagcatcgagcccatcgccaacaccagcaccagcgagcccgtgatccccagcttcgagaagaacaaccactgcgtgagcagatgcaacagccagagctgcatcctggcccaggaggaggagcagtacctgcagagcggcgaccagcagctgaccagacacgtgctgctgtgcctgctgctgatcatcggcctgttcgccaacctgagcagctgcctgtggtggctgttcaaccaggagcccggcagactgtacgtggagctgcagttcttctgcgccgtgttcaacttcggccagggcttcatcagcttcggcatcttcggcctggacaagcacctgatcatcctgcccttcaagagaagactggagttcctgtggaacaacaaggacaccgccgagaacagagacagccccgtgagcgaggagatcaagatgacctgccagcagttcatccactaccacagagacctgtgcatcagaaacatcgtgaaggagagaagatgcggcgccaagaccagcgccggcaccttctgcggctgctag

SEQ ID NO: 94349 - DNA, 6050 bp, Artificial Sequence
  derived and/or modified sequence
ctttatcggaacgtgcctaagctgctgcagctggcacccggttgcgctcggcgaagagggctgggggcgggagatgacggtggtcttctccctgcttggcaccctgcgagcaccagctcccttctcctcgccactccaaggttgcagacgaagcagagatctggttggagttggagggtgagagaaaatgaattctaatttacctgcagagaacttaaccattgcagtcaatatgaccaagactttgcctacagcagtaacgcatggatttaattccactaatgacccaccttcaatgtcaattacaaggctttttccagccttactggaatgctttggcattgtcctttgtggctacatagcaggaagggccaatgtcataacatcaacccaggccaaaggactaggaaattttgtctccagatttgcacttccagctttattattcaaaaacatggttgtacttaatttttccaatgtggactggtccttcctatatagtatcttaattgccaaagcttctgtatttttcattgtatgtgtattaaccttattggttgccagtcctgatagtcgatttagcaaagctggactattccctatttttgctacacaaagtaatgactttgcattgggataccctatagttgaagctttatatcaaactacatacccagaatatctccagtacatttatttggtggcaccaatatctcttatgatgttaaaccctatagggtttattttctgtgaaatccaaaagtggaaagacactcaaaatgcttctcaaaataaaataaaaattgtgggactcggactcctgcgtgtattacagaacccaatagtatttatggtcttcattggcatcgccttcaattttattcttgatcgaaaggtacctgtatatgtcgaaaattttcttgatggacttggaaattctttttctggatcagccctattttatcttggtctcacgatggtgggaaaaataaagagactgaagaagtcggcatttgtagtactaattcttctcatcacagctaaacttctggtgctgccacttctgtgcagagaaatggtggaactcttggacaagggcgacagtgtggtgaaccatacaagtttatcaaattatgcatttctgtatggtgtatttcctgtagcaccaggagtggctatctttgcaacacaattcaacatggaagtagaaattataacctcagggatggtgataagcacatttgtgtctgctcccatcatgtacgtttctgcctggttactgacctttcccactatggaccctaagccattggcatatgccatccagaatgttagttttgatataagtattgtcagcctgatctccttgtctattgtctgtgctggaatgatgatatggaattttgttaaagaaaaaaattttgttggacaaattttggtgtttgttctattgtacagctccctctatagcacctacctgtggacaggccttctagcaatttctttgtttcttttgaaaaagcgagagagggtacaaattcctgttggaataatcataatatctggctggggaattcctgctctccttgttggtgttcttttgataactggaaaacacaatggagatagcattgactcagccttcttttatggaaaagaacagatgatcaccacagcagtcaccctgttctgcagcatcctgatagctggcatatccctcatgtgcatgaaccagactgcccaagcaggaagctatgaaggtttcgatcagtctcagagccacaaagtggtggagcctggaaatactgcttttgaggagagtccagcaccagtaaatgaaccagaactttttacaagctctattccagaaacaagttgctgctcctgctccatgggaaatggtgaattacactgcccatcaatagagccaatagcaaacacaagcaccagtgagcctgtgattccttcgtttgagaaaaacaatcattgtgtgagtcgctgtaactcccagagctgcatattagcccaggaagaagaacagtatctacagagtggagaccagcaactgacccgacatgtgttgctgtgtttacttctcatcattggcctgttcgctaatctttccagttgtttatggtggctattcaaccaagagcctggaagactttatgttgagttacagtttttctgtgccgtgtttaactttggtcagggatttatttcctttggaatctttggattagataaacatttaatcatcctgcctttcaaaagaagacttgaattcctatggaacaataaagacacagcagaaaacagggattctcctgtttcagaggaaataaaaatgacctgtcaacaatttatccattatcaccgtgacctctgtatccgaaacattgtcaaagaaagaaggtgtggtgcaaagacttctgctggaactttctgtggctgtgacctggtgagctggctaattgaagtcggccttgcctccgaccgtggtgaagctgtgatatacggagacaggctggtacaagggggagtcatccaacatattaccaacgagtatgaattccgggatgagtacttgttttacagatttcttcaaaagagtcctgaacagagtcctcctgctattaatgcaaacactctccaacaggaaagatataaagaaattgagcattcatccccaccctcacattcccctaagacctaaattatgcaggggagaaccctacatggaatcatattctagccgcgtattcattagtttttagctgggtgaccttgggcaagttaacagaggcaacctctctgagcctcagttgtctcttctgtaaaatgtgaaaagatgtgctcccaccacatgcgcagggtctgtgattttacatgtatgtaaaacacataggaagctgacttaggaaaaagagaaaaccaaattaaagttctgataatgaatataatatagtcatcctttagtatccaaggggattggttccaggactcctgaagatcccaaaatctgaggatactcaagtcccttatataaaatggtgtaggccgggcatggtggctcacgcctgtaatcccagtactttgggaggccgagtcaggtggatcacctgaggtcaggagttcaagaccagcctggccaacatggcgaaaccccgtctctactataaaatacaaaaaattagttgggtgtggtggcgggtgcctgtaatcccagctactcaggaggctgaggcaggagaatcgcttgaatctgggaggcagaggttgctgtgagccgagatcgtgccactgcactccagcctgagcaacagagcaagactctatctcaaaaataaaataaaataaaataaaataattaataaaatggtgtagtatttgcatataacctatgcacattctcccatatagtttaatcatctttagatacttataatgcctaatacaatgtaaatgctatgtaaatagttgttgttatactgtattgtttagggaataacaataagaaaaacagtctgtacatgttcactacagatgcaaccattgttaagcctgactacatctttttatctgcggttgattgaatctatggatgtggaacctgtgcatatggagggtcaactgtactataaataatacgaatatgccaacattatataatcattgctttctgcaactgtttactataatttcaaaattaatatcctattaactgttcctataaattatcaaatttggcaagtgtattactagcaggagatggaccttaaattatgacaactttatattttttgatagcatctcttgaaaaagaattttaatgattctaataagaggttctttttcttttttccatttccttgacaaatagtactcatttaaaaactagagggctaggcttagtggctcacgcctgtaatctcagcactttgggaggctgaggcgggcagatcgcttgaggtcaggagttcaagaccagcccgggcaacgtggtgaaacccggtctgtactaaaaaaaaaaaaaaagaaaaagaaaaagaaaaaagaatacccaggtgtggtagtgcatgcctgtagtcccagctactttggagactgaggtgggagtaccccttgagcctgggaggcgcaggttgcagtgaaccaagatcacatcactgcacttcaacctgggtgacagagcaagaccctgtctcaaaaacaaaaaacaagcaaaaaaaacctagaggcactatttttttttaaagtttgtcttttcttttctacccaaattactaatctatgccattaaggaaaggaataagaacctccatatgtattattatctccacagtcctgcagaagtacaatctgatctttaactttcatgctacaaataataatttgagtagattaatttgaattttatcaacaaaattattgccatatgatgtatcatttctgtgtttgaacaaagcatcgtaatgcaggataacttctactttattccctgtagttaaaaaaaaaaaaactatatagttcaagccaatatttaaaaattctaaacctaggctgggcatggtgactcatacctgtaatcccagcactttgggaggccgaggcaggtgaattgcttcagcccaggagttcgagaccagcctggccaatgtggtgaaaccccatctctactaaaaaaaaaaaaaaaaaaaaaaattagccaggtgtggtggtgtgcacctgtaatcccagctacccaggaggctgaggcaggaaaattgcttgaaaccaggaggcagaggttgcagtgagctgagatcgtgccactgcactccagcctgagtgtcagagtgagactctgtctcagaaaaaaaaaaaaaaattctaaagattacatttagaatttagtctttttaaagtgtccatgtataaaaatatataatttttaaaattactaaatgttgccttttctcttagtctaatattttagctactaaaacaaaatataaactggatagcttataaacaacataaacttatttctcacagttttggaggctgtgaagtccaagattaaggcactaacagatctagtgtctggtaaggcaaatttctggctcatagatggtaccttcttgctgtgtccccacatggtagatgggaagaactggtctcattggccccttataaggacattaattccactcaataggctccaccctcatgatctaataacctctcaaaggccctacctcctaatactaacacattgaggatgtgacttcaactttacatttctacaggcagagaagtggggctgtgtaaattcttcccatcagtacttgaatgttcatttaacaaataacttatcgagcatctagcatgttccagacacaatctgaacactgagcacacaacagttggaacaaatatgattcctatcctcatggagcttctattctcctgtgaaaaacagatgttaaacatgattgaggattaggtttcaacataagaattctaggaggacacagacatttagaccatagcatcttcaggtaaactttatcttcagtaaattaaagagatctatttagatgacctttgagcatcttaattattagatgtcagtgctagtttaacttattttaaacgtttcagatatttatttaattatactttaagtgtctcatgtaaaaaagttatttataaaataatttatagggttagagtcattgcccttttaatgcaacaaataaacagttttttaaaaacctgcatgggggccaggcgcggtggttcatacctgcaatcccagcactttgggaggtcgaggctggcggatcacgaggtcaggagatcgagaccaccctgattaatgcggtgaaatcccgtctctactaaaaatacaaaaaattagccagacgtggtggtgggcacctatagtcccagctactcgggaggctgaggcaggagaatggcatgaacccggaaggcggagcttgcagtgaaccaagatcgcgccactgcactccagcctgggcgacagagtgagactccatcgc

SEQ ID NO: 94350 - DNA, 795 bp, Artificial Sequence
  derived and/or modified sequence
atgatcaccactgcagtgacacttttctgttccatacttatcgccggaataagcctgatgtgcatgaaccaaactgcgcaggccgggtcttatgaagggttcgaccaatctcagtcccataaggtcgtggaacccggcaatactgccttcgaggagtctcctgccccagtgaacgaacctgagctctttacttcctccatcccagaaactagttgttgtagttgctctatgggcaacggtgagttgcattgcccaagtatcgagccaattgcaaacacatccacttcagagccagtgattcctagtttcgagaagaataaccactgcgtgtcccgctgcaactcgcaaagttgtatacttgcccaggaggaagagcagtacctgcagtcaggggatcagcagttaacgaggcacgtcctgctctgcctgttattgattatcggcttgtttgcaaacctttcatcctgcctttggtggctattcaaccaggagcccggacgtttatacgtggaactgcagtttttttgcgctgtgtttaactttggacagggcttcatcagtttcggcatcttcggattggataaacatctcattatactgccgtttaagaggcgcctcgagtttctttggaacaataaggacaccgcagaaaacagggacagccccgttagtgaggaaatcaagatgacttgtcagcagttcatccattatcatcgggatctgtgtatcaggaacatagtcaaagaacgccgttgcggggctaaaactagcgccggcacattctgcgggtgctag

SEQ ID NO: 94351 - DNA, 795 bp, Artificial Sequence
  derived and/or modified sequence
atgatcaccacagctgtgaccctcttctgcagcatcctgattgctggcatcagcctgatgtgcatgaaccagacagcccaggccggcagctatgagggctttgaccagagccagagccacaaggtggtggagcccggcaacacagcctttgaggagagccctgcccctgtgaatgaacctgagctgttcaccagcagcatccctgagaccagctgctgcagctgcagcatgggaaatggagagctgcactgccccagcattgagcccatcgccaacaccagcaccagcgagcccgtcatccccagctttgagaagaacaaccactgtgtgagccgctgcaacagccagagctgcatcctggcccaggaggaggagcagtacctgcagagcggggaccagcagctgaccaggcatgtgctgctgtgcctgctgctgatcatcggcctgtttgccaacctgagcagctgcctgtggtggctgttcaaccaggagcccggccgcctgtatgtggagctgcagttcttctgtgctgtgttcaactttggccagggcttcatcagctttggcatcttcggcctggacaagcacctgatcatcctgcccttcaagaggcggctggagttcctgtggaacaacaaggacacagcagaaaatagagacagccctgtgtctgaggagatcaagatgacctgccagcagttcatccactaccaccgggacctgtgcatccggaacatcgtgaaggagcggcgctgtggggccaagaccagcgctggcaccttctgtggctgctag

SEQ ID NO: 94352 - DNA, 795 bp, Artificial Sequence
  derived and/or modified sequence
atgatcaccaccgccgtgaccctgttctgcagcatcctgatcgccggcatatcactcatgtgcatgaatcagactgctcaggccggttcgtatgagggctttgatcagtctcagtcccacaaggtggtcgaacccggcaatacggcctttgaagagtctccagcaccggtgaatgagcctgagctgttcacttcttcgattcccgagacatcatgttgtagttgctccatgggaaacggggagctgcattgtccctctatcgaacctattgcaaacactagtacctccgagccggtgatcccttctttcgaaaagaacaatcattgtgtctcaaggtgtaacagtcagtcctgtatattggcacaggaagaagaacagtatctacaaagcggcgaccaacagctgaccagacacgtactcctttgcctcctgcttatcattgggctttttgccaatttgagcagttgtctgtggtggctgttcaatcaggagcccggccggctttacgtcgaattgcagtttttctgtgcagtgttcaacttcggtcaggggtttatctcattcggcatctttgggctcgacaagcatcttatcatacttccgttcaagagaagactcgaattcctctggaacaacaaagatacggcagagaacagagatagcccagtgtccgaggagattaagatgacgtgccagcaattcatccactaccatagggacctctgcatcaggaacatcgttaaggaaaggcggtgcggagccaaaacaagtgctggaaccttttgcggatgttag

SEQ ID NO: 94353 - DNA, 795 bp, Artificial Sequence
  derived and/or modified sequence
atgataaccaccgcagtcacattgttttgctcaatccttatcgcgggaatttcattgatgtgtatgaaccaaactgcacaggccggttcctatgagggattcgatcagtcacagagccacaaggtagttgagcccggaaatacagcgtttgaggagagccccgctcctgtgaatgagcccgaactattcacttcaagtattccagagacttcatgctgtagttgcagcatgggcaatggggagctccactgcccctcaattgagcctattgcaaatacatccacctctgagcctgtcataccaagcttcgaaaaaaataaccactgcgtgtctaggtgcaactcccagagctgcatcctggcccaggaggaggagcagtatcttcagtcaggagaccaacagctgacacgccacgtattgttgtgccttctgcttattattggcctttttgctaatctcagttcgtgtctgtggtggttgttcaatcaggagccaggccgactgtacgtagagcttcaatttttctgcgcagtcttcaatttcggccagggatttatcagtttcggcatcttcggattggacaaacatctaatcatcctgccgttcaagaggcggctggaatttctgtggaataacaaagacacagccgaaaatcgggacagccctgtcagcgaagaaataaagatgacgtgccaacaattcatccattatcacagagacctgtgtataaggaacattgtgaaggagagacggtgcggcgcaaaaacatctgccggtactttctgtgggtgttag

SEQ ID NO: 94354 - protein, 929 aa, Artificial Sequence
  derived and/or modified sequence
MAEVEAVQLKEEGNRHFQLQDYKAATNSYSQALKLTKDKALLATLYRNRAACGLKTESYVQAASDASRAIDINSSDIKALYRRCQALEHLGKLDQAFKDVQRCATLEPRNQNFQEMLRRLNTSIQEKLRVQFSTDSRVQKMFEILLDENSEADKREKAANNLIVLGREEAGAEKIFQNNGVALLLQLLDTKKPELVLAAVRTLSGMCSGHQARATVILHAVRIDRICSLMAVENEEMSLAVCNLLQAIIDSLSGEDKREHRGKEEALVLDTKKDLKQITSHLLDMLVSKKVSGQGRDQALNLLNKNVPRKDLAIHDNSRTIYVVDNGLRKILKVVGQVPDLPSCLPLTDNTRMLASILINKLYDDLRCDPERDHFRKICEEYITGKFDPQDMDKNLNAIQTVSGILQGPFDLGNQLLGLKGVMEMMVALCGSERETDQLVAVEALIHASTKLSRATFIITNGVSLLKQIYKTTKNEKIKIRTLVGLCKLGSAGGTDYGLRQFAEGSTEKLAKQCRKWLCNMSIDTRTRRWAVEGLAYLTLDADVKDDFVQDVPALQAMFELAKTSDKTILYSVATTLVNCTNSYDVKEVIPELVQLAKFSKQHVPEEHPKDKKDFIDMRVKRLLKAGVISALACMVKADSAILTDQTKELLARVFLALCDNPKDRGTIVAQGGGKALIPLALEGTDVGKVKAAHALAKIAAVSNPDIAFPGERVYEVVRPLVRLLDTQRDGLQNYEALLGLTNLSGRSDKLRQKIFKERALPDIENYMFENHDQLRQAATECMCNMVLHKEVQERFLADGNDRLKLVVLLCGEDDDKVQNAAAGALAMLTAAHKKLCLKMTQVTTQWLEILQRLCLHDQLSVQHRGLVIAYNLLAADAELAKKLVESELLEILTVVGKQEPDEKKAEVVQTARECLIKCMDYGFIKPVS

SEQ ID NO: 94355 - DNA, 2790 bp, Artificial Sequence
  derived and/or modified sequence
atggccgaggtggaggccgtgcagctgaaggaggagggcaacagacacttccagctgcaggactacaaggccgccaccaacagctacagccaggccctgaagctgaccaaggacaaggccctgctggccaccctgtacagaaacagagccgcctgcggcctgaagaccgagagctacgtgcaggccgccagcgacgccagcagagccatcgacatcaacagcagcgacatcaaggccctgtacagaagatgccaggccctggagcacctgggcaagctggaccaggccttcaaggacgtgcagagatgcgccaccctggagcccagaaaccagaacttccaggagatgctgagaagactgaacaccagcatccaggagaagctgagagtgcagttcagcaccgacagcagagtgcagaagatgttcgagatcctgctggacgagaacagcgaggccgacaagagagagaaggccgccaacaacctgatcgtgctgggcagagaggaggccggcgccgagaagatcttccagaacaacggcgtggccctgctgctgcagctgctggacaccaagaagcccgagctggtgctggccgccgtgagaaccctgagcggcatgtgcagcggccaccaggccagagccaccgtgatcctgcacgccgtgagaatcgacagaatctgcagcctgatggccgtggagaacgaggagatgagcctggccgtgtgcaacctgctgcaggccatcatcgacagcctgagcggcgaggacaagagagagcacagaggcaaggaggaggccctggtgctggacaccaagaaggacctgaagcagatcaccagccacctgctggacatgctggtgagcaagaaggtgagcggccagggcagagaccaggccctgaacctgctgaacaagaacgtgcccagaaaggacctggccatccacgacaacagcagaaccatctacgtggtggacaacggcctgagaaagatcctgaaggtggtgggccaggtgcccgacctgcccagctgcctgcccctgaccgacaacaccagaatgctggccagcatcctgatcaacaagctgtacgacgacctgagatgcgaccccgagagagaccacttcagaaagatctgcgaggagtacatcaccggcaagttcgacccccaggacatggacaagaacctgaacgccatccagaccgtgagcggcatcctgcagggccccttcgacctgggcaaccagctgctgggcctgaagggcgtgatggagatgatggtggccctgtgcggcagcgagagagagaccgaccagctggtggccgtggaggccctgatccacgccagcaccaagctgagcagagccaccttcatcatcaccaacggcgtgagcctgctgaagcagatctacaagaccaccaagaacgagaagatcaagatcagaaccctggtgggcctgtgcaagctgggcagcgccggcggcaccgactacggcctgagacagttcgccgagggcagcaccgagaagctggccaagcagtgcagaaagtggctgtgcaacatgagcatcgacaccagaaccagaagatgggccgtggagggcctggcctacctgaccctggacgccgacgtgaaggacgacttcgtgcaggacgtgcccgccctgcaggccatgttcgagctggccaagaccagcgacaagaccatcctgtacagcgtggccaccaccctggtgaactgcaccaacagctacgacgtgaaggaggtgatccccgagctggtgcagctggccaagttcagcaagcagcacgtgcccgaggagcaccccaaggacaagaaggacttcatcgacatgagagtgaagagactgctgaaggccggcgtgatcagcgccctggcctgcatggtgaaggccgacagcgccatcctgaccgaccagaccaaggagctgctggccagagtgttcctggccctgtgcgacaaccccaaggacagaggcaccatcgtggcccagggcggcggcaaggccctgatccccctggccctggagggcaccgacgtgggcaaggtgaaggccgcccacgccctggccaagatcgccgccgtgagcaaccccgacatcgccttccccggcgagagagtgtacgaggtggtgagacccctggtgagactgctggacacccagagagacggcctgcagaactacgaggccctgctgggcctgaccaacctgagcggcagaagcgacaagctgagacagaagatcttcaaggagagagccctgcccgacatcgagaactacatgttcgagaaccacgaccagctgagacaggccgccaccgagtgcatgtgcaacatggtgctgcacaaggaggtgcaggagagattcctggccgacggcaacgacagactgaagctggtggtgctgctgtgcggcgaggacgacgacaaggtgcagaacgccgccgccggcgccctggccatgctgaccgccgcccacaagaagctgtgcctgaagatgacccaggtgaccacccagtggctggagatcctgcagagactgtgcctgcacgaccagctgagcgtgcagcacagaggcctggtgatcgcctacaacctgctggccgccgacgccgagctggccaagaagctggtggagagcgagctgctggagatcctgaccgtggtgggcaagcaggagcccgacgagaagaaggccgaggtggtgcagaccgccagagagtgcctgatcaagtgcatggactacggcttcatcaagcccgtgagctag

SEQ ID NO: 94356 - DNA, 2790 bp, Artificial Sequence
  derived and/or modified sequence
atggccgaagtggaggccgttcaactgaaagaggaaggaaatcgccatttccagctgcaggactataaggctgctaccaatagctattcgcaagcactcaaactgacgaaagacaaggcgttgctggcaactctttacaggaatcgtgccgcctgcgggcttaaaaccgaaagctacgtccaggccgccagcgacgcctcgagagctatagatatcaacagtagcgatatcaaggcactataccgaagatgccaggcactcgaacacttaggcaagcttgaccaagctttcaaggacgttcaaagatgcgcaaccctggagcctcgaaaccagaacttccaggaaatgctccgtaggctgaacacaagcattcaggagaaacttagagttcagttttctactgacagtcgagtgcagaagatgtttgaaatactgctggatgagaatagcgaagccgataagcgagagaaggccgcaaataacctcatcgtactggggcgggaggaggcaggggccgagaagatcttccagaataacggagtggccctgcttctacaactgttggacaccaagaaacccgaattggttctcgctgccgtaagaacccttagcggcatgtgctccggccatcaggctagagctaccgtcattttacatgccgtcaggatcgacaggatctgcagcttgatggccgtggaaaacgaagagatgagccttgccgtatgtaacctgttgcaggcaatcatcgattcactgagcggcgaagacaaacgggagcatagggggaaggaggaggctctggtccttgatacaaaaaaggatttgaagcagataaccagccacttgttggatatgttggtatccaagaaggtgtctggacaaggcagagaccaggcactcaatctacttaataaaaatgtcccgaggaaagatctagctatccatgataattctcgcacaatctatgtggttgacaacggcttgagaaagatcctgaaagtggtgggtcaggttccagatctgccgtcttgtttgccgctcacagacaatacaaggatgctcgcttccattctcattaacaagttatacgatgatctaaggtgcgatcctgagagggaccattttcggaagatctgcgaggaatacatcacaggcaaattcgaccctcaagatatggataagaacctgaatgctattcagacagtttccggcatccttcagggaccctttgacctggggaaccagttactgggcttgaaaggagtaatggagatgatggtggccctgtgcgggagcgagagggaaaccgaccagctcgtcgctgtggaagcgcttatccacgctagcaccaaactttctagggctaccttcatcattacaaacggagtcagcctgctgaaacagatctacaaaacaacaaaaaacgagaaaatcaaaatcagaactctggtaggcctctgtaaactgggctcggcagggggaactgactacggcttaaggcagtttgcagagggatcaaccgagaaacttgctaagcagtgtaggaagtggctgtgcaacatgagcatcgatacacgcacccgcagatgggcggtggaaggcctggcctacctcacattagacgccgacgtcaaagacgattttgtgcaggatgtcccagcactgcaggccatgtttgagttggcgaaaacctccgacaagacaatcttatattccgtcgcaacaacactggtcaactgtactaattcatacgatgtgaaagaagtaattcccgagctcgttcaactggccaagttctctaaacagcatgtccctgaggagcaccctaaagataagaaagactttatcgatatgagggtaaaacgcctactgaaagcgggagtgatttccgctctggcttgtatggtgaaggcagatagtgctatactcactgatcagacgaaggagctgctggccagggttttcttagcgttgtgcgataatccaaaggacagaggaaccatcgtcgcacaaggtggtgggaaggcgctgattcctttggcattggaaggaaccgacgtcggtaaagtaaaagcagctcacgcactggccaagatagccgctgtgtctaatcccgatattgccttccctggggagcgggtatacgaggtcgtgaggcctctggtgcggctcctggatacacagcgggatggattgcagaactacgaagctttgctgggactgaccaacctcagcggtagatctgataaactcagacagaaaattttcaaggagcgagctcttcctgatatcgagaattatatgttcgagaaccatgatcagctgcggcaagcagccactgagtgcatgtgtaacatggttctccataaggaagtccaggaaaggttcctcgctgatggaaacgaccgccttaagctcgtggtccttctatgtggggaggatgatgataaggtgcagaacgcagcggccggagccctcgccatgctgaccgccgctcacaagaagctgtgcctgaaaatgacccaggtgaccacacagtggctggagattttgcagcgcctgtgcctgcacgatcagttgtcagtgcagcatcggggactggtaatcgcctataatctgttggcagccgacgcagaattggccaaaaaacttgtagagagcgagctgctggaaatccttacggtggtgggaaagcaggagcctgatgaaaagaaggccgaggtagttcagacagcaagggagtgtcttatcaaatgtatggattatgggtttattaaacctgtgtcgtag

SEQ ID NO: 94357 - DNA, 2790 bp, Artificial Sequence
  derived and/or modified sequence
atggccgaggtggaggccgtgcagctgaaggaggagggcaacagacacttccagctgcaggactacaaggccgccaccaacagctacagccaggccctgaagctgaccaaggacaaggccctgctggccaccctgtacagaaacagagctgcctgtggcctgaagacagagagctatgtgcaggccgccagtgatgccagccgggccatcgacatcaacagcagtgacatcaaggccctgtaccgccgctgccaggccctggagcacctgggcaagctggaccaggccttcaaggatgtgcagagatgtgccaccctggagcccaggaaccagaacttccaggagatgctgcggcggctgaacaccagcatccaggagaagctgcgggtgcagttcagcacagacagccgggtgcagaagatgtttgagatcctgctggatgagaacagcgaggccgacaagcgggagaaggccgccaacaacctgattgtgctgggccgggaggaggccggggctgagaagatcttccagaacaatggagtggccctgctgctgcagctgctggacaccaagaagccagagctggtgctggccgctgtgaggaccctgagcggcatgtgcagcggccaccaggcccgggccaccgtcatcctgcatgctgtgagaattgaccgcatctgcagcctgatggctgtggagaatgaggagatgagcctggccgtgtgcaacctgctgcaggccatcatcgacagcctgtctggagaggacaagcgggagcaccggggcaaggaggaggccctggtgctggacaccaagaaggacctgaagcagatcaccagccacctgctggacatgctggtgtccaagaaggtgtctggccagggccgggaccaggccctgaacctgctgaacaagaatgtgcccaggaaggacctggccatccatgacaacagcaggaccatctacgtggtggacaatggcctgaggaagatcctgaaggtggtgggccaggtgcctgacctgcccagctgcctgcccctgacagacaacaccaggatgctggccagcatcctgatcaacaagctgtatgatgacctgcgctgtgaccctgagcgggaccacttcaggaagatctgtgaggagtacatcaccgggaagtttgacccccaggacatggacaagaacctgaatgccatccagacagtgtctggcatcctgcagggcccctttgacctgggcaaccagctgctgggcctgaagggcgtgatggagatgatggtggccctgtgtggcagcgagcgggagacagaccagctggtggccgtggaggccctgattcatgccagcaccaagctgagccgggccaccttcatcatcaccaatggagtgtccctgctgaagcagatctacaagaccaccaagaatgagaagatcaagatccgcaccctggtgggcctgtgcaagctgggcagcgctgggggcacagattatggcctgcggcagtttgctgagggcagcacagagaagctggccaagcagtgcaggaagtggctgtgcaacatgagcattgacaccaggacccggcgctgggccgtggagggcctggcctacctgaccctggatgctgatgtgaaggatgactttgtgcaggatgtgcctgccctgcaggccatgtttgagctggccaagaccagtgacaagaccatcctgtacagcgtggccaccaccctggtgaactgcaccaacagctatgatgtgaaggaggtgattcctgagctggtgcagctggccaagttcagcaagcagcacgtgcctgaggagcaccccaaggacaagaaggacttcatcgacatgagggtgaagaggctgctgaaggccggggtcatcagcgccctggcctgcatggtgaaggctgacagcgccatcctgacagaccagaccaaggagctgctggcccgggtcttcctggccctgtgtgacaaccccaaggaccggggcaccatcgtggcccagggcggcggcaaggccctgatccccctggccctggagggcacagatgtgggcaaggtgaaggccgcccacgccctggccaagattgctgctgtgagcaacccagacatcgccttccctggagagcgggtgtatgaggtggtgcggcccctggtgcggctgctggacacccagagagatggcctgcagaactatgaggccctgctgggcctgaccaacctgagcggccgcagtgacaagctgcggcagaagatcttcaaggagcgggccctgcctgacatcgagaactacatgtttgagaaccacgaccagctgcggcaggccgccacagagtgcatgtgcaacatggtgctgcacaaggaggtgcaggagcgcttcctggctgatggaaatgaccggctgaagctggtggtgctgctgtgtggagaagatgatgacaaggtgcagaatgctgctgctggggccctggccatgctgacagctgcccacaagaagctgtgcctgaagatgacccaggtgaccacccagtggctggagatcctgcagaggctgtgcctgcatgaccagctgtctgtgcagcaccggggcctggtgattgcctacaacctgctggccgcagatgctgagctggccaagaagctggtggagagcgagctgctggagatcctgactgtggtgggcaagcaggagccagatgagaagaaggccgaggtggtgcagacagcccgggagtgcctgatcaagtgcatggactatggcttcatcaagcctgtgtcctag

SEQ ID NO: 94358 - DNA, 2790 bp, Artificial Sequence
  derived and/or modified sequence
atggccgaggtggaggccgtgcagctgaaggaggagggcaaccggcattttcagttgcaggattataaggccgctactaactcatacagtcaggctttgaagttgaccaaagataaggctctgctcgcaacactctacaggaatcgtgccgcttgcggtctaaagacggagtcatatgttcaggctgcctccgatgccagtcgggccatcgatattaattcctccgatatcaaagccctgtacaggcgctgccaggctctggaacatctcggaaagcttgaccaagcgtttaaggacgtgcagagatgtgccacgctggagccaaggaaccagaactttcaggagatgctgcgccggcttaatacctcaatccaagagaaactccgtgtccaatttagtactgactccagagtgcagaagatgttcgagatacttctcgatgagaattccgaggcggataaacgcgaaaaggccgcaaacaacctgatcgtactggggcgcgaggaggcgggcgccgagaaaattttccaaaataatggcgtggctttgctcctccaactgttagacactaagaagcccgagttggtgttagccgctgtgcggaccttaagcggaatgtgtagtggtcaccaggcaagagccacagtgatattacacgctgtgaggatcgaccgcatttgctccctcatggctgtggaaaacgaagagatgtcacttgcggtgtgcaatctgctgcaggccatcattgattccctgagcggagaggataagcgggaacatcgaggaaaggaagaagccctggtcctggacaccaaaaaagatctgaaacaaataacctcccacctcctggatatgctggtctccaagaaggtcagtggccagggccgggatcaggctctcaatctcctgaataagaatgtgccgcgcaaggacctcgctattcatgacaattcaagaactatttatgtggtcgacaatggccttcgaaagattttaaaggtggtggggcaggtgcccgacctgccatcttgtttgcccctaaccgataacacgcggatgcttgctagcattctgattaacaaactttacgatgatttgaggtgtgacccagagcgggatcactttcgcaagatctgtgaagagtatattacgggaaagttcgatccacaggatatggataagaacctcaacgccattcagactgtgtccgggatcctgcagggcccctttgatctgggcaaccagctgctgggattaaagggggtcatggaaatgatggttgccctttgcggctcagaacgagagaccgaccaacttgtggccgtcgaggcactaatccacgcaagcacaaagctgtcgagagcgacgtttataattactaatggagtatccctgctgaagcagatctacaaaacaacaaaaaacgaaaaaatcaagatccggacactcgttgggctttgcaaactgggatccgccggggggaccgattacgggctccggcaattcgcagaggggtccactgagaagctggctaagcagtgcagaaaatggttatgcaacatgagcattgatacccgcactagacgctgggcggtcgagggacttgcatacctcacactggatgctgacgtgaaagacgactttgtgcaggacgtgcctgcgttacaagctatgttcgaactggccaagactagtgataagaccatactgtatagtgttgctacaaccctggtgaattgcacaaatagttacgatgtcaaagaggttatccccgagttagtgcagctggccaaatttagtaaacagcatgtgcccgaagagcatcccaaggataagaaggatttcattgatatgcgggttaagcggctgctgaaggctggggtgatctcagccttagcctgtatggtgaaagccgatagcgctattctgacggaccagacaaaagagttactggcccgggtgttccttgccctctgtgacaaccccaaggaccggggtacaatagtcgcccagggggggggcaaggccctgatccctcttgccctggaggggacagacgtaggaaaagtaaaagccgcacacgcactggccaagatcgctgccgtctcaaacccggacattgctttcccgggcgagcgagtttacgaagtcgttcgtccgctggtgaggcttctggacactcagagggacggtctccagaattatgaagccttgcttgggctcactaatctcagtgggcggagtgataagttacgccagaagatctttaaggaaagggcccttcccgatattgagaattacatgttcgagaatcatgaccaacttcgtcaggcagctaccgaatgtatgtgtaatatggtcctgcacaaggaagttcaggagagattccttgcagatggcaacgatcgtttgaagctggtggtgttattatgtggcgaggatgatgacaaggtgcagaatgccgccgccggggcactggccatgctaacagcagcccacaagaagctgtgtttgaaaatgacacaggtgacgacccagtggctggagatactacaaagactatgtctgcatgaccagctctcagtgcaacaccgggggctggttattgcctacaacctgctggccgccgatgctgagctcgcaaagaagctcgttgaaagcgagcttctggaaatactgacagtggtaggtaaacaagaaccagatgaaaagaaagcagaagtcgttcagacagccagggaatgccttataaagtgcatggactacggattcatcaagccggtaagttag

SEQ ID NO: 94359 - DNA, 2790 bp, Artificial Sequence
  derived and/or modified sequence
atggcggaagtcgaagcagtgcagcttaaggaggaggggaatcgtcacttccagctccaagattacaaggctgcgaccaatagttatagtcaagctttgaagctgactaaagacaaggccctccttgcaacgctgtatcgaaaccgcgctgcctgtggcctgaaaacggaaagttatgtgcaagctgcaagcgatgccagtagagcaatcgatatcaacagctccgatatcaaggccctgtataggaggtgccaagcccttgaacacctgggcaaactggaccaagctttcaaggacgtccagcggtgtgccaccctcgagccacgcaatcagaattttcaagaaatgcttagaaggctcaataccagtatccaggaaaagctaagggtgcagttttcaacagacagccgagtgcagaagatgtttgaaatactattggatgagaactcagaagcggacaagcgcgaaaaggcggctaacaacctcatcgtgttgggcagagaggaagccggagcagagaaaatttttcagaacaatggcgtggcgctcttactgcaacttctggacacaaaaaagcccgaacttgtcttagcggctgtgcggaccctgtctggcatgtgttcaggacatcaggcacgggcaaccgtgatcctgcacgctgtcagaattgaccggatctgttctcttatggcagtggagaacgaggagatgtcattggccgtttgcaacttactccaagccattatagacagcctatctggggaagataaacgcgagcacaggggcaaggaagaagccctcgttcttgacacaaaaaaagatctcaaacagattacatctcatttgctcgacatgctggtaagcaagaaggtgtcgggacagggtcgcgatcaggccttaaatttactgaacaagaatgtacccagaaaggatctggcgattcatgataattctcgtaccatctacgtcgttgataatggcctgcggaagatacttaaagtggttggacaagtccctgatctgccctcctgccttcctctgactgacaacacgaggatgctggccagcattttaatcaataagttgtacgacgacctgaggtgcgatccggaacgggatcacttcagaaagatatgtgaagagtacatcaccggaaagttcgatccacaggacatggacaaaaacctcaacgctattcagacagtgagtggcatccttcaaggcccatttgacctgggcaaccagttactgggactgaaaggagtgatggaaatgatggtagccctgtgcggaagcgagagagagactgaccagctagttgccgttgaggccctgattcacgctagcaccaagttgtccagagccaccttcattattactaatggggtctcgctgttgaaacagatttataagacaacaaagaacgagaaaatcaagatacggacgttggtgggcttatgcaaactgggtagcgcgggtgggactgactacggacttagacagttcgcagaaggcagcaccgaaaaactggcaaagcaatgtaggaagtggctgtgcaacatgtctatcgacacaagaaccagacgctgggctgtcgagggtctagcctatctgactcttgatgccgacgttaaggatgactttgtgcaggatgtgcccgctctgcaagccatgtttgagttagctaaaacaagtgacaaaacaatcctgtattccgtggcaaccactctggttaactgcaccaattcctacgacgtgaaggaggtgattcctgaactggtacaacttgctaaatttagcaagcagcatgtgccggaggagcatccaaaggacaaaaaggacttcatcgatatgcgggtgaaacgactgctgaaggctggcgttatcagcgctcttgcctgcatggttaaagccgacagcgccatcttaaccgaccagacgaaggagttgttggccagagtgtttctggccctgtgtgataatccaaaggatagaggaactatcgtggcacaggggggaggcaaggccctgatcccgctggcactggaggggaccgatgttggcaaagtcaaagcagcccacgctctggcgaagattgctgcagtgtctaaccctgatatcgcattcccgggagaacgtgtgtacgaggtcgtgcgcccactcgtccgtttacttgatactcagcgtgatgggctgcagaactatgaggccctgctcggcctgactaatctctcgggcagatccgacaaactgaggcaaaaaatcttcaaggaacgcgcattaccagatatcgagaactacatgttcgaaaatcacgaccagcttcggcaagccgctacggaatgtatgtgcaacatggtgctgcataaagaggtccaagagcgcttcctggccgacggtaacgaccgtctgaagcttgttgtgctactgtgcggagaggacgacgacaaagtgcagaacgccgctgctggagccctggcaatgctgacagcggctcataagaaactgtgtctgaagatgacccaagtcacaacgcaatggcttgagatccttcagcgtttgtgcctgcatgaccagctaagtgtgcagcatcgaggactcgtcatagcctacaacctactcgcagccgatgctgagctcgcaaagaagcttgtggagtcagaacttctggagattttgaccgttgtgggtaaacaggagcctgacgagaaaaaggctgaagtagttcaaaccgccagagagtgccttatcaagtgcatggactacggatttatcaagcccgtgagctag

SEQ ID NO: 94360 - DNA, 5669 bp, Artificial Sequence
  derived and/or modified sequence
agactgaggctggctggctggaggttgacacaggagtgctcaggggagcagcatcacaagagggcagatcgaaagcatcgtccttgctgaaaaacagatggcagaggtggaagcggtacagctgaaggaggaaggaaaccggcatttccagctccaggactacaaggccgccacaaatagctacagccaggccctgaagctgaccaaggacaaggccctgctggccacgctttatcggaaccgggcagcctgtggcctgaaaacggagagctacgtccaggcagcttcagatgcctccagagccatcgacatcaactcctcggacatcaaggctctgtatcggcgatgccaggcactggagcacctggggaagctggaccaggccttcaaagacgtgcagcgttgtgccaccctcgagccacggaaccagaacttccaggagatgctgaggagactcaacaccagcattcaggagaagctccgagtgcagttctccacagactcgagggtacagaagatgtttgagatcctcttggatgaaaacagtgaggctgataagcgggaaaaggctgccaacaatctcattgtcctaggccgtgaggaagcaggggctgagaagatcttccagaacaatggagtagccttgctactgcagcttctggacactaagaagcctgagctggtgctggctgcagtgcggaccctgtcgggcatgtgcagcggccaccaagccagagccacagtgattctgcatgcagtgcggatagaccgaatctgtagcctcatggccgtggagaatgaggagatgtctctggctgtctgcaacctgctccaagccatcattgactccttgtctggggaggacaagcgggagcatcgagggaaggaggaggccctggttctagacaccaagaaggacctgaagcagatcaccagccacctgctggacatgctagtcagcaagaaggtgtctggccagggcagggatcaggcgctgaacctgctcaataagaatgttcccaggaaggaccttgccattcatgacaactcacgtaccatctatgtggtggataatggtctgaggaagatcctgaaggttgtggggcaggttccagatctgccatcctgcctgcccctgactgacaacacccgcatgctggcctctatcctcatcaacaagctctatgatgacctgcgctgtgacccggagcgcgatcacttccgcaagatctgtgaggaatatatcacgggcaagtttgacccccaggacatggacaagaacttgaatgccatccagacagtgtcagggatcctgcagggcccctttgacctgggcaaccagctgctgggactgaaaggtgtgatggagatgatggtggcactatgtggctcagagcgcgagacggaccagctggtggccgtggaggccctcatccatgcctccacgaagctcagccgcgccaccttcatcatcaccaatggagtgtcactgctcaaacagatctacaagaccaccaaaaatgagaagatcaagatccgcacactggtgggactctgtaagctcggctctgcaggtggcacagactacggtctcaggcagtttgcggaagggtcgacagaaaaactggccaaacagtgtcgcaagtggctgtgcaatatgtccatagacactcggacccgacgctgggcagtggagggcctggcctacctcacgctggacgctgatgtgaaggacgactttgtccaggacgtccctgccctgcaggccatgtttgagctggccaagaccagtgacaagaccatcctgtactcggtggccaccaccctggtgaactgcaccaacagctacgatgtcaaggaggtcatcccagagcttgtccagctcgccaagttctccaagcagcatgtgcccgaggaacaccccaaggacaagaaggactttatagacatgcgggtgaagcggcttctgaaggcgggtgtcatctctgccctggcttgcatggtgaaagcagatagtgccatcctcactgaccagaccaaggagctgctggccagggtattcctggcactgtgtgacaacccaaaggaccgaggcaccattgtggctcaaggtggtggcaaggccctgattcccctggctttggagggcacagatgtgggcaaggtgaaggcagcccacgctctagcaaagatcgctgctgtctccaatccggacattgcttttcctggggagcgggtgtatgaggtggtgcggccccttgtaagactcttggacacacagagggatgggcttcagaactatgaggctctcctaggcctcaccaacctgtctgggcggagtgacaaactccggcagaagatctttaaggagagggccttgccagacatcgagaactacatgtttgagaatcatgatcagctgcggcaggcggccaccgagtgcatgtgcaacatggtgctccacaaggaggtacaggaaaggttcttggctgacgggaatgaccggctgaagctggtggtgctgctctgcggggaggatgatgataaggtgcagaatgcggctgcaggggctctggccatgctgacagcagcacacaagaaactgtgcctcaagatgactcaagtgacaacccagtggttggagatcctccagcggctttgcctgcacgaccagctgtctgtccaacaccggggcctggtcattgcctacaacctactggcagccgatgctgagctggccaagaagctggtggagagtgagctgctggagatcctgactgtggtgggcaaacaggagccagatgagaagaaggcagaagtggttcagacagcccgagaatgtctcatcaagtgcatggattatggtttcattaaaccagtgtcttagacagcgaccctcagggatgctgggagtggtcctgtactgtgcagagtcctgggttggttgggttctcctgaagagtcaggtcatctagggatcatagcagtgacaatgaagtctcaatataaaggaaagacttgattgttctctgagttgtgagtcttctcctttgtcctgacagagtttggatgtttcactctctctcttgcttcctgtctccttatatttgtcatgtttcagaaattcccagaataattttcacccatgattagaaataggttggatcattctttctgtacccattctgaaggccaggataataggttgaagttctttatattttggaaaatggattttgtggtaaggtaggaactaacgggtgtgtgcatataaaggttaatgctgttgtatttggatgctgatctgtgctgttttcatgacctctctcccacactatttgaatcagtctgttcagaactgtgtgtttcacctgcagtgctctgtcccagtcccatgcccattcccatcacttcactgtgatggaaatagagtttatgttcaacagtggggcatgacctctgcaatttgcttgggaaagtcttccaagcaagatggacatgatgaatacaaataagatctactcaaagtacttcaaacaaaaaataaataattcattggctcatgtatcttggccacccagggaaggtctgacattgttagttagatccagagtttcaaatgtcatcaccatggatgtgtctttttctctctctcatttcccctccccatatcttgtcttttatttattataggtttgtctcattccctggcaggctctctccctgtgataggaaagagagtccccagcagccccagggtgacatagttgttatagttcattatggaatagaagagagaagagcattctcaataacccggcaaagttcccagggatgactctgatatgtctatgtctcaggtcacatttccatctatgaaccaatcatattcagaggtggaatgctaattggccaggcctgggtcatatatacaagtctagggaagaaatgagcttcatccctgtccaattgacatggactgattaggggtattaatggaagaggtgtgccaccacaaaagaatgtaccctgggcagatcaaagaacatattctgtatgtcaggcttggccacaaaagaatgacacaagtaatatgctgtagatcagaacctctctgctaatattgcctttttagcatggttaagatagctaagatctagtactgtcactccagtatgtcccaattctacctacgtttattgaagggtcaacagttctgatctcagcattgggtaaagggtgggacattcagatttacggtccttgataaaaacaatttacaacgttccgttgtgtaataaatgtaagtgtacatatgcctgggacatcagctggaaaagggacagactatcagagagttgcactgttgcggtatgggccaaatccaacataatacccgctgtacctctagagaactaaaaccttaatttctcagatcttttctgcactaatggtctttacatacagcctacattttaactaactcttgcatgggcttgtttcacagcaggaaactatattcatcatatccttattatgatagagaatgacaacattcaaaagggtgtggtgcttctgaaaatatacacaataaatggcatgatttgacctctgtcaaattcttctttcctgctttcctcatatgtgggcttgagtgggtgtatttagctcctttaaaggaaactctttcacaggcagggccacactcttactcgttttgatctcatgaggttacatctgccagtggcgttcagggccagttagataaagttcatcttgtttggattggagagactttttttttttttttttttgagacagggtcttgctctgtaacctaggctcaagtgcagtgcagtggtgcagtcatggctcaccgcagccttggtctcctgggctcaagtgatctttctacttcagcctcctcaatagctgggactacaggcacacaccaccacccccaggtaattaaaaaatttttttttgtagagacagggtctcactatgttgcccagtctgggagaccacattctttaacatgaatattttgtaaatagtccaagaagatctagaggaaagctgaattccttcatctgatttttgccactgggctgcctcccattgtctggctaagtcttcatgggaggcctttaagaaaagctgtgacaaatacctttgtttcccactgcctaggttacataagtagttggcttttccagcctagactcttatattgttgcttgtaagagggcccttctttgcagatttcttttttttttcatctatgctttcaaataggcagatgctagcctgagatcatctctttattgaggtagtttgcccaaaaacagcaaggaacagccaatacctgccaactttctaggtttttccaaccaattctcttacagaaaatctataaatatcttagaggtatgtttcttagtttcccaacatataatgggaaaattcatcatttatattattacttttaactgaagtatgttgttatcagagaacttggtctgtgtcatattaatcctttgccatttgagaagcatacagttttaaagtttatatctccaaaaggatattttgtaaaaatttaacccctttgactcttagtcttctcatttgtgaaaggtaaataataaagaatttctgttcctagt

SEQ ID NO: 94361 - DNA, 432 bp, Artificial Sequence
  derived and/or modified sequence
atgactaggatgactaggcccctcaaaagccatgttcaggtggtgccttccacgctcatgtggcagagccaggcgcgcacacagccagcaccattgtgctgcaagctcctgactcccaggtggctgccactgctcctgcctacacatcctcacagccactgtctagcaggacacctgtttttcccagcccgttactcctgtagctctgaatggaaacagcagctcacatgtcacctctgtgtgacggactcggccccacccagacacacaggtgtggttgtcagcgagcacctcaggagaactgagaagctctttttcaccattctttccccaaatcagtcaaaaccttttaaaacctggaaaatgttgaaagcaaccattcctatttttgtttgttttttattaaatcttgcacaaaatccccggcccctc

SEQ ID NO: 94362 - DNA, 219 bp, Artificial Sequence
  derived and/or modified sequence
atgagctaccagcagcagcagtgcaagcagccctgccagcccccacctgtgtgccccacccccaagtgcccagagccctgccccccacccaagtgcccagagccctgccccccacccaagtgcccccagccctgccccccccagcagtgccagcagaagtgcccccctgtgacccccagccccccctgccagcccaagtgcccccccaagagcaagtag

SEQ ID NO: 94363 - DNA, 219 bp, Artificial Sequence
  derived and/or modified sequence
atgagctaccagcagcagcagtgcaagcagccctgccagcccccacctgtgtgcccagcccccaagtgcccagagccctgccccccacccaagtgcccagagccctgcccccccagcaagtgcccccagagctgccccccccagcagtgccagcagaagtgcccccctgtgacccccagccccccctgccagcccaagtgcccccccaagagcaagtag

SEQ ID NO: 94364 - DNA, 219 bp, Artificial Sequence
  derived and/or modified sequence
atgagctaccagcagcagcagtgcaagcagccctgccagcccccacctgtgtgccccacccccaagtgcccagagccctgccccccacccaagtgcccagagccctgccccccacccaagtgcccccagccctgccccccccagcagtgccagcagaagtacccacctgtgacccccagccccccctgccagcccaagtacccacccaagagcaagtag

SEQ ID NO: 94365 - protein, 278 aa, Artificial Sequence
  derived and/or modified sequence
MQRGLFSDGDTSKKKKNVTMRSIKTTRDRVPTYQYNMNFEKLGKCIIINNKNFDKVTGMGVRNGTDKDAEALFKCFRSLGFDVIVYNDCSCAKMQDLLKKASEEDHTNAACFACILLSHGEENVIYGKDGVTPIKDLTAHFRGDRCKTLLEKPKLFFIQACRGTELDDGIQADSGPINDTDANPRYKIPVEADFLFAYSTVPGYYSWRSPGRGSWFVQALCSILEEHGKDLEIMQILTRVNDRVARHFESQSDDPHFHEKKQIPCVVSMLTKELYFSQ

SEQ ID NO: 94366 - DNA, 837 bp, Artificial Sequence
  derived and/or modified sequence
atgcaaagaggactgtttagtgatggagacacctctaagaagaaaaaaaatgtcacaatgaggtctatcaaaacaacgcgggatcgcgtgcccacctaccagtacaatatgaacttcgagaagttggggaagtgcatcatcattaataataagaatttcgataaagtcactggcatgggggtccgcaacggcacagataaggacgccgaggccttgtttaagtgcttccgcagcctgggatttgacgtcatcgtgtacaacgattgctcctgtgccaaaatgcaagacctgcttaagaaggcctctgaggaagaccacactaatgctgcttgttttgcttgcatcctgctgagtcacggggaggaaaacgtaatctatggcaaagacggcgtgactcctattaaggacttaacagcacacttccggggcgaccgctgcaagacactgctggagaaacccaagctttttttcattcaggcctgcagaggtactgagttggacgatggtattcaggccgacagtggcccaattaacgatacagacgctaacccccgctacaaaatacctgttgaagcagattttttattcgcatattcaaccgttcccgggtactacagctggcgcagtccaggcagaggaagttggtttgtccaggccctatgttcaatcttggaggagcacggaaaagaccttgagatcatgcagatcttgactcgggtaaacgacagagtagctcggcactttgaatcccaatctgatgaccctcacttccatgaaaagaagcagattccatgcgtggtttccatgcttacaaaggaactctacttcagccagtag

SEQ ID NO: 94367 - DNA, 837 bp, Artificial Sequence
  derived and/or modified sequence
atgcagaggggcctcttcagtgatggagacaccagcaagaagaagaagaatgtgaccatgaggagcatcaagaccacccgggacagagtgcccacctaccagtacaacatgaactttgagaagctgggcaagtgcatcatcatcaacaacaagaactttgacaaggtgacaggcatgggcgtgagaaatggaacagacaaggatgctgaggccctcttcaagtgcttccgcagcctgggctttgatgtgattgtgtacaatgactgcagctgtgccaagatgcaggacctgctgaagaaggccagcgaggaggaccacaccaatgctgcctgctttgcctgcatcctgctgagccatggagaggagaatgtcatctacggcaaggatggagtgacccccatcaaggacctgacagcccacttccggggggaccgctgcaagaccctgctggagaagcccaagctgttcttcatccaggcctgccggggcacagagctggatgatggcatccaggccgacagcggccccatcaatgacacagatgccaacccccgctacaagatccctgtggaggccgacttcctgtttgcctacagcacagtgcccggctactacagctggaggagccctggccggggctcctggtttgtgcaggccctgtgcagcatcctggaggagcacggcaaggacctggagatcatgcagatcctgaccagggtgaatgacagagtggcccggcactttgagagccagagtgatgacccccacttccacgagaagaagcagatcccctgtgtggtgtccatgctgaccaaggagctgtacttcagccagtag

SEQ ID NO: 94368 - DNA, 837 bp, Artificial Sequence
  derived and/or modified sequence
atgcagcggggcctgttcagcgacggcgacaccagcaagaagaagaaaaacgtaacaatgcgatccatcaaaacaacccgggatagggtgcccacgtaccagtacaatatgaactttgagaagctgggcaagtgtataatcatcaacaacaaaaattttgacaaggtaaccggaatgggcgtgcgaaacggcaccgacaaagatgctgaggctcttttcaagtgctttaggagtttggggtttgacgtgatagtctacaatgattgttcttgtgcaaagatgcaggaccttctgaaaaaggccagcgaggaagaccacacaaacgccgcctgttttgcttgtatcttgttgtcccacggcgaggaaaacgtgatatacgggaaggacggcgtgactccgattaaggatttaaccgcccacttcagaggagatcgttgtaagacactgctcgagaagcccaaactgttcttcatccaagcgtgtagagggaccgagcttgacgatggcattcaggctgactctggacctatcaatgataccgatgcaaacccccggtataaaatcccggtggaggcagatttcctgttcgcatacagcacggtgccaggctactactcttggcgctcaccggggcggggcagctggtttgtgcaggccctctgttctatattggaagagcacggtaaggacttagaaatcatgcagattctgactagagtcaatgaccgtgtggcaaggcacttcgaatcccagtcagatgatcctcacttccacgagaaaaaacagattccctgcgtagtgtctatgctaactaaagagctatatttctcccagtag

SEQ ID NO: 94369 - DNA, 837 bp, Artificial Sequence
  derived and/or modified sequence
atgcagagggggctgtttagcgacggtgatacgagcaagaaaaaaaagaacgtaactatgagatcaatcaagaccacacgcgatagggtgccgacgtatcagtataatatgaacttcgaaaagctggggaaatgcatcatcatcaacaacaagaatttcgacaaggtgactggaatgggagtccggaatggaaccgacaaagacgccgaggccctattcaaatgtttcaggagcctcggcttcgatgttatcgtgtataatgactgcagctgtgcgaaaatgcaggacctcctgaagaaggcctctgaggaggaccacactaatgcagcttgtttcgcttgcatcttgctaagtcacggagaggagaacgtgatttacggcaaggacggcgtcacgcctatcaaagatttgacagcccactttaggggcgacagatgtaagacgcttctcgagaagccgaaactcttttttattcaggcttgtcgcggtactgaactggatgacggtatccaggccgactctgggcctataaacgatacagatgccaaccctcgatataagatcccggtggaagcggattttttatttgcctacagcacggtgccgggttattactcctggagatcccccggtcgcggaagttggttcgtgcaggcgttgtgtagcatccttgaagagcacggaaaggatttagagatcatgcagatacttacacgggtgaatgaccgagtggcaaggcatttcgagagccagtcagacgaccctcactttcacgagaagaagcagatcccctgcgtcgtatcgatgctcacaaaagagctgtactttagccagtag

SEQ ID NO: 94370 - DNA, 1148 bp, Artificial Sequence
  derived and/or modified sequence
tgtcgtcgcagagcacagcctagttctgatgcagaggggactgttttcagatggagacactagtaagaagaagaaaaatgtcaccatgcgatccatcaagaccacccgggaccgagtgcctacatatcagtacaacatgaattttgaaaagctgggcaaatgcatcataataaacaacaagaactttgataaagtgacaggtatgggcgttcgaaacggaacagacaaagatgccgaggcgctcttcaagtgcttccgaagcctgggttttgacgtgattgtctataatgactgctcttgtgccaagatgcaagatctgcttaaaaaagcttctgaagaggaccatacaaatgccgcctgcttcgcctgcatcctcttaagccatggagaagaaaatgtaatttatgggaaagatggtgtcacaccaataaaggatttgacagcccactttaggggggatagatgcaaaacccttttagagaaacccaaactcttcttcattcaggcttgccgagggaccgagcttgatgatggcatccaggccgactcggggcccatcaatgacacagatgctaatcctcgatacaagatcccagtggaagctgacttcctcttcgcctattccacggttccaggctattactcgtggaggagcccaggaagaggctcctggtttgtgcaagccctctgctccatcctggaggagcacggaaaagacctggaaatcatgcagatcctcaccagggtgaatgacagagttgccaggcactttgagtctcagtctgatgacccacacttccatgagaagaagcagatcccctgtgtggtctccatgctcaccaaggaactctacttcagtcaatagccatatcaggggtacattctagctgagaagcaatgggtcactcattaatgaatcacatttttttatgctcttgaaatattcagaaattctccaggattttaatttcaggaaaatgtattgattcaacagggaagaaactttctggtgctgtcttttgttctctgaattttcagagactttttttataatgttattcatttggtgactgtgtaactttctcttaagattaattttctctttgtatgtctgttaccttgttaatagacttaatacatgcaacaga

SEQ ID NO: 94371 - DNA, 837 bp, Artificial Sequence
  derived and/or modified sequence
atgcagagaggcctgttcagcgacggcgacaccagcaagaagaagaagaacgtgaccatgagaagcatcaagaccaccagagacagagtgcccacctaccagtacaacatgaacttcgagaagctgggcaagtgcatcatcatcaacaacaagaacttcgacaaggtgaccggcatgggcgtgagaaacggcaccgacaaggacgccgaggccctgttcaagtgcttcagaagcctgggcttcgacgtgatcgtgtacaacgactgcagctgcgccaagatgcaggacctgctgaagaaggccagcgaggaggaccacaccaacgccgcctgcttcgcctgcatcctgctgagccacggcgaggagaacgtgatctacggcaaggacggcgtgacccccatcaaggacctgaccgcccacttcagaggcgacagatgcaagaccctgctggagaagcccaagctgttcttcatccaggcctgcagaggcaccgagctggacgacggcatccaggccgacagcggccccatcaacgacaccgacgccaaccccagatacaagatccccgtggaggccgacttcctgttcgcctacagcaccgtgcccggctactacagctggagaagccccggcagaggcagctggttcgtgcaggccctgtgcagcatcctggaggagcacggcaaggacctggagatcatgcagatcctgaccagagtgaacgacagagtggccagacacttcgagagccagagcgacgacccccacttccacgagaagaagcagatcccctgcgtggtgagcatgctgaccaaggagctgtacttcagccagtag

SEQ ID NO: 94372 - DNA, 321 bp, Artificial Sequence
  derived and/or modified sequence
accttcctggagcagagcaagaccagattcaacaagaactacaagggcatgagcctgagcaagatcaccaccaccgtgggcctgaacatcggcaccgtggacgtgggcaaggccagactgatgttctgggacctgggcggccaggaggagctgcagagcctgtgggacaaggacaagaccaagtgcggcgacctgggcaccctgcacagcagcaaggtgagcgccagcttcagactgagagacctggccgccgaccaccacagaacccagaagtggcagagacccgacgtgggcaccgccggctggctgcccctgccctag

SEQ ID NO: 94373 - DNA, 381 bp, Artificial Sequence
  derived and/or modified sequence
atgttccagaaggatgaatactgcattctgatcctcggccttgacaacgccggcaagacaactttcctggagcagagcaaaacaagattcaataagaattataagggaatgtcactgtctaaaattacaaccactgtgggtttgaacatcggtaccgtcgacgtcggaaaggccaggctgatgttctgggaccttggcggccaggaggagctgcagtcgctgtgggacaaggacaaaactaagtgtggggacctcggcaccctccatagcagcaaggtgtctgcctccttccggctgcgggacttggccgctgatcaccacagaacccaaaagtggcagaggcctgacgtgggtactgctggatggctaccgctgccctag

SEQ ID NO: 94374 - DNA, 321 bp, Artificial Sequence
  derived and/or modified sequence
accttcctcgaacaatctaagactcgtttcaacaagaattataagggcatgtcgctaagtaaaattaccactacggtggggcttaacatagggacagtagacgtggggaaggcaaggctcatgttttgggaccttgggggccaggaagagctgcagtcattatgggataaggacaagacaaagtgtggagatctcgggacgctacactcaagcaaggtgtcagcttcgtttcgcctgcgggatctggcagcagatcaccaccggactcagaaatggcagagaccggacgtaggaactgccggctggctgccgctgccatag

SEQ ID NO: 94375 - DNA, 381 bp, Artificial Sequence
  derived and/or modified sequence
atgttccagaaggatgagtactgcatcctgatcctgggcctggacaatgccggcaagaccaccttcctggagcagagcaagacccgcttcaacaagaactacaagggcatgagcctgagcaagatcaccaccaccgtgggcctgaacatcggcaccgtggatgtgggcaaggcccggctgatgttctgggacctgggcggccaggaggagctgcagagcctgtgggacaaggacaagaccaagtgtggggacctgggcaccctgcacagcagcaaggtgtctgccagcttccggctgcgggacctggccgctgaccaccacaggacccagaagtggcagaggccagatgtgggcacagctggctggctgcccctgccctag

SEQ ID NO: 94376 - DNA, 321 bp, Artificial Sequence
  derived and/or modified sequence
accttcctggagcagagcaagacccgcttcaacaagaactacaagggcatgagcctgagcaagatcaccaccaccgtgggcctgaacatcggcaccgtggatgtgggcaaggcccggctgatgttctgggacctgggcggccaggaggagctgcagagcctgtgggacaaggacaagaccaagtgtggggacctgggcaccctgcacagcagcaaggtgtctgccagcttccggctgcgggacctggccgctgaccaccacaggacccagaagtggcagaggccagatgtgggcacagctggctggctgcccctgccctag

SEQ ID NO: 94377 - DNA, 381 bp, Artificial Sequence
  derived and/or modified sequence
atgttccagaaggacgagtactgcatcctgatcctgggcctggacaacgcgggaaaaacgactttcttagagcagtctaaaacccgctttaacaagaattataaggggatgtccctttctaaaattactacaaccgtgggcctcaatatcgggaccgtggacgttggcaaagcccgattgatgttttgggacttgggcggacaggaagagctgcaatccctctgggataaggataaaacgaagtgtggagatctgggaactttgcactccagtaaggtgagcgcctcattccggctaagagatctggctgcggaccatcaccgaacacagaagtggcagaggccggatgtcggaactgccgggtggcttcccttgccatag

SEQ ID NO: 94378 - DNA, 321 bp, Artificial Sequence
  derived and/or modified sequence
accttcctggagcagagcaagacccggttcaacaagaactacaagggtatgagtctgtcgaaaataacaacaacagtgggactgaacatcggcacggtggacgtgggcaaagcacgcctgatgttttgggatctcggtgggcaggaggagctgcaatcactttgggataaagacaagactaagtgcggcgacctggggactttgcatagctctaaggtctccgccagcttcaggttgcgcgatctcgccgctgaccatcaccggacgcagaagtggcagagacctgatgtcggtacagccggatggctgccacttccttag

SEQ ID NO: 94379 - DNA, 381 bp, Artificial Sequence
  derived and/or modified sequence
atgttccagaaagacgaatattgcatcctcatcttaggccttgataatgctggtaaaactacatttttagagcagtcgaaaaccaggtttaataagaactataagggtatgtcactaagtaagattacaacaacagtgggtctgaacatcgggacagtcgatgtgggtaaagccagactcatgttttgggacctggggggtcaggaagagctacagtccctgtgggacaaggacaaaacaaaatgtggggatctcggcacactgcattcttccaaggtcagcgcgtccttcagattgcgggatctcgctgctgaccatcatcggactcaaaagtggcaacgtcccgacgtggggacagcaggctggctgcccctcccatag

SEQ ID NO: 94380 - DNA, 380 bp, Artificial Sequence
  derived and/or modified sequence
accttcctggagcagtcgaaaacccgatttaacaagaactacaaggggatgagtctatccaaaatcaccaccaccgtgggcctaaacatcggcactgtggatgtgggaaaggctcggctcatgttctgggacttaggagggcaggaagagctgcagtctttgtgggacaaggacaagacaaagtgtggggacctggggaccctgcactcctccaaagtgagtgcctcctttcggctcagagaccttgctgctgaccaccacaggacacagaaatggcaaagaccagatgtggggacggcaggatggctgcctctcccctgatgaggttccttcagttctagcttaacatttgttcttccatgatcaccagaagactcctc

SEQ ID NO: 94381 - DNA, 321 bp, Artificial Sequence
  derived and/or modified sequence
acgtttttggaacaatctaagacccgctttaataagaactataaggggatgagtttaagtaagataaccactactgtggggcttaatatcggaactgtcgacgtaggtaaggcaaggttgatgttctgggacctcggtggtcaggaagagctccaatcactgtgggataaggacaaaaccaagtgcggggacctgggaacccttcactccagcaaggtgagtgcaagctttcggctgagggatctggccgctgaccaccacagaacccagaagtggcagcgcccagatgtaggaacagccggttggcttccactgccttag

SEQ ID NO: 94382 - DNA, 552 bp, Artificial Sequence
  derived and/or modified sequence
ggaggccgctgggacgcggttcagctcattccctgaggccggcccgcgtcccgtcaggcgccgcgcggggttagcgcggggtcagcggaggtcagcgggggtcagcagcagcggctccgagggcgcggcggacgcaggatgtacacgctgctgtcgggcttgtacaagtacatgtttcagaaggacgagtactgcatcctgatcctgggcctggacaatgctgggaagacgaccttcctggagcagtcgaaaacccgatttaacaagaactacaaggggatgagtctatccaaaatcaccaccaccgtgggcctaaacatcggcactgtggatgtgggaaaggctcggctcatgttctgggacttaggagggcaggaagagctgcagtctttgtgggacaaggacaagacaaagtgtggggacctggggaccctgcactcctccaaagtgagtgcctcctttcggctcagagaccttgctgctgaccaccacaggacacagaaatggcaaagaccagatgtggggacggcaggatggctgcctctcccctga

SEQ ID NO: 94383 - DNA, 381 bp, Artificial Sequence
  derived and/or modified sequence
atgttccagaaggacgagtactgcatcctgatcctgggcctggacaacgccggcaagaccaccttcctggagcagagcaagaccagattcaacaagaactacaagggcatgagcctgagcaagatcaccaccaccgtgggcctgaacatcggcaccgtggacgtgggcaaggccagactgatgttctgggacctgggcggccaggaggagctgcagagcctgtgggacaaggacaagaccaagtgcggcgacctgggcaccctgcacagcagcaaggtgagcgccagcttcagactgagagacctggccgccgaccaccacagaacccagaagtggcagagacccgacgtgggcaccgccggctggctgcccctgccctag

SEQ ID NO: 94384 - DNA, 390 bp, Artificial Sequence
  derived and/or modified sequence
tgaagcgaggtgcccctgccccccggcgccctggccaccctgagcagcagctgcagcctgggcgtggccctgcacagaagcagccccgccagcagaggccccggcgagagcagcctgcccgccttcagcggcgtggccctgctgccccccgcctgcaaggccggcctgccctacaacctgagcagacaggagggccacctgacctgcctgagcatccccgacatcaagaccgccttcagcgactgcaccagcaagatcggcagaagagactgcctgacccaggcctgcagcgccctgaccggcaagggcgtgagagagggcatcgagtggatggtgaagtgcgtggtgagaaacgtgcacagaccccccagacagagagacatcacctag

SEQ ID NO: 94385 - DNA, 390 bp, Artificial Sequence
  derived and/or modified sequence
tgaagtgaggtccccctcccccctggtgctctggctaccctatctagtagctgcagcctgggtgtcgctctgcacagatcctctccagccagtaggggcccaggcgagtcttccctgccagccttttccggcgtcgcgcttctacccccagcatgcaaagcaggtctgccttacaacctttctcgacaggagggacacctgacatgcttatctatccctgacatcaaaaccgccttctcggattgcacgagcaaaattggccggcgtgactgtctgactcaggcttgcagtgcactgactggcaagggtgtccgggaggggattgagtggatggtgaaatgcgtagtcagaaacgtgcaccgaccacccaggcaacgggacattacgtag

SEQ ID NO: 94386 - DNA, 390 bp, Artificial Sequence
  derived and/or modified sequence
tgaagtgaggtgcccctgcccccaggggccctggccaccctgagcagcagctgcagcctgggcgtggccctgcacaggagcagccctgccagccggggccctggagagagcagcctgcctgccttctctggagtggccctgctgcccccagcctgcaaggccggcctgccctacaacctgagccggcaggagggccacctgacctgcctgagcatcccagacatcaagacagccttcagtgactgcaccagcaagattggccggcgggactgcctgacccaggcctgcagcgccctgaccgggaagggcgtgcgggagggcatcgagtggatggtgaagtgtgtggtgagaaatgtgcaccggcccccccggcagagggacatcacctag

SEQ ID NO: 94387 - DNA, 390 bp, Artificial Sequence
  derived and/or modified sequence
tgaagcgaggtgcccctgccccccggcgccctggccaccctgagctcgagctgttcgctgggcgtcgcgctgcatcgaagttccccagccagccggggcccaggcgagtctagtctgcccgctttctcaggcgttgcgctgctgccccccgcgtgtaaagcagggcttccttacaacctttctaggcaggaggggcatttaacgtgtctgagcatcccagacattaaaacagctttcagcgattgcacttccaagatcgggcggcgggattgtctgacacaagcatgctccgccctgacaggcaagggcgttagggaaggcatcgagtggatggtcaagtgtgtggtgcgcaatgtccatcgtccacctaggcagagggacatcacctag

SEQ ID NO: 94388 - DNA, 390 bp, Artificial Sequence
  derived and/or modified sequence
taaagcgaggtgccacttcccccaggcgcactggcaaccctctcttcatcttgttcactcggggtggctctacatcggagcagtcccgcatctcgcggaccaggggagtcgtccttgccggcattctctggggtcgccctactgccacctgcttgcaaggccggactgccctacaatctgtcccggcaagagggacacctgacctgcttgagcatcccagacatcaaaaccgcattcagcgattgtaccagtaagatcggtcgtcgagactgcctgactcaggcttgtagtgccctgaccggtaagggagtgagagaggggatcgagtggatggtgaagtgcgtcgtaaggaacgttcaccggccacctcgccagcgcgacatcacttag

SEQ ID NO: 94389 - DNA, 1374 bp, Artificial Sequence
  derived and/or modified sequence
ctctgaggtgccactgcccccgggagcactggccacgctgagttctagctgttctcttggagtggctttgcacagaagcagcccggcgtccagagggccaggtgaatcttcacttcctgccttctctggggtggctctgttgcccccagcctgtaaggctggcctcccctacaatctcagccgacaagagggacatctgacgtgcctctcaatccctgacatcaagacggccttcagcgactgcaccagcaagatcggcaggcgagattgcctgacccaggcctgctcggccctcacaggcaaaggggtgcgcgagggcatcgagtggatggtgaagtgtgtcgtgcggaatgtgcaccggccgccgcggcagagggacatcacgtaggcgcagccgcgctgccgtcgggacggctggtcccctggtgctggaggagtggcctcctgttggctcccatgctgctgatctggggggtgggtttgctttgctttggggttcttctatttactttgttttctcgaagacaaactttcctctatgtctggaaaagcgtaggcatccggaggctttggaggggagtctggcagcccggctggcccaggccctgcagcggcagcctttccacagggcgcagcggcggcctttcgaggccctttctggggggtctgagggagacctggttgggaattggggctccagtgctcaggctggcttgggctgcatgaggacagccctgtgggaccctcgggagaccccgtggctgtctccgccccatcgaggaggaggcccgtcagccatggctgccatctggcttctgccctgtgaccccgtgaccccgtgaccccgaagtggtctggggctgatcttgccttgaggaagacccaggccatgttcccaaaggccagcgggggccctggattgtgatgcagcctcgggacagggctgaggcctgcgggggaagacctataccccacgcctgggcctggcttcacctcaccctaatcccccgggagggagctgactgatgcaaaaagctgagggggcctgctgggagtggctgtttttatgccccagccccgcaagttggggagtgtttgtgggggtccagagccctcccccagccaggagagaacctcccggaggggttctctgtggggccctgtgtcccctgctcgggagtaaggctggtcctggggtcctccctgcacggaccccactgggcctgccgagtgctgtgttcttcctcagtctggctgtgggcaggagcggcctgcccagtgtcacccagggtgagtgcaaaataaagacggcgagtgtggctctgtccatcccttccctcctggagggtggaggctcctggctgttggacacgg

SEQ ID NO: 94390 - protein, 129 aa, Artificial Sequence
  derived and/or modified sequence
  misc_feature (1)..(1): Xaa can be any naturally occurring amino acid
XSEVPLPPGALATLSSSCSLGVALHRSSPASRGPGESSLPAFSGVALLPPACKAGLPYNLSRQEGHLTCLSIPDIKTAFSDCTSKIGRRDCLTQACSALTGKGVREGIEWMVKCVVRNVHRPPRQRDIT

SEQ ID NO: 94391 - protein, 201 aa, Artificial Sequence
  derived and/or modified sequence
MYTLLSGLYKYMFQKDEYCILILGLDNAGKTTFLEQSKTRFNKNYKGMSLSKITTTVGLNIGTVDVGKARLMFWDLGGQEELQSLWDKYYAECHGVIYVIDSTDEERLAESKQAFEKVVTSEALCGVPVLVLANKQDVETCLSIPDIKTAFSDCTSKIGRRDCLTQACSALTGKGVREGIEWMVKCVVRNVHRPPRQRDIT

SEQ ID NO: 94392 - DNA, 606 bp, Artificial Sequence
  derived and/or modified sequence
atgtacactctgttgtcaggcttgtataagtacatgttccagaaggatgaatactgcattctaatcctaggcttagataacgctgggaaaaccacattcctggaacaaagtaagacaagatttaataaaaactacaaaggaatgagcctctcaaagataaccactactgtcggtctcaacattggaactgttgacgtgggcaaagctcgcctgatgttttgggacttggggggccaagaagaactacagtctttgtgggataaatactatgctgagtgccatggcgtaatttacgtcattgacagtaccgatgaagaacgactagccgagagcaagcaggccttcgagaaggtggttacatcagaggcactgtgcggcgtgcctgtgctcgtgctggcgaacaagcaagacgtagagacgtgtctgtcaatacccgatataaaaactgctttctctgattgcacatccaaaatcggtcggcgggactgtctgactcaggcctgtagcgctctgacgggaaagggagtgagggaaggaatcgagtggatggtgaagtgtgtggtgcggaacgtgcaccggccaccccgccagagggatatcacctag

SEQ ID NO: 94393 - DNA, 2965 bp, Artificial Sequence
  derived and/or modified sequence
gcactccaggagcagccgcgccgctgctcacccgccctgtagtccgctccccccagggccgtccccgttttaagaaatggggtgatggggcgtccctacccggcgcctgcaggggctcctggggagcgcgccggtggctcgctgctcccgggtggggcgcggggctggcgctcgagggtgccgtggcccaggcggggctgcagcgagtgtgttccccgttccgcgcgcgtgaagcgtgggagcgaagcctcgggggagggcgggagcgcggctgagctcactgtgaacacccggctgggtagtcccgcgagcaggggaggggccggaaccgatgtgtatgcggagaggtcgcagtcattgctgtgagcaggacacagtggcggctgacctgggagaagttacagagggacggggtgggagagggacgaggagtcgggaatggcccccaggctctcgtcctgagcggtcggctggacgtggggcgccactgaccaccgtggagaagcccgggggaggggaggtgctttctggctgcacactgacctatgttggggtgcccagggcaggatgtacacgctgctgtcgggcttgtacaagtacatgtttcagaaggacgagtactgcatcctgatcctgggcctggacaatgctgggaagacgaccttcctggagcagtcgaaaacccgatttaacaagaactacaaggggatgagtctatccaaaatcaccaccaccgtgggcctaaacatcggcactgtggatgtgggaaaggctcggctcatgttctgggacttaggagggcaggaagagctgcagtctttgtgggacaagtattatgcggagtgtcacggcgtcatctacgtcattgactccaccgacgaggagaggctggctgagtccaagcaggcgtttgagaaggtggtgaccagcgaggcgctgtgcggtgtccccgtcttggtgctggccaacaagcaggatgtggagacgtgcctctcaatccctgacatcaagacggccttcagcgactgcaccagcaagatcggcaggcgagattgcctgacccaggcctgctcggccctcacaggcaaaggggtgcgcgagggcatcgagtggatggtgaagtgtgtcgtgcggaatgtgcaccggccgccgcggcagagggacatcacgtaggcgcagccgcgctgccgtcgggacggctggtcccctggtgctggaggagtggcctcctgttggctcccatgctgctgatctggggggtgggtttgctttgctttggggttcttctatttactttgttttctcgaagacaaactttcctctatgtctggaaaagcgtaggcatccggaggctttggaggggagtctggcagcccggctggcccaggccctgcagcggcagcctttccacagggcgcagcggcggcctttcgaggccctttctggggggtctgagggagacctggttgggaattggggctccagtgctcaggctggcttgggctgcatgaggacagccctgtgggaccctcgggagaccccgtggctgtctccgccccatcgaggaggaggcccgtcagccatggctgccatctggcttctgccctgtgaccccgtgaccccgtgaccccgaagtggtctggggctgatcttgccttgaggaagacccaggccatgttcccaaaggccagcgggggccctggattgtgatgcagcctcgggacagggctgaggcctgcgggggaagacctataccccacgcctgggcctggcttcacctcaccctaatcccccgggagggagctgactgatgcaaaaagctgagggggcctgctgggagtggctgtttttatgccccagccccgcaagttggggagtgtttgtgggggtccagagccctcccccagccaggagagaacctcccggaggggttctctgtggggccctgtgtcccctgctcgggagtaaggctggtcctggggtcctccctgcacggaccccactgggcctgccgagtgctgtgttcttcctcagtctggctgtgggcaggagcggcctgcccagtgtcacccagggtgagtgcaaaataaagacggcgagtgtggctctgtccatcccttccctcctggagggtggaggctcctggctgttggacacggtgatggtgttactgggctgctcaggggctggtgggcaggtgaggggctccccaggtgggcctggagagtccaggcactcccttcctgcggatgtgggaaggacatggggtcctgggaggagctgctgggaaggggcatgagtcagggtgggggtggcgcagcagctgcggggctgtgactcacaggagtcgggccctggaagtccccgcgtcctctccaggggaccctgtgtgtgttctgcaggttggttcccaggacctgggggggacctccagccccgggaacctggccgtgctggggaggcgagtggctggtgcagccccccggttgctctgggtgcatcgggaggcttcagagcctgccccagagagggagaagcttcacttcccggaaagcatgggaggcctggaggaggtctttggcaggtcccctctcgggaaatcccctgtgagttgggagtgggaggaattcataagtggggggttagtgtgggccccggcgactagggctggcctgagccccatcctgttcttccagcaatgataccctcccaggccctgaccctcgctgagcttcaggggcccctgccacgtgccacagccactgggggcagaggtggcactccccactgatcctcccagggagggtctgtctgaggtaggggaagccccgggcagcagttctgatggcaggcagcctgagggatctgggcacagcgggcggctcaggtgtccccggctgccctcccagtagctgtgcaactacaaccagttttatgaaaaagctttataaaaataagctttaag

SEQ ID NO: 94394 - DNA, 606 bp, Artificial Sequence
  derived and/or modified sequence
atgtacacattactctccgggctgtataaatacatgtttcagaaggatgaatattgcatcttaatacttggcctggacaatgctggtaagaccacctttctggaacagtccaaaacacgttttaacaagaactataaaggtatgagtctcagcaagatcacgacaactgttggcctaaatattgggaccgtcgacgtgggaaaggcacggctgatgttctgggatctcggcggtcaggaagagctgcagtcactgtgggataagtattacgcagagtgccatggcgtaatttacgttatcgattccacagatgaagaacggctcgccgagtccaaacaggccttcgaaaaagtggtaacgtcggaagcactgtgcggagtgccagttctcgttttggccaacaaacaagatgtggaaacatgcctgagcattcctgacatcaagaccgctttctcagactgcacgtccaaaattggccgaagagattgtctaacgcaagcttgttctgcattgactgggaagggggtgcgggagggcatcgagtggatggtgaaatgcgtggtgcgtaatgttcacaggccacctcgtcagagggacattacctag

SEQ ID NO: 94395 - DNA, 606 bp, Artificial Sequence
  derived and/or modified sequence
atgtacaccctgctgagcggcctgtacaagtacatgttccagaaggatgagtactgcatcctgatcctgggcctggacaatgctgggaagaccaccttcctggagcagagcaagacccgcttcaacaagaactacaagggcatgagcctgagcaagatcaccaccaccgtgggcctgaacattggaacagtggatgtgggcaaggcccggctgatgttctgggacctgggcggccaggaggagctgcagagcctgtgggacaagtactatgcagagtgccacggcgtcatctacgtgattgacagcacagatgaggagcggctggccgagagcaagcaggcctttgagaaggtggtgaccagcgaggccctgtgtggggtgcctgtgctggtgctggccaacaagcaggatgtggagacctgcctgagcatcccagacatcaagacagccttcagtgactgcaccagcaagattggccggcgggactgcctgacccaggcctgcagcgccctgaccgggaagggcgtgcgggagggcatcgagtggatggtgaagtgtgtggtgagaaatgtgcaccggcccccccggcagagggacatcacctag

SEQ ID NO: 94396 - DNA, 606 bp, Artificial Sequence
  derived and/or modified sequence
atgtacaccctgctgagcggcctgtacaagtacatgttccagaaggatgaatactgtattttgattctgggcctcgataatgcaggaaaaaccacctttttagaacagtccaagaccaggttcaataagaattacaagggaatgagtctgtcgaaaattacaaccaccgtgggtctcaatatcggtactgtagacgtcggaaaagcccgactgatgttctgggatctgggcggtcaggaagaacttcaatcgctgtgggacaagtattacgccgaatgtcatggtgtgatctatgtcatcgatagcacagatgaggagcgattggcagaatctaagcaggccttcgagaaagttgttacttcggaagctctgtgtggagtccccgtgttggttctggcaaataaacaggatgtagaaacctgtctgtccattccagatattaagaccgcatttagtgactgtaccagtaaaatcggacggcgtgactgcctgactcaggcatgcagtgctttgactgggaaaggagtgagggagggtatcgaatggatggtgaaatgcgtagttcgcaacgtgcacaggcctcctcgccaaagggatatcacctag

SEQ ID NO: 94397 - DNA, 606 bp, Artificial Sequence
  derived and/or modified sequence
atgtacaccctgctgagcggcctgtacaagtacatgttccagaaggatgaatattgcatcctcatcttgggcttggacaacgccgggaagacaacattcctagaacagtcgaagacccggtttaataaaaattataaaggcatgtccctgtccaagatcactaccacagtgggtctaaatataggcaccgtggacgtgggaaaagctcgcctgatgttctgggatctgggtgggcaagaggaactgcagtctttgtgggacaagtattacgctgagtgccatggagttatttatgtcattgactccaccgatgaggaaagattagctgagagtaagcaggcctttgaaaaggtagtgacttctgaggctttgtgcggcgtccctgtcctggtcttggcgaacaaacaggacgtcgagacttgcttgtcgattcctgatattaaaacagctttctccgattgtacaagcaagattgggagaagagactgtctgacacaggcgtgctctgcactcaccggcaaaggggtcagggaaggcattgaatggatggtgaagtgcgtagttcggaatgtacatcggccgccacggcaacgtgacatcacctag

SEQ ID NO: 94398 - DNA, 606 bp, Artificial Sequence
  derived and/or modified sequence
atgtatacgctacttagtggtttgtacaaatacatgtttcagaaggatgagtactgtattctcatcctgggtctcgacaatgccggaaaaactaccttcctagagcagtccaagaccaggttcaacaagaactataaaggaatgtcactgagcaaaattaccacgaccgtcggcttaaatattggaacggtggatgtggggaaggcccgtttaatgttctgggatctgggtgggcaggaggaactgcagtccctgtgggacaagtactacgccgagtgccatggtgtcatctacgtgattgactccactgacgaagagaggctggccgaatcaaagcaggctttcgagaaagtggtaacaagcgaggctctctgcggcgtgcccgtactcgtcttggctaacaagcaggatgtggagacctgcttgagtatccctgatatcaagactgcattttcggactgcaccagcaagattggacgccgtgattgcttgacgcaggcgtgcagcgcactcactggaaagggcgtgagggagggcatcgagtggatggtgaaatgtgtggttcgaaatgtgcataggccaccacgacagagggacatcacctag

SEQ ID NO: 94399 - DNA, 606 bp, Artificial Sequence
  derived and/or modified sequence
atgtacaccctcttaagtggactatacaaatatatgtttcagaaagatgagtactgcattctgatcctgggcctggacaacgccggaaagaccacgttcttggaacagtccaaaacccgatttaataagaactataagggcatgagtctatcaaagataacgacgaccgtgggcctcaacattgggacagtggacgtgggtaaggctcgtctaatgttttgggacctcgggggacaggaagagctgcaatctctctgggataagtactacgccgagtgtcacggtgtgatatatgtgattgattcgactgacgaagagcggctcgccgagagcaagcaggctttcgaaaaggtcgtaacatccgaggccttatgcggagtgccagtcctggtgctcgctaataagcaggatgtggagacatgtctctccattcccgatattaagaccgcttttagtgactgcacatctaagattggcagacgagactgtttgacccaggcctgcagtgccctgaccggaaagggggtccgtgaggggatagagtggatggtgaagtgcgtggtgcgcaacgttcatagaccccctaggcaaagggacatcacgtag

SEQ ID NO: 94400 - DNA, 1622 bp, Artificial Sequence
  derived and/or modified sequence
gaggcccgaggggcggcccaggactcgaggatgtacacgctgctgtcgggcttgtacaagtacatgtttcagaaggacgagtactgcatcctgatcctgggcctggacaatgctgggaagacgaccttcctggagcagtcgaaaacccgatttaacaagaactacaaggggatgagtctatccaaaatcaccaccaccgtgggcctaaacatcggcactgtggatgtgggaaaggctcggctcatgttctgggacttaggagggcaggaagagctgcagtctttgtgggacaagtattatgcggagtgtcacggcgtcatctacgtcattgactccaccgacgaggagaggctggctgagtccaagcaggcgtttgagaaggtggtgaccagcgaggcgctgtgcggtgtccccgtcttggtgctggccaacaagcaggatgtggagacgtgcctctcaatccctgacatcaagacggccttcagcgactgcaccagcaagatcggcaggcgagattgcctgacccaggcctgctcggccctcacaggcaaaggggtgcgcgagggcatcgagtggatggtgaagtgtgtcgtgcggaatgtgcaccggccgccgcggcagagggacatcacgtaggcgcagccgcgctgccgtcgggacggctggtcccctggtgctggaggagtggcctcctgttggctcccatgctgctgatctggggggtgggtttgctttgctttggggttcttctatttactttgttttctcgaagacaaactttcctctatgtctggaaaagcgtaggcatccggaggctttggaggggagtctggcagcccggctggcccaggccctgcagcggcagcctttccacagggcgcagcggcggcctttcgaggccctttctggggggtctgagggagacctggttgggaattggggctccagtgctcaggctggcttgggctgcatgaggacagccctgtgggaccctcgggagaccccgtggctgtctccgccccatcgaggaggaggcccgtcagccatggctgccatctggcttctgccctgtgaccccgtgaccccgtgaccccgaagtggtctggggctgatcttgccttgaggaagacccaggccatgttcccaaaggccagcgggggccctggattgtgatgcagcctcgggacagggctgaggcctgcgggggaagacctataccccacgcctgggcctggcttcacctcaccctaatcccccgggagggagctgactgatgcaaaaagctgagggggcctgctgggagtggctgtttttatgccccagccccgcaagttggggagtgtttgtgggggtccagagccctcccccagccaggagagaacctcccggaggggttctctgtggggccctgtgtcccctgctcgggagtaaggctggtcctggggtcctccctgcacggaccccactgggcctgccgagtgctgtgttcttcctcagtctggctgtgggcaggagcggcctgcccagtgtcacccagggtgagtgcaaaataaagacggcgagtgtggctctgtccatcccttccctcctggagggtggaggctcctggctgttggacacgg

SEQ ID NO: 94401 - DNA, 606 bp, Artificial Sequence
  derived and/or modified sequence
atgtacaccctgctgagcggcctgtacaagtacatgttccagaaggacgagtactgcatcctgatcctgggcctggacaacgccggcaagaccaccttcctggagcagagcaagaccagattcaacaagaactacaagggcatgagcctgagcaagatcaccaccaccgtgggcctgaacatcggcaccgtggacgtgggcaaggccagactgatgttctgggacctgggcggccaggaggagctgcagagcctgtgggacaagtactacgccgagtgccacggcgtgatctacgtgatcgacagcaccgacgaggagagactggccgagagcaagcaggccttcgagaaggtggtgaccagcgaggccctgtgcggcgtgcccgtgctggtgctggccaacaagcaggacgtggagacctgcctgagcatccccgacatcaagaccgccttcagcgactgcaccagcaagatcggcagaagagactgcctgacccaggcctgcagcgccctgaccggcaagggcgtgagagagggcatcgagtggatggtgaagtgcgtggtgagaaacgtgcacagaccccccagacagagagacatcacctag

SEQ ID NO: 94402 - protein, 373 aa, Artificial Sequence [sequence omitted]

SEQ ID NO: 94403 - protein, 829 aa, Artificial Sequence
  derived and/or modified sequence
VEEFIKLEQHRVEEEHRVEKVHRVIEVFEAEEVEVFEKPKAPPKGPEISEKIIPPKKPPTKVVPRKEPPAKVPEVPKKIVVEEKVRVPEEPRVPPTKAPEVPKKIVPEEKVREAVLKKPEVPPAKVPGMPKKSVQEEKSPIVISEDTEMYIYEASEEAVLEEKVLVTQPQKTKPKLAKVPEPPKKVVPEDKIYVTIPKKRETPATKEPDTTRGIFPEVEPPEAIPEIPEHPPTEEFEVFKEVIPEGETPIVKRRKTPSPTAPEAMKEVVPEMKIFEDVPEEPETPRMKTPEAPQEIIPAKTVPSKKREPPSVKVPEALQEIVPEKKTLVVPLRKPEVLPDEVPEALREVVPEKKVHPPQRAEVVPVKVHEAPKEIIPEKKVSVVPPKKPEVPPVKVPEASKEVIREEKVPLAPPKEPEVPPVKVPEPPKEVVPEKKAPVAPPKEPEVPPVKVPEAPKEVVPEKKVPVPPPKKPEVPPTKVPEVPKAAVPEKKLPEAIPPKPESPPPEVPEVLPPKEVVPEKKVPVPPAKKPEAPPPKVPEAPKEVVLEKKASVAVPKKPEAPRAKVPEAAQEVVPEKKIPKAPIKKPEAPAVTVPEVPQEIVPEKKTLVLPKKPEVPPVTVPEAPKEVVLEKKVPSAPPKKPEVPPVKVPEAPKEVVPEKKVPVPPPKKPEVPPTKVPEVPKAAVPEKKVPEAIPPKPESPPPEVPEVLPPKEVVPEKKVPVPPAKKPEAPPPKVPEAPKEVVLEKKASVAVPKKPEAPRAKVPEAAQEVVPEKKIPKAPIKKPEAPAVTVPEVPQEAAEKEIPVAPPKKPEAPIVPVPEAQEVVPEKK

SEQ ID NO: 94404 - DNA, 21 bp, Artificial Sequence
  derived and/or modified sequence
cggcccccccccccccccccc

SEQ ID NO: 94405 - DNA, 21 bp, Artificial Sequence
  derived and/or modified sequence
ggggggggggggggggggccg

SEQ ID NO: 94406 - DNA, 1419 bp, Artificial Sequence
  derived and/or modified sequence
atgtacatctacgaggccagcgaggaggccgtgctggaggagaaggtgctggtgacccagccccagaagaccaagcccaagctggccaaggtgcccgagccccccaagaaggtggtgcccgaggacaagatctacgtgaccatccccaagaagagagagacccccgccaccaaggagcccgacaccaccagaggcatcttccccgaggtggagccccccgaggccatccccgagatccccgagcacccccccaccgaggagttcgaggtgttcaaggaggtgatccccgagggcgagacccccatcgtgaagagaagaaagacccccagccccaccgcccccgaggccatgaaggaggtggtgcccgagatgaagatcttcgaggacgtgcccgaggagcccgagacccccagaatgaagacccccgaggccccccaggagatcatccccgccaagaccgtgcccagcaagaagagagagccccccagcgtgaaggtgcccgaggccctgcaggagatcgtgcccgagaagaagaccctggtggtgcccctgagaaagcccgaggtgctgcccgacgaggtgcccgaggccctgagagaggtggtgcccgagaagaaggtgcaccccccccagagagccgaggtggtgcccgtgaaggtgcacgaggcccccaaggagatcatccccgagaagaaggtgagcgtggtgccccccaagaagcccgaggtgccccccgtgaaggtgcccgaggccagcaaggaggtgatcagagaggagaaggtgcccctggccccccccaaggagcccgaggtgccccccgtgaaggtgcccgagccccccaaggaggtggtgcccgagaagaaggcccccgtggccccccccaaggagcccgaggtgccccccgtgaaggtgcccgaggcccccaaggaggtggtgcccgagaagaaggtgcccgtgcccccccccaagaagcccgaggtgccccccaccaaggtgcccgaggtgcccaaggccgccgtgcccgagaagaagctgcccgaggccatcccccccaagcccgagagccccccccccgaggtgcccgaggtgctgccccccaaggaggtggtgcccgagaagaaggtgcccgtgccccccgccaagaagcccgaggcccccccccccaaggtgcccgaggcccccaaggaggtggtgctggagaagaaggccagcgtggccgtgcccaagaagcccgaggcccccagagccaaggtgcccgaggccgcccaggaggtggtgcccgagaagaagatccccaaggcccccatcaagaagcccgaggcccccgccgtgaccgtgcccgaggtgccccaggagatcgtgcccgagaagaagaccctggtgctgcccaagaagcccgaggtgccccccgtgacctag

SEQ ID NO: 94407 - DNA, 2490 bp, Artificial Sequence
  derived and/or modified sequence
gtggaggagttcatcaagctggagcagcacagagtggaggaggagcacagagtggagaaggtgcacagagtgatcgaggtgttcgaggccgaggaggtggaggtgttcgagaagcccaaggccccccccaagggccccgagatcagcgagaagatcatcccccccaagaagccccccaccaaggtggtgcccagaaaggagccccccgccaaggtgcccgaggtgcccaagaagatcgtggtggaggagaaggtgagagtgcccgaggagcccagagtgccccccaccaaggcccccgaggtgcccaagaagatcgtgcccgaggagaaggtgagagaggccgtgctgaagaagcccgaggtgccccccgccaaggtgcccggcatgcccaagaagagcgtgcaggaggagaagagccccatcgtgatcagcgaggacaccgagatgtacatctacgaggccagcgaggaggccgtgctggaggagaaggtgctggtgacccagccccagaagaccaagcccaagctggccaaggtgcccgagccccccaagaaggtggtgcccgaggacaagatctacgtgaccatccccaagaagagagagacccccgccaccaaggagcccgacaccaccagaggcatcttccccgaggtggagccccccgaggccatccccgagatccccgagcacccccccaccgaggagttcgaggtgttcaaggaggtgatccccgagggcgagacccccatcgtgaagagaagaaagacccccagccccaccgcccccgaggccatgaaggaggtggtgcccgagatgaagatcttcgaggacgtgcccgaggagcccgagacccccagaatgaagacccccgaggccccccaggagatcatccccgccaagaccgtgcccagcaagaagagagagccccccagcgtgaaggtgcccgaggccctgcaggagatcgtgcccgagaagaagaccctggtggtgcccctgagaaagcccgaggtgctgcccgacgaggtgcccgaggccctgagagaggtggtgcccgagaagaaggtgcaccccccccagagagccgaggtggtgcccgtgaaggtgcacgaggcccccaaggagatcatccccgagaagaaggtgagcgtggtgccccccaagaagcccgaggtgccccccgtgaaggtgcccgaggccagcaaggaggtgatcagagaggagaaggtgcccctggccccccccaaggagcccgaggtgccccccgtgaaggtgcccgagccccccaaggaggtggtgcccgagaagaaggcccccgtggccccccccaaggagcccgaggtgccccccgtgaaggtgcccgaggcccccaaggaggtggtgcccgagaagaaggtgcccgtgcccccccccaagaagcccgaggtgccccccaccaaggtgcccgaggtgcccaaggccgccgtgcccgagaagaagctgcccgaggccatcccccccaagcccgagagccccccccccgaggtgcccgaggtgctgccccccaaggaggtggtgcccgagaagaaggtgcccgtgccccccgccaagaagcccgaggcccccccccccaaggtgcccgaggcccccaaggaggtggtgctggagaagaaggccagcgtggccgtgcccaagaagcccgaggcccccagagccaaggtgcccgaggccgcccaggaggtggtgcccgagaagaagatccccaaggcccccatcaagaagcccgaggcccccgccgtgaccgtgcccgaggtgccccaggagatcgtgcccgagaagaagaccctggtgctgcccaagaagcccgaggtgccccccgtgaccgtgcccgaggcccccaaggaggtggtgctggagaagaaggtgcccagcgccccccccaagaagcccgaggtgccccccgtgaaggtgcccgaggcccccaaggaggtggtgcccgagaagaaggtgcccgtgcccccccccaagaagcccgaggtgccccccaccaaggtgcccgaggtgcccaaggccgccgtgcccgagaagaaggtgcccgaggccatcccccccaagcccgagagccccccccccgaggtgcccgaggtgctgccccccaaggaggtggtgcccgagaagaaggtgcccgtgccccccgccaagaagcccgaggcccccccccccaaggtgcccgaggcccccaaggaggtggtgctggagaagaaggccagcgtggccgtgcccaagaagcccgaggcccccagagccaaggtgcccgaggccgcccaggaggtggtgcccgagaagaagatccccaaggcccccatcaagaagcccgaggcccccgccgtgaccgtgcccgaggtgccccaggaggccgccgagaaggagatccccgtggccccccccaagaagcccgaggcccccatcgtgcccgtgcccgaggcccaggaggtggtgcccgagaagaagtag

SEQ ID NO: 94408 - DNA, 1419 bp, Artificial Sequence
  derived and/or modified sequence
atgtacatctacgaggcttccgaggaagcggttctggaggagaaggttcttgtgacccagccccaaaaaaccaaacctaaactggctaaagttcctgagcctccaaaaaaggtggtccccgaggacaagatttatgtcaccattcccaagaagcgagagacccccgccacaaaagaaccggatactaccaggggaattttcccagaggtcgaacctcctgaggccattccggagattccagagcatccacccacggaggaattcgaagtgttcaaagaagtgattccagaaggtgaaactccaattgtaaagcgaagaaagactccttcccctactgcaccggaagcaatgaaggaagtggtgcctgagatgaagatttttgaagatgtcccagaagagcctgagacgcccaggatgaaaacacctgaggccccacaagaaatcattcctgccaagaccgtcccatccaagaagagagaacctccttcagtgaaagtgcctgaagcactgcaggagatagtgcccgagaaaaagacactcgtggtgccccttagaaagcctgaagtgctgcccgacgaagtgccagaggccctgcgcgaagtggtgcctgagaagaaggtacaccccccacagcgagccgaggtcgtgcctgtaaaggtccacgaggccccaaaggaaattatccctgaaaagaaggtatcagtcgttcccccgaaaaaaccagaggtgcccccagtaaaggtgcctgaggcttctaaggaggtcatacgagaggagaaagtacctctcgccccccctaaggagcccgaggtacctcctgttaaagttcctgagcccccgaaagaggttgtccctgagaagaaagccccagtggcccctcctaaagagcccgaagtgccgcccgtcaaggttccagaagccccaaaagaagttgtgccagaaaaaaaagttcccgtgccccctcccaaaaagccagaagtaccacccactaaagtccctgaggtgcccaaagccgcagtgccagaaaagaagctacccgaggccataccacccaagccagagtcacctcctcctgaggtgccagaggttctgcctcctaaggaggtggtgcccgaaaagaaagtgccggtgccacccgctaagaaacctgaggcacccccccccaaggtccccgaagccccaaaagaagtggtgctggagaaaaaggccagcgttgccgttccgaagaagccggaagctcccagagccaaggtccccgaggccgctcaagaggtcgttccagaaaagaagatccctaaagccccaattaagaagcctgaggcgccagctgttaccgtccccgaggtaccacaggaaatcgttcccgagaagaaaaccctcgtgttgcctaagaagcctgaggttccacctgttacctag

SEQ ID NO: 94409 - DNA, 2490 bp, Artificial Sequence
  derived and/or modified sequence
gttgaggagttcatcaaacttgagcaacatagagttgaggaggagcatagggttgaaaaagttcaccgggtaattgaagtgtttgaggccgaggaggttgaggttttcgaaaagcccaaagcccctccgaagggaccagagatctctgagaaaatcatcccccctaaaaagcctccaaccaaggtagtgccacgaaaggaaccacccgcgaaggtgcctgaggtgccaaagaaaatagttgtggaagagaaagtacgggtgcccgaggaacctagggtcccacccaccaaagcaccggaagtccctaagaaaatcgttccagaggaaaaggttcgggaggccgtcttgaaaaagccagaagtcccccctgctaaagtgcctggaatgcccaagaaatccgtacaagaggaaaaaagccccattgttatttctgaggacacagaaatgtatatttatgaggcgtccgaggaggccgtcctggaagagaaagtattggtcactcaaccacagaagaccaaacctaaactcgccaaagtgcctgaacctcctaaaaaagtggtaccggaggataagatctatgtaactatccctaaaaaacgggagactccagccaccaaagaacccgacacaaccagaggcatattccctgaggttgaaccccctgaggctatccccgagatcccagagcatccccccactgaagagtttgaggtcttcaaagaagtgattccagagggcgagacccctattgttaaacgtagaaaaactcccagtcccactgcgcccgaggcgatgaaggaagtcgtgcctgagatgaaaattttcgaggacgtgccagaggagccagagactcctagaatgaagacccccgaggcccctcaggaaataatccccgccaagacagtgcctagcaaaaagagggagcctccatcagttaaggtgccagaagccctgcaggagattgtgccagaaaagaagacactagtggtgcctctaaggaaacctgaagtgctgcctgatgaggttccggaagccctaagggaggtggtccctgagaagaaggtccaccctcctcagcgggccgaagtggtccctgttaaagtgcacgaagctcctaaggaaatcattcccgaaaaaaaggttagtgtggtccctccaaagaagccagaagtgcctccagtaaaggtgccggaggcaagcaaagaggttataagggaggagaaggtgccgctcgcccccccgaaggagcccgaggtgccgcccgtaaaagtcccagagccacccaaagaggtggtacccgaaaagaaggccccagtggcccctccgaaggaacctgaggtcccaccagtgaaagtgccagaagcaccaaaggaggtcgtgcccgagaaaaaagtccccgtgcctccccccaagaaaccagaagttccccccacaaaagtgccagaggtaccaaaggctgccgtgcctgagaagaagcttcccgaggcaatccctccaaaaccggagagcccccccccagaggttcccgaggtcctcccccccaaggaggtagttcctgaaaagaaggttcctgtcccccctgcgaaaaagcctgaagccccaccacctaaagtgcctgaagctcctaaggaggtcgttttggaaaaaaaagcatcagtggccgtacctaagaagcccgaggctcctagggctaaggtccccgaagccgcccaggaagtagtacccgaaaaaaagatacccaaagcacccataaagaaacctgaagccccagccgtcaccgtcccagaggttccacaagagattgtgcccgagaagaagactcttgtgctaccaaagaagccggaggtcccccccgtgaccgttcccgaagctccaaaagaggtggttctcgaaaagaaggtgcccagtgcaccgcccaagaagcccgaagtccctcccgtgaaagtccccgaggcacctaaagaagtcgtgcctgaaaagaaggtgcccgtgcccccaccgaagaaaccggaggtcccccctactaaagttccggaagttcctaaggccgctgtgccggagaagaaagttccggaggctatccccccaaaaccagaatctccaccgccagaggtaccagaggtcttgccaccgaaggaagtcgtgccggaaaaaaaggtaccagtcccccccgccaaaaagcctgaagcacccccccctaaggtacctgaggcacccaaagaggtcgtcttggaaaaaaaggccagcgtcgccgtgcctaagaagccagaagctccacgggccaaagtgcccgaagcggctcaagaagtcgttcccgagaagaagatccctaaagcacctattaaaaagcctgaagccccagcagtcacagtccccgaagtgccacaggaagcggcagagaaagagatcccagtggctccccctaaaaagccggaggcacccatcgttcccgtgccagaagcccaggaggtcgtgcccgagaaaaagtag

SEQ ID NO: 94410 - DNA, 1419 bp, Artificial Sequence
  derived and/or modified sequence
atgtacatctatgaggccagcgaggaggccgtgctggaggagaaggtgctggtgacccagccccagaagaccaagcccaagctggccaaggtgcctgagccccccaagaaggtggtgcctgaggacaagatctacgtgaccatccccaagaagcgggagaccccagccaccaaggagccagacaccacccggggcatcttccctgaggtggagcccccagaggccatccctgagatccctgagcaccccccaacagaggagtttgaggtgttcaaggaggtgattcctgagggggagacccccatcgtgaagaggaggaagacccccagccccacagcccctgaggccatgaaggaggtggtgcctgagatgaagatctttgaagatgtgcctgaggagcctgagacccccaggatgaagaccccagaggccccccaggagatcatcccagccaagacagtgcccagcaagaagcgggagcccccatctgtgaaggtgcctgaggccctgcaggagatcgtgcctgagaagaagaccctggtggtgcccctgaggaagccagaggtgctgcctgatgaggtgcctgaggccctgcgggaggtggtgcctgagaagaaggtgcaccccccccagagagctgaggtggtgcctgtgaaggtgcatgaggcccccaaggagatcatccctgagaagaaggtgtctgtggtgccccccaagaagccagaggtgccccctgtgaaggtgcctgaggccagcaaggaggtgatccgggaggagaaggtgcccctggccccacccaaggagcctgaggtgccccctgtgaaggtgcctgagccccccaaggaggtggtgcctgagaagaaggcccctgtggccccacccaaggagcctgaggtgccccctgtgaaggtgcctgaggcccccaaggaggtggtgcctgagaagaaggtgcctgtgcccccacccaagaagccagaggtgccccccaccaaggtgcctgaggtgcccaaggctgctgtgcctgagaagaagctgcctgaggccatcccccccaagccagagagccccccacctgaggtgcctgaggtgctgccccccaaggaggtggtgcctgagaagaaggtgcctgtgcccccagccaagaagccagaggcccccccacccaaggtgcctgaggcccccaaggaggtggtgctggagaagaaggcctctgtggccgtgcccaagaagccagaggccccccgggccaaggtgcctgaggccgcccaggaggtggtgcctgagaagaagatccccaaggcccccatcaagaagccagaggccccagctgtgacagtgcctgaggtgccccaggagatcgtgcctgagaagaagaccctggtgctgcccaagaagccagaggtgccccctgtgacctag

SEQ ID NO: 94411 - DNA, 2490 bp, Artificial Sequence
  derived and/or modified sequence
gtggaggagttcatcaagctggagcagcaccgggtggaggaggagcaccgggtggagaaggtgcaccgggtgattgaggtgtttgaggccgaggaggtggaggtgtttgagaagcccaaggccccacccaagggccctgagatcagcgagaagatcatcccccccaagaagccacccaccaaggtggtgcccaggaaggagcccccagccaaggtgcctgaggtgcccaagaagatcgtggtggaggagaaggtgcgggtgcctgaggagccccgggtgccccccaccaaggcccctgaggtgcccaagaagatcgtgcctgaggagaaggtgcgggaggccgtgctgaagaagccagaggtgcccccagccaaggtgcccggcatgcccaagaagtctgtgcaggaggagaagagccccatcgtcatcagcgaggacacagagatgtacatctatgaggccagcgaggaggccgtgctggaggagaaggtgctggtgacccagccccagaagaccaagcccaagctggccaaggtgcctgagccccccaagaaggtggtgcctgaggacaagatctacgtgaccatccccaagaagcgggagaccccagccaccaaggagccagacaccacccggggcatcttccctgaggtggagcccccagaggccatccctgagatccctgagcaccccccaacagaggagtttgaggtgttcaaggaggtgattcctgagggggagacccccatcgtgaagaggaggaagacccccagccccacagcccctgaggccatgaaggaggtggtgcctgagatgaagatctttgaagatgtgcctgaggagcctgagacccccaggatgaagaccccagaggccccccaggagatcatcccagccaagacagtgcccagcaagaagcgggagcccccatctgtgaaggtgcctgaggccctgcaggagatcgtgcctgagaagaagaccctggtggtgcccctgaggaagccagaggtgctgcctgatgaggtgcctgaggccctgcgggaggtggtgcctgagaagaaggtgcaccccccccagagagctgaggtggtgcctgtgaaggtgcatgaggcccccaaggagatcatccctgagaagaaggtgtctgtggtgccccccaagaagccagaggtgccccctgtgaaggtgcctgaggccagcaaggaggtgatccgggaggagaaggtgcccctggccccacccaaggagcctgaggtgccccctgtgaaggtgcctgagccccccaaggaggtggtgcctgagaagaaggcccctgtggccccacccaaggagcctgaggtgccccctgtgaaggtgcctgaggcccccaaggaggtggtgcctgagaagaaggtgcctgtgcccccacccaagaagccagaggtgccccccaccaaggtgcctgaggtgcccaaggctgctgtgcctgagaagaagctgcctgaggccatcccccccaagccagagagccccccacctgaggtgcctgaggtgctgccccccaaggaggtggtgcctgagaagaaggtgcctgtgcccccagccaagaagccagaggcccccccacccaaggtgcctgaggcccccaaggaggtggtgctggagaagaaggcctctgtggccgtgcccaagaagccagaggccccccgggccaaggtgcctgaggccgcccaggaggtggtgcctgagaagaagatccccaaggcccccatcaagaagccagaggccccagctgtgacagtgcctgaggtgccccaggagatcgtgcctgagaagaagaccctggtgctgcccaagaagccagaggtgccccctgtgacagtgcctgaggcccccaaggaggtggtgctggagaagaaggtgcccagcgccccacccaagaagccagaggtgccccctgtgaaggtgcctgaggcccccaaggaggtggtgcctgagaagaaggtgcctgtgcccccacccaagaagccagaggtgccccccaccaaggtgcctgaggtgcccaaggctgctgtgcctgagaagaaggtgcctgaggccatcccccccaagccagagagccccccacctgaggtgcctgaggtgctgccccccaaggaggtggtgcctgagaagaaggtgcctgtgcccccagccaagaagccagaggcccccccacccaaggtgcctgaggcccccaaggaggtggtgctggagaagaaggcctctgtggccgtgcccaagaagccagaggccccccgggccaaggtgcctgaggccgcccaggaggtggtgcctgagaagaagatccccaaggcccccatcaagaagccagaggccccagctgtgacagtgcctgaggtgccccaggaggccgctgagaaggagatccctgtggccccacccaagaagccagaggcccccatcgtgcctgtgcctgaggcccaggaggtggtgcctgagaagaagtag

SEQ ID NO: 94412 - DNA, 1419 bp, Artificial Sequence
  derived and/or modified sequence
atgtacatctacgaggccagcgaggaggccgtgctggaggagaaggtgctggtgacccagcctcagaagactaaaccaaaactggcgaaggttcccgagcccccgaaaaaggtggtgcccgaggataagatttacgtgacaatacctaagaagcgcgagacacctgccacaaaggaacccgacactacaagaggcatcttccccgaggtggagccacctgaagctatacccgaaatccctgagcacccaccaacggaagagtttgaagttttcaaggaggtcattcccgaaggagagacacccattgtcaaacgcaggaagacgcccagtcctaccgcccctgaagcaatgaaggaagtcgtgcccgaaatgaagatattcgaagacgtgccggaagagccggagaccccccgcatgaagacacctgaggccccacaggaaatcatacctgcgaaaaccgtgcccagcaaaaagagggagccgcccagcgtcaaggtgcccgaggccctccaagagattgtgcctgaaaaaaagactctcgtggttcctctgagaaaacctgaggttcttcctgatgaagttccagaagcactccgtgaggtggtcccagagaaaaaggtccacccaccacagagggctgaggtggtcccagtgaaagtccacgaggctcctaaagaaatcattcctgaaaaaaaagtttcggtggtgccccccaaaaaacctgaggttccacctgtcaaggtcccggaagcttcaaaagaagtcatcagggaagaaaaagtcccactggccccacccaaggaacccgaggttcctcccgtgaaggtgcccgaacctccaaaagaagtggtgcccgaaaaaaaagcccccgtggctccacctaaggagccagaggtgccccccgttaaggttcccgaggcccctaaagaagtggtacccgaaaaaaaggtgcccgtgcccccgccaaagaagcccgaggtcccgcccacaaaggtgccagaggttcccaaggcggctgtccctgagaagaagctgccggaagcgattccaccaaaaccagaaagcccaccaccagaggtacctgaagtgctcccacccaaagaggtcgttcccgagaaaaaggtgccagtgcctccagccaagaagcctgaggcccctccccctaaagtgcctgaggccccaaaagaggtggttctggaaaagaaagcatctgtcgccgtgcccaagaagcctgaagctcccagagctaaggttcctgaagctgcacaggaagtggtgcctgagaagaagatccccaaggctcctataaaaaaaccagaagcacccgcagtcaccgttccggaggtgccgcaggagatagtgcccgagaagaagacacttgtcttgcccaagaaacccgaggtgccgcctgttacatag

SEQ ID NO: 94413 - DNA, 2490 bp, Artificial Sequence
  derived and/or modified sequence
gtggaggagttcatcaagctggagcagcaccgggtggaggaggagcacagagtcgagaaggtgcatcgggtgatagaagtgtttgaagcagaagaggtagaagtcttcgagaaaccaaaggccccacctaaaggtcccgaaatctcagagaagatcataccgcccaaaaagccaccaaccaaagttgtgcctaggaaggagccacccgccaaagttcccgaagtgcctaagaagatcgtggtcgaggagaaagtgcgcgttcctgaggaacctagagtgccacccactaaagctcccgaggtcccaaaaaaaatcgtgcctgaagaaaaggtgcgcgaagctgttctgaagaagcctgaagtgcctcccgctaaggtgcctggaatgcctaagaagtccgtgcaggaggaaaagtctccgatcgttatctcagaggatacggaaatgtatatttacgaggcgtccgaagaagcagttctcgaagagaaagttctggtgactcaaccgcagaagacgaagccaaagctggccaaagtccctgaaccacctaaaaaggtggtgccagaggataaaatttacgtcactattcctaagaaacgggagacacccgcaacaaaggagccggatactacacgcggcattttcccggaagttgagcctcccgaagccatacccgagatccctgaacatcctccgacagaggaattcgaagttttcaaggaagtcattcctgagggggagacacccatcgtgaaacgcagaaagacaccgtcacctaccgctcccgaagctatgaaggaagtggtccccgagatgaaaatctttgaagacgttcctgaagagcctgagaccccgaggatgaagactccagaggccccgcaagagatcatccccgcgaagacagtgccttcaaagaaacgtgaacccccgtcagtgaaggtgccggaggcactgcaggagatcgtcccagaaaagaaaactttggttgttcccttgcgaaaacctgaggtactgcccgacgaagtcccagaagctctgagggaagtggttcccgaaaaaaaggtgcatcctcctcagagagcagaggttgtgccagtgaaggtgcacgaggcacctaaagagatcatcccggagaaaaaggtgagcgtggtgcctcccaagaagccagaagtgcctcctgttaaggtgccggaagcatccaaggaagtgattcgagaagaaaaagtgccactggcccccccaaaagaaccagaggttccccccgttaaagtgcccgagcctcccaaggaggtcgtaccagagaagaaggctccagtggctccaccaaaggaacctgaagttccgcctgtcaaagtccctgaggctcccaaggaagtggtgcccgagaaaaaggtgcctgtgccaccacctaagaagcctgaggtcccacccacaaaggtgcccgaagtgcctaaggccgctgtgcctgaaaaaaaacttccagaggccataccccccaagcccgagtcaccgccgcccgaggtacctgaggtcctgcctccaaaggaggtggtcccagaaaaaaaagtgcccgtgcccccggctaagaagccagaagctcctccgcctaaggtgcccgaggcccctaaggaagttgtccttgagaagaaagctagtgtggctgtgccaaagaaacccgaagctcctagagctaaggtaccagaagccgctcaggaggtcgtgccagagaaaaagataccgaaggccccgattaaaaaacctgaggccccagctgttaccgtgcctgaggtcccgcaggagattgttcccgagaagaaaacgctggtgctgcccaagaagccagaagtcccacctgtgacggtgcccgaggcccccaaagaggtggttctggagaagaaggtaccctcggctcctcctaagaagcctgaggtacctccggtcaaagtgcctgaagctcctaaagaggtcgtacctgaaaaaaaagtgccggtgccccctccaaaaaaacctgaagtaccccccacaaaagtacccgaagtcccaaaagcagcagtccctgaaaagaaggtgcctgaagctatcccaccaaagccagagagccctccccccgaagtgccagaggtactgcctccaaaggaggttgtgccagagaaaaaagttccagtccccccggcgaaaaaaccagaagccccacctccaaaagttcccgaagcacctaaagaagttgtgctcgagaaaaaagcgagcgtcgccgtgcctaaaaagcctgaggcgcctagagctaaggtccccgaggccgcacaggaagtcgttccagagaaaaagatccccaaggcgcccattaaaaagccagaggctccagccgtaactgtacctgaagtcccgcaggaggctgccgaaaaggagattccagtcgctccacctaagaaacctgaagctcctatcgtacccgtgccggaggcacaagaagtggttccggagaagaaatag

SEQ ID NO: 94414 - DNA, 1419 bp, Artificial Sequence
  derived and/or modified sequence
atgtacatctacgaagcgagtgaggaagcagtcctagaggagaaggtgcttgtcacgcaaccccagaagacgaagcccaagctggccaaggtgcccgagcctcctaagaaagtcgtcccagaggataagatctatgtgaccattcctaaaaagagggaaacccccgctacgaaggagccagacaccactaggggcattttccctgaggtggagccccctgaggccattccggagattcctgaacatccccctacagaggaattcgaagtgttcaaagaggttatccctgagggggagactcccatcgttaaacgaaggaaaaccccctctcccacagcccctgaagccatgaaggaggtggtacctgaaatgaagatcttcgaggacgtgcccgaggaacccgagaccccccgaatgaaaacgcccgaagctccccaagagatcatccctgcaaagaccgtgccaagtaaaaagcgcgaaccaccttctgtaaaggttccagaggccctgcaggagattgttcccgagaaaaaaacactagtcgtgccgctcaggaagccggaagtcttaccagacgaggtcccagaggcacttcgcgaggttgtgccagaaaaaaaggtgcaccccccacagagagccgaggtggttcccgttaaggtgcatgaggccccaaaggaaatcatacccgagaagaaggtcagtgtggtgccgccaaagaaaccagaagtgccaccggttaaagtccccgaggcaagcaaggaagttattcgtgaagaaaaggtacccttagcaccacccaaggaacccgaggtcccccctgtgaaagtaccagagccgccaaaggaggtcgtccccgagaagaaggctccggtagccccacctaaggaacccgaggttccacctgtgaaggtaccagaggcaccgaaagaagtcgtcccagaaaaaaaggtccctgtgcccccacccaaaaaacccgaagttccaccaaccaaggtcccagaggtgcctaaggctgctgtgccagagaaaaagctgccagaagccatacctcctaagcccgagtcacccccaccagaggtgcccgaggtcttacccccaaaggaggttgtgcccgagaagaaggtgcccgttcctccagcaaagaaaccagaggctcctccaccaaaggttccagaagcccctaaagaagtcgttctggagaagaaagcctcagtcgccgtgcctaaaaaacccgaagcaccacgtgcaaaggtgcccgaagcagctcaggaggtcgttcccgaaaagaagatccccaaggcccctatcaagaagcctgaagccccagccgtcacggttccagaggtgccacaggagattgtgccagagaagaagaccctggtacttcccaaaaaaccagaggtccccccagtcacctag

SEQ ID NO: 94415 - DNA, 2490 bp, Artificial Sequence
  derived and/or modified sequence
gtcgaggaatttattaaactagagcagcatcgggttgaggaggaacaccgggtagaaaaagtgcaccgcgtcatcgaagtattcgaggctgaggaggtggaggtcttcgagaagccaaaagcccctccaaaggggcctgaaatctccgaaaagatcattccccctaagaaaccccctactaaagtagtccccaggaaggagcccccagctaaagtccctgaagtcccaaaaaaaatcgtggtcgaagagaaagttagagttccagaggaaccaagagtgcctccaaccaaggccccagaagtacccaagaaaatcgtgcctgaggaaaaagtccgagaagccgtgctgaagaaaccagaagtgcccccagccaaagttcccggaatgccaaagaagagtgtgcaggaggagaagtccccaatcgtgatttccgaggacacggagatgtatatctacgaagcgtctgaagaggccgtcctggaggaaaaggtgctggtaacccagcctcagaagaccaagcctaagctggcaaaggtcccagaacccccaaaaaaggtggttcccgaagacaaaatttacgtgacaatcccaaaaaaacgagagacaccagctactaaggaaccagatacaacacgcggtatctttcctgaggttgagccccctgaggctatcccagaaatccccgaacatccaccgactgaggaattcgaggtttttaaggaggtgatccccgaaggcgaaactcctatcgtgaaacggcgaaagaccccctccccaactgctcctgaagccatgaaagaggtggttccagaaatgaaaatcttcgaagacgtgcctgaagaacccgagacaccgcgaatgaaaactccagaggcccctcaggaaatcatccccgctaagacagtaccctccaagaagagggagccccctagcgtgaaagtccccgaggctctgcaggaaatcgtgcctgagaaaaagacactggtggtgccattgaggaagcctgaagtcctccctgacgaagtgccagaagcactgcgcgaggtcgtccccgagaagaaagtgcacccaccacagcgagccgaggtggttccggtgaaagtgcatgaggcaccgaaagagatcatacccgaaaagaaagtgtcagtggtgcccccaaagaaaccggaggtgccccctgtgaaagtccctgaagcttccaaggaggtaatcagggaggaaaaggttccgttggccccacctaaggaacccgaggtgccaccagtcaaggtccccgagccccctaaagaagtggtcccagagaagaaggctcctgtcgccccacccaaagaacctgaagtgccccctgtgaaagtgcccgaggctccaaaggaagtggtccccgagaaaaaggtacctgtgccgcctccaaagaagcctgaggtgccaccgacaaaggtgccggaagtccccaaggccgcagtcccagagaagaagctccccgaggcaatcccacctaaacctgagagccctcctcctgaggtgcccgaggtactccctccgaaagaggtcgtgccagagaagaaagtgcccgtcccacccgctaagaaacccgaggctccaccgcctaaggtaccagaggcaccaaaggaggtggtgcttgagaagaaagcgtccgtagctgtgcccaaaaagcctgaagctcctcgggctaaagtacccgaggctgctcaggaagtcgtgccggagaaaaagatccccaaggcgcctattaaaaaacccgaggcacccgctgttacggtgcctgaagtccctcaggaaatcgtgcccgaaaagaaaactctggtactgcctaagaagcctgaagttccccctgtcacagtgcccgaggctcccaaggaggtcgtcctggagaagaaggtgcccagcgcgccaccaaagaaacccgaagtcccccctgttaaagtcccagaggccccaaaggaggtggtgccagagaagaaagtgcccgtgccgcctccaaagaaaccagaggtacctcccacaaaggtgcccgaggtgccaaaggccgctgttccagagaagaaggtcccagaagcgattccacctaaacctgaatcacccccaccagaagtgcctgaagtcctgccccctaaagaggtggtgcccgaaaaaaaggtacctgtacctccggctaagaagccggaggcacctcctccgaaggttccagaggcgcctaaagaggtggtcctggagaagaaagcctctgtcgccgtgcctaagaagcccgaagccccacgagccaaagtcccagaagccgcacaagaggtcgtaccagaaaaaaagattcccaaggcgcctatcaaaaaacctgaggcccctgccgtcacagttcccgaggtacctcaagaggccgcagagaaggagatcccagtagctcctccaaaaaaacccgaggcgccaatcgtccctgtgcccgaagcccaggaggtggttccagagaagaaatag

SEQ ID NO: 94416 - DNA, 2483 bp, Artificial Sequence
  derived and/or modified sequence
aagaattcatcaaattagaacaacatagagttgaagaagaacacagagttgaaaaagttcatagggtaatagaagtttttgaggctgaagaagtggaagtatttgaaaaaccaaaagctccacctaaagggcctgagatatctgagaaaatcatccctccaaaaaaaccgcccactaaagttgttcctcgaaaagagccaccagctaaagtaccggaggtgcctaagaaaattgtggtagaagaaaaagtacgtgttcctgaagagcccagagttccaccaactaaagcacccgaagtacccaagaaaattgtcccagaagaaaaagttcgtgaagctgttctgaaaaagcctgaagttccaccagctaaagttcctgggatgcctaagaaaagtgttcaagaagaaaaatcacctattgttatttctgaagacacagagatgtacatttatgaagcatctgaagaagcagtcctagaagaaaaagtacttgtgactcaacctcaaaagacaaaacccaaactagcaaaagtgcctgagccacccaagaaagttgttccagaagacaaaatatatgtgactattcctaaaaagagagaaacaccagcaactaaagaacctgatacaaccagaggcatttttccagaggtggagccacctgaggctattcctgaaattccagaacatcctccaactgaagagtttgaagtcttcaaggaagtcattccagagggagaaactcctattgttaaaagaagaaaaacaccatcaccaacagcaccagaagctatgaaagaagttgtccctgaaatgaaaatatttgaggatgtacctgaagagccagaaactccacgtatgaaaacgcccgaagctcctcaagaaattattcctgccaagacagttccttccaaaaaaagagaacccccatcagttaaagtgcctgaagctctccaagaaattgtccctgaaaagaaaacgcttgtggttcctctcagaaagcctgaagtccttcctgatgaagtgccggaggctctcagagaagttgtcccggaaaagaaagtgcatcctccccaaagggctgaagttgtacctgtcaaagtgcacgaagctcccaaagagattatccctgaaaagaaagtgtcggtggtgcctcctaaaaagcctgaagtcccacctgttaaagtgccagaagcttccaaagaggttatccgcgaagagaaagtgcccttggctcctcctaaagagcctgaagtcccacctgttaaagtaccagagcctcccaaagaagtagttcctgaaaagaaagcgccagtggctcctcctaaagagcctgaagtcccacctgttaaagtgcctgaggctcccaaagaagttgttcctgaaaagaaagtgccagtgcctcctcctaaaaagcctgaagtgccacccacaaaagtcccagaggtgccaaaggcagctgtcccagaaaagaagttgcctgaagctattcctcccaaaccggaaagtcctccccctgaagtgcctgaagtgctgccaccgaaggaagtggtcccagaaaagaaagtaccggtgcctcctgccaaaaagccagaagctccacctcctaaagttcctgaagctcctaaagaagttgtacttgaaaagaaagcatctgtggctgtgcccaaaaaaccggaagccccacgtgcaaaagtgcctgaagctgctcaagaagttgtcccagaaaagaaaattcccaaggcaccaatcaaaaaaccagaagcccccgcagttacagtgcctgaagtcccacaagaaattgtgccagaaaagaaaacactggtgcttcctaaaaagccagaagttccacctgttacagtgccagaggctcccaaagaagttgtccttgaaaagaaagtgccctcggctcctcctaaaaagcctgaagtcccacctgttaaagtgcctgaggctcccaaagaagttgttcctgaaaagaaagtgccagtgcctcctcctaaaaagcctgaagtgccacccacaaaagtcccagaggtgccaaaggcagctgtcccagaaaagaaggtgcctgaagctattcctcccaaaccggaaagtcctccccctgaagtgcctgaagtgctgccaccgaaggaagtggtcccagaaaagaaagtaccggtgcctcctgccaaaaagccagaagctccacctcctaaagttcctgaagctcctaaagaagttgtacttgaaaagaaagcatctgtggctgtgcccaaaaaaccggaagccccacgtgcaaaagtgcctgaagctgctcaagaagttgtcccagaaaagaaaattcccaaggcaccaatcaaaaaaccagaagcccccgcagttacagtgccagaagttcctcaagaagccgcagaaaaagaaattcccgtggctccacccaaaaaaccagaagctccgattgtcccagtgcctgaagctcaagaagttgtcccagaaaagaaa

SEQ ID NO: 94417 - DNA, 1885 bp, Artificial Sequence
  derived and/or modified sequence
taaattgaccattgcagatgttcgagcagaagaccagggtcagtacacctgcaaatatgaagaccttgaaacttcagcagaactcagaatcgaagctgaaccaattcagtttacaaagcgcatacagaacatcgtggtgagtgagcatcagtctgccacctttgagtgtgaagtgtcctttgatgatgccattgtaacatggtacaaaggaccaacagaactgacagagagccagaaatacaacttcaggaatgatggccgctgccattatatgaccatccacaatgtgaccccagacgatgaaggtgtctactcggtcatcgctcggctggagccaagaggtgaagcaagaagcacggcagagctgtacctaacgacgaaagaaatcaaacttgagctgaagcctcctgatattcctgactccagagttccaatcccaaccatgcctatcagagcagtgccaccagaagaaatccctcctgtggttgctcctcctatcccccttttgctaccaacacccgaagaaaagaaaccaccaccaaaacgtattgaagttaccaaaaaggctgtgaagaaagatgccaaaaaagttgttgcaaagcccaaagagatgacaccacgtgaagagattgtcaagaagcctccacctcctactaccttaattccagcaaaagctcctgaaatcattgatgtatcctctaaagctgaagaagtaaaaataatgactataaccagaaagaaagaggttcagaaagaaaaagaagctgtgtatgagaaaaagcaagcagtccacaaggagaagagagtcttcattgaatctttcgaagaaccttatgacgaactggaggtagaaccatacacagagccatttgaacaaccttattatgaagaaccagatgaagactatgaagagattaaggtagaagctaaaaaagaagttcacgaggaatgggaagaagattttgaagaagggcaagaatactatgaaagggaagaaggctatgacgaaggggaggaagagtgggaagaggcttaccaagaaagggaagtaattcaagttcaaaaggaggtctatgaagaatcacatgagagaaaagttccagccaaagtacctgaaaagaaagcaccaccacctcctaaagttataaagaagccagtaattgaaaaaattgaaaagacttctcgaagaatggaggaagaaaaagttcaagtcaccaaagtacctgaagtttcaaagaagattgttccacaaaaaccttcccggactccagtacaggaagaagttattgaagtgaaagtaccagctgtgcatacaaagaagatggttatttcagaagaaaagatgttctttgcttctcacacagaggaggaggtgtcagtcacagtccccgaggtacaaaaggaaattgttactgaagagaaaattcacgttgccatttccaaaagggttgaaccaccacctaaagtccctgagctacctgagaaaccagctccagaagaagtggcccctgttcctatccctaaaaaagtggagcccccagcaccaaaagttcctgaggttcccaagaaacccgtgccagaggagaaaaagccagttcctgtgcctaagaaggaacctgctgctcccccaaaagtcccagaggtgccaaagaaacctgtccctgaagaaaagattcccgttcctgttgcaaagaaaaaggaagctcccccagctaaagtgccagaaataccaaagaagaaagttcctgaagaaaggaaacctgttcctcggaaggaggaagaagttccaccaccaccaaaagtgccagctctgcctaagaaacccgtcccagaggagaaagttgcagtgccagttcctgtcgctaagaaagctcctcctccccga

SEQ ID NO: 94418 - DNA, 2793 bp, Artificial Sequence
  derived and/or modified sequence
gtagaagaattcatcaaattagaacaacatagagttgaagaagaacacagagttgaaaaagttcatagggtaatagaagtttttgaggctgaagaagtggaagtatttgaaaaaccaaaagctccacctaaagggcctgagatatctgagaaaatcatccctccaaaaaaaccgcccactaaagttgttcctcgaaaagagccaccagctaaagtaccggaggtgcctaagaaaattgtggtagaagaaaaagtacgtgttcctgaagagcccagagttccaccaactaaagcacccgaagtacccaagaaaattgtcccagaagaaaaagttcgtgaagctgttctgaaaaagcctgaagttccaccagctaaagttcctgggatgcctaagaaaagtgttcaagaagaaaaatcacctattgttatttctgaagacacagagatgtacatttatgaagcatctgaagaagcagtcctagaagaaaaagtacttgtgactcaacctcaaaagacaaaacccaaactagcaaaagtgcctgagccacccaagaaagttgttccagaagacaaaatatatgtgactattcctaaaaagagagaaacaccagcaactaaagaacctgatacaaccagaggcatttttccagaggtggagccacctgaggctattcctgaaattccagaacatcctccaactgaagagtttgaagtcttcaaggaagtcattccagagggagaaactcctattgttaaaagaagaaaaacaccatcaccaacagcaccagaagctatgaaagaagttgtccctgaaatgaaaatatttgaggatgtacctgaagagccagaaactccacgtatgaaaacgcccgaagctcctcaagaaattattcctgccaagacagttccttccaaaaaaagagaacccccatcagttaaagtgcctgaagctctccaagaaattgtccctgaaaagaaaacgcttgtggttcctctcagaaagcctgaagtccttcctgatgaagtgccggaggctctcagagaagttgtcccggaaaagaaagtgcatcctccccaaagggctgaagttgtacctgtcaaagtgcacgaagctcccaaagagattatccctgaaaagaaagtgtcggtggtgcctcctaaaaagcctgaagtcccacctgttaaagtgccagaagcttccaaagaggttatccgcgaagagaaagtgcccttggctcctcctaaagagcctgaagtcccacctgttaaagtaccagagcctcccaaagaagtagttcctgaaaagaaagcgccagtggctcctcctaaagagcctgaagtcccacctgttaaagtgcctgaggctcccaaagaagttgttcctgaaaagaaagtgccagtgcctcctcctaaaaagcctgaagtgccacccacaaaagtcccagaggtgccaaaggcagctgtcccagaaaagaagttgcctgaagctattcctcccaaaccggaaagtcctccccctgaagtgcctgaagtgctgccaccgaaggaagtggtcccagaaaagaaagtaccggtgcctcctgccaaaaagccagaagctccacctcctaaagttcctgaagctcctaaagaagttgtacttgaaaagaaagcatctgtggctgtgcccaaaaaaccggaagccccacgtgcaaaagtgcctgaagctgctcaagaagttgtcccagaaaagaaaattcccaaggcaccaatcaaaaaaccagaagcccccgcagttacagtgcctgaagtcccacaagaaattgtgccagaaaagaaaacactggtgcttcctaaaaagccagaagttccacctgttacagtgccagaggctcccaaagaagttgtccttgaaaagaaagtgccctcggctcctcctaaaaagcctgaagtcccacctgttaaagtgcctgaggctcccaaagaagttgttcctgaaaagaaagtgccagtgcctcctcctaaaaagcctgaagtgccacccacaaaagtcccagaggtgccaaaggcagctgtcccagaaaagaaggtgcctgaagctattcctcccaaaccggaaagtcctccccctgaagtgcctgaagtgctgccaccgaaggaagtggtcccagaaaagaaagtaccggtgcctcctgccaaaaagccagaagctccacctcctaaagttcctgaagctcctaaagaagttgtacttgaaaagaaagcatctgtggctgtgcccaaaaaaccggaagccccacgtgcaaaagtgcctgaagctgctcaagaagttgtcccagaaaagaaaattcccaaggcaccaatcaaaaaaccagaagcccccgcagttacagtgccagaagttcctcaagaagccgcagaaaaagaaattcccgtggctccacccaaaaaaccagaagctccgattgtcccagtgcctgaagctcaagaagttgtcccagaaaagaaagttcctaaggctcctcccacaaaaccagaagccccacctgccacagtgcctgaagtcccacaagaaattgtgccagaaaagaaaacactggtgcttcctaaaaagccagaagttccacctgttacagtgccagaggctcccaaagaagttgtccttgaaaagaaagtgcccttggctcctcctaaaaagcctgaagtcccacctgttaaagtgcctgaggctcccaaagaagttgttcctgaaaagaaagtgccagtgcctcctcctaaaaagcctgaagtgccacccacaaaagtcccagaggtg

SEQ ID NO: 94419 - RNA, 21 nt, Artificial Sequence
  derived and/or modified sequence
cggcccccccccccccccccc

SEQ ID NO: 94420 - RNA, 21 nt, Artificial Sequence
  derived and/or modified sequence
ggggggggggggggggggccg

SEQ ID NO: 94421 - protein, 199 aa, Artificial Sequence
  derived and/or modified sequence
MTRLLGYVDPLDPSFVAAVITITFNPLYWNVVARWEHKTRKLSRAFGSPYLACYSLSVTILLLNFLRSHCFTQAMLSQPRMESLDTPAAYSLGLALLGLGVVLVLSSFFALGFAGTFLGDYFGILKEARVTVFPFNILDNPMYWGSTANYLGWAIMHASPTGLLLTVLVALTYIVALLYEEPFTAEIYRQKASGSHKRS

SEQ ID NO: 94422 - DNA, 895 bp, Artificial Sequence
  derived and/or modified sequence
ggcgaggagaggcacaccactattgttttaatttgcttttacctgattcctggcagacttctgcgttatgacccggctgctgggctacgtggaccccctggatcccagctttgtggctgccgtcatcaccatcaccttcaatccgctctactggaatgtggttgcacgatgggaacacaagacccgcaagctgagcagggccttcggatccccctacctggcctgctactctctaagcgtcaccatcctgctcctgaacttcctgcgctcgcactgcttcacgcaggccatgctgagccagcccaggatggagagcctggacacccccgcggcctacagcctgggcctcgcgctcctgggactgggcgtcgtgctcgtgctctccagcttctttgcactggggttcgctggaactttcctaggtgattacttcgggatcctcaaggaggcgagagtgaccgtgttccccttcaacatcctggacaaccccatgtactggggaagcacagccaactacctgggctgggccatcatgcacgccagccccacgggcctgctcctgacggtgctggtggccctcacctacatagtggctctcctatacgaagagcccttcaccgctgagatctaccggcagaaagcctccgggtcccacaagaggagctgattgagctgcaacagctttgctgaaggcctggccagcctcctggcctgccccaagtggcaggccctgcgcagggcgagaatggtgcctgctgctcagggctcgcccccggcgtgggctgccccagtgccttggaacctgctgccttggggaccctggacgtgccgacatatggccattgagctccaacccacacattcccattcaccaataaaggcaccctgaccccaa

SEQ ID NO: 94423 - DNA, 1008 bp, Artificial Sequence
  derived and/or modified sequence
ctgaccacagagcgctgctcccgagaaccctgcacccctcaatggagtaaattaccataaagcctcttccttacccatgctttggggtgttaacagctgaggctattcgtcggtgacctgtgggactcgagctattcctgcagctcagcagacctcctggccgtggcagacttctgcgttatgacccggctgctgggctacgtggaccccctggatcccagctttgtggctgccgtcatcaccatcaccttcaatccgctctactggaatgtggttgcacgatgggaacacaagacccgcaagctgagcagggccttcggatccccctacctggcctgctactctctaagcgtcaccatcctgctcctgaacttcctgcgctcgcactgcttcacgcaggccatgctgagccagcccaggatggagagcctggacacccccgcggcctacagcctgggcctcgcgctcctgggactgggcgtcgtgctcgtgctctccagcttctttgcactggggttcgctggaactttcctaggtgattacttcgggatcctcaaggaggcgagagtgaccgtgttccccttcaacatcctggacaaccccatgtactggggaagcacagccaactacctgggctgggccatcatgcacgccagccccacgggcctgctcctgacggtgctggtggccctcacctacatagtggctctcctatacgaagagcccttcaccgctgagatctaccggcagaaagcctccgggtcccacaagaggagctgattgagctgcaacagctttgctgaaggcctggccagcctcctggcctgccccaagtggcaggccctgcgcagggcgagaatggtgcctgctgctcagggctcgcccccggcgtgggctgccccagtgccttggaacctgctgccttggggaccctggacgtgccgacatatggccattgagctccaacccacacattcccattcaccaataaaggcaccctgaccccaa

SEQ ID NO: 94424 - protein, 232 aa, Artificial Sequence
  derived and/or modified sequence
MKRSGNPGAEVTNSSVAGPDCCGGLGNIDFRQADFCVMTRLLGYVDPLDPSFVAAVITITFNPLYWNVVARWEHKTRKLSRAFGSPYLACYSLSVTILLLNFLRSHCFTQAMLSQPRMESLDTPAAYSLGLALLGLGVVLVLSSFFALGFAGTFLGDYFGILKEARVTVFPFNILDNPMYWGSTANYLGWAIIPAPAGAVGSEARQPHGPAPDGAGGPHLHSGSPIRRALHR

SEQ ID NO: 94425 - protein, 211 aa, Artificial Sequence
  derived and/or modified sequence
MKRSGNPGAEADFCVMTRLLGYVDPLDPSFVAAVITITFNPLYWNVVARWEHKTRKLSRAFGSPYLACYSLSVTILLLNFLRSHCFTQAMLSQPRMESLDTPAAYSLGLALLGLGVVLVLSSFFALGFAGTFLGDYFGILKEARVTVFPFNILDNPMYWGSTANYLGWAIISPAPAGAVGSEARQPHGPAPDGAGGPHLHSGSPIRRALHR

SEQ ID NO: 94426 - DNA, 699 bp, Artificial Sequence
  derived and/or modified sequence
atgaagagaagcggcaaccccggcgccgaggtgaccaacagcagcgtggccggccccgactgctgcggcggcctgggcaacatcgacttcagacaggccgacttctgcgtgatgaccagactgctgggctacgtggaccccctggaccccagcttcgtggccgccgtgatcaccatcaccttcaaccccctgtactggaacgtggtggccagatgggagcacaagaccagaaagctgagcagagccttcggcagcccctacctggcctgctacagcctgagcgtgaccatcctgctgctgaacttcctgagaagccactgcttcacccaggccatgctgagccagcccagaatggagagcctggacacccccgccgcctacagcctgggcctggccctgctgggcctgggcgtggtgctggtgctgagcagcttcttcgccctgggcttcgccggcaccttcctgggcgactacttcggcatcctgaaggaggccagagtgaccgtgttccccttcaacatcctggacaaccccatgtactggggcagcaccgccaactacctgggctgggccatcatccccgcccccgccggcgccgtgggcagcgaggccagacagccccacggccccgcccccgacggcgccggcggcccccacctgcacagcggcagccccatcagaagagccctgcacagatag

SEQ ID NO: 94427 - DNA, 642 bp, Artificial Sequence
  derived and/or modified sequence
atgaagagaagcggcaaccccggcgccgaggtgaccaacagcagcgtggccggccccgactgctgcggcggcctgggcaacatcgacttcagacaggccgacttctgcgtgatgaccagactgctgggctacgtggaccccctggaccccagcttcgtggccgccgtgatcaccatcaccttcaaccccctgtactggaacgtggtggccagatgggagcacaagaccagaaagctgagcagagccttcggcagcccctacctggcctgctacagcctgagcgtgaccatcctgctgctgaacttcctgagaagccactgcttcacccaggccatgctgagccagcccagaatggagagcctggacacccccgccgcctacagcctgggcctggccctgctgggcctgggcgtggtgctggtgctgagcagcttcttcgccctgggcttcgccggcaccttcctgggcgactacttcggcatcctgaaggaggccagagtgaccgtgttccccttcaacatcctggacaaccccatgtactggggcagcaccgccaactacctgggctgggccatcatcctgtgcccctgcggcagataccccttcccccagagaggccccagagccatgagagaggcctag

SEQ ID NO: 94428 - DNA, 636 bp, Artificial Sequence
  derived and/or modified sequence
atgaagagaagcggcaaccccggcgccgaggccgacttctgcgtgatgaccagactgctgggctacgtggaccccctggaccccagcttcgtggccgccgtgatcaccatcaccttcaaccccctgtactggaacgtggtggccagatgggagcacaagaccagaaagctgagcagagccttcggcagcccctacctggcctgctacagcctgagcgtgaccatcctgctgctgaacttcctgagaagccactgcttcacccaggccatgctgagccagcccagaatggagagcctggacacccccgccgcctacagcctgggcctggccctgctgggcctgggcgtggtgctggtgctgagcagcttcttcgccctgggcttcgccggcaccttcctgggcgactacttcggcatcctgaaggaggccagagtgaccgtgttccccttcaacatcctggacaaccccatgtactggggcagcaccgccaactacctgggctgggccatcatcagccccgcccccgccggcgccgtgggcagcgaggccagacagccccacggccccgcccccgacggcgccggcggcccccacctgcacagcggcagccccatcagaagagccctgcacagatag

SEQ ID NO: 94429 - DNA, 699 bp, Artificial Sequence
  derived and/or modified sequence
atgaagagaagcgggaatccaggtgctgaggtgactaatagctccgtggccggcccggattgctgcggcggcctcggcaacatcgacttcaggcaggccgacttttgcgttatgactcgacttctgggctacgtcgatccactggatcctagcttcgtggccgcagtgataactattactttcaatccactctactggaacgtggtcgcccgttgggagcacaaaacaaggaaactgtctagggctttcggttccccatacttggcctgttattccttgtccgttaccatcctactgttgaattttctgcgcagtcattgcttcacccaggccatgctatcccagcctcgaatggagagcctggacactcccgcagcctatagcctgggtctagctctcctgggcttgggcgtggtgctggtactgtcttccttctttgccttgggcttcgcgggaacgttcctgggcgattatttcggcatcctaaaggaagcccgggtgacggtgttcccattcaatattctggataacccaatgtattggggatctacagcgaattatctcgggtgggctatcattcctgcccccgccggcgccgtaggctccgaggctcggcagccacatggcccagcccccgatggggcggggggaccgcatctacacagcggttcgccgattcggagagccctgcaccgatag

SEQ ID NO: 94430 - DNA, 642 bp, Artificial Sequence
  derived and/or modified sequence
atgaagaggtccggcaatcccggcgcagaggtgacgaatagtagcgtggctggaccagactgctgtggaggacttggaaacatagacttccgtcaagccgacttttgcgttatgactagattactggggtatgttgaccctctcgacccttcattcgtcgccgcagtgattaccattacctttaatcccctgtactggaatgtagtggcaagatgggagcataagaccaggaagctttcgagggcttttgggagtccctacctggcctgttactccttgagcgtgactattctgctcctgaacttcctccgcagccactgctttacacaggcaatgctgagtcaaccaagaatggagtctctggacacacccgccgcctattctttgggactggccttattgggcctcggagtcgtgctggttctctcctctttttttgctctggggtttgccggcacctttctgggggattattttgggatactaaaggaggcgagagtgactgtctttccattcaacatccttgacaaccccatgtactggggatccacagctaactatctcgggtgggcaataatactctgcccatgcgggcgctatccattcccacaacgcggacccagggccatgcgggaagcgtag

SEQ ID NO: 94431 - DNA, 636 bp, Artificial Sequence
  derived and/or modified sequence
atgaaaagatcggggaaccccggagcggaggccgacttttgcgtcatgaccagactgttgggatacgtagatcccctggacccatcattcgtagccgcagttatcacaatcacattcaatcccttgtattggaatgtggttgcccgctgggaacataaaaccagaaaactctccagagctttcgggtccccctatctggcctgctactctctgagcgtgactattttgctgctcaatttccttcgctcccactgcttcacacaggccatgctgtcccagcctcggatggagtctttagataccccagccgcttattctctcggactcgccctgttaggcctgggcgttgttcttgtgctttcttcattcttcgcactgggatttgctggcaccttcctcggggactatttcggcattctcaaagaagctcgcgtcactgttttcccctttaatatactcgacaacccaatgtactggggttcaaccgccaattatttaggatgggccataatctcaccagcacctgcaggcgcagttggctccgaggctaggcagccccatggccctgcccctgatggcgccggtggcccacacctacatagcgggagtcctatcagacgggccttgcatcggtag

SEQ ID NO: 94432 - DNA, 699 bp, Artificial Sequence
  derived and/or modified sequence
atgaagaggagcggcaaccctggagctgaggtgaccaacagctctgtggccggccctgactgctgcggcggcctgggcaacatcgacttccggcaggccgacttctgtgtgatgacccggctgctgggctacgtggaccccctggaccccagctttgtggccgctgtgatcaccatcaccttcaaccccctgtactggaatgtggtggcccgctgggagcacaagaccaggaagctgagccgggccttcggcagcccctacctggcctgctacagcctgtctgtgaccatcctgctgctgaacttcctgcggagccactgcttcacccaggccatgctgagccagcccaggatggagagcctggacaccccagctgcctacagcctgggcctggccctgctgggcctgggcgtggtgctggtgctgagcagcttctttgccctgggctttgctggcaccttcctgggggactacttcggcatcctgaaggaggcccgggtgaccgtcttccccttcaacatcctggacaaccccatgtactggggcagcacagccaactacctgggctgggccatcatcccagccccagctggagctgtgggcagcgaggcccggcagccccacggccctgccccagatggagctgggggcccccacctgcacagcggcagccccatcagaagagccctgcacaggtag

SEQ ID NO: 94433 - DNA, 642 bp, Artificial Sequence
  derived and/or modified sequence
atgaagaggagcggcaaccctggagctgaggtgaccaacagctctgtggccggccctgactgctgcggcggcctgggcaacatcgacttccggcaggccgacttctgtgtgatgacccggctgctgggctacgtggaccccctggaccccagctttgtggccgctgtgatcaccatcaccttcaaccccctgtactggaatgtggtggcccgctgggagcacaagaccaggaagctgagccgggccttcggcagcccctacctggcctgctacagcctgtctgtgaccatcctgctgctgaacttcctgcggagccactgcttcacccaggccatgctgagccagcccaggatggagagcctggacaccccagctgcctacagcctgggcctggccctgctgggcctgggcgtggtgctggtgctgagcagcttctttgccctgggctttgctggcaccttcctgggggactacttcggcatcctgaaggaggcccgggtgaccgtcttccccttcaacatcctggacaaccccatgtactggggcagcacagccaactacctgggctgggccatcatcctgtgcccctgtggccgctaccccttcccccagaggggcccccgggccatgagggaggcctag

SEQ ID NO: 94434 - DNA, 636 bp, Artificial Sequence
  derived and/or modified sequence
atgaagaggagcggcaaccctggagctgaggccgacttctgtgtgatgacccggctgctgggctacgtggaccccctggaccccagctttgtggccgctgtgatcaccatcaccttcaaccccctgtactggaatgtggtggcccgctgggagcacaagaccaggaagctgagccgggccttcggcagcccctacctggcctgctacagcctgtctgtgaccatcctgctgctgaacttcctgcggagccactgcttcacccaggccatgctgagccagcccaggatggagagcctggacaccccagctgcctacagcctgggcctggccctgctgggcctgggcgtggtgctggtgctgagcagcttctttgccctgggctttgctggcaccttcctgggggactacttcggcatcctgaaggaggcccgggtgaccgtcttccccttcaacatcctggacaaccccatgtactggggcagcacagccaactacctgggctgggccatcatcagccctgccccagctggagctgtgggcagcgaggcccggcagccccacggccctgccccagatggagctgggggcccccacctgcacagcggcagccccatccggcgggccctgcacaggtag

SEQ ID NO: 94435 - DNA, 699 bp, Artificial Sequence
  derived and/or modified sequence
atgaagcggagcggcaaccccggcgccgaggtgaccaacagcagcgtcgccggccccgattgttgcgggggactcggaaacatagacttccgtcaggcagatttttgcgtgatgactcgactcctcggttacgtggaccctcttgatcccagcttcgtcgccgctgttataaccatcacttttaacccgttgtactggaacgtcgtcgcccgctgggaacacaagactcggaagctaagccgggccttcgggtcaccttatctggcatgctattccctcagtgtaaccatactcctgttgaatttcttacggtcccactgtttcacacaagcaatgttgtcccagcctcgtatggagtctctggacacacctgctgcatactctctcggccttgccctgctcggtcttggcgtggtgctggtgctttcaagtttctttgcattaggtttcgccggaacgttcttaggcgactacttcggcattctaaaggaggctcgcgtaacagtcttcccttttaatattctggacaacccgatgtactggggaagtactgcgaattatctaggctgggccataatccctgctccggcgggggctgttgggagcgaggcccggcaaccacacgggcctgccccagatggcgctggtggaccacacttgcattctggatccccaatacggcgggccttacatcggtag

SEQ ID NO: 94436 - DNA, 642 bp, Artificial Sequence
  derived and/or modified sequence
atgaagcggagcggcaaccccggcgccgaggtgaccaacagcagcgtcgccgggccagactgctgcggcggtctcgggaatatcgactttaggcaggccgatttttgcgttatgaccagactgctgggttatgtagatcctctggacccatcattcgtcgccgccgtgataacaatcaccttcaatcctctctactggaatgtggtggcaaggtgggaacataaaacccgcaagttaagtcgggctttcgggtccccctatttagcgtgttattccctatccgtaactatattgctcctgaacttcctacggagccactgctttacacaagcaatgctatctcagccacggatggaaagcctcgacacccccgctgcctactctctggggctagctctactggggctcggagtggtgctggtcctctcaagtttttttgcactggggtttgctggtacctttttaggcgattacttcggcattctgaaggaagccagggtgacggtgtttcctttcaacatactggacaaccccatgtattggggctctacagccaactacctggggtgggctatcatcctttgcccttgtggccgctatcctttcccacagaggggaccacgtgccatgcgggaggcttag

SEQ ID NO: 94437 - DNA, 636 bp, Artificial Sequence
  derived and/or modified sequence
atgaagcggagcggcaaccccggcgccgaggccgacttctgcgtgatgactcggctcttgggctatgtcgatcccctcgacccatccttcgtggcggcggtcataacgattacatttaatccgctatactggaatgtggtggctaggtgggaacataaaactcgtaaactcagcagagcctttggatctccctatctcgcttgttatagcctgtctgtgaccatcctcctccttaatttcctgagatcccactgttttacacaggctatgctcagccagccgaggatggaatccctggatacaccggcggcatattccctaggcctggccttgctcggtttgggcgtcgttctggtcttgtcatcctttttcgctctcggatttgctggaacgttcctcggcgactatttcggtatcctgaaggaagcacgggtgaccgtcttcccatttaacatactagacaatcctatgtactggggctctacggcgaattatcttggatgggccatcatcagccctgccccagcaggcgcagtggggtcagaagcgcgccagccacacggaccagcccctgatggcgctgggggcccacatctgcacagtggatcaccaatcaggcgggcccttcatagatag

SEQ ID NO: 94438 - DNA, 1050 bp, Artificial Sequence
  derived and/or modified sequence
acttacccggctctataggtccggttccgggggcgcgtggctgcagcggggcccgcgtggtgcctcctgaggcggcccccggatgaagagatctgggaacccgggagccgaggtaacgaacagctcggtggcagggcctgactgctgcggaggcctcggcaatattgattttagacaggcagacttctgcgttatgacccggctgctgggctacgtggaccccctggatcccagctttgtggctgccgtcatcaccatcaccttcaatccgctctactggaatgtggttgcacgatgggaacacaagacccgcaagctgagcagggccttcggatccccctacctggcctgctactctctaagcgtcaccatcctgctcctgaacttcctgcgctcgcactgcttcacgcaggccatgctgagccagcccaggatggagagcctggacacccccgcggcctacagcctgggcctcgcgctcctgggactgggcgtcgtgctcgtgctctccagcttctttgcactggggttcgctggaactttcctaggtgattacttcgggatcctcaaggaggcgagagtgaccgtgttccccttcaacatcctggacaaccccatgtactggggaagcacagccaactacctgggctgggccatcatcccagcacctgcgggagctgtgggatcagaggcacgccagccccacgggcctgctcctgacggtgctggtggccctcacctacatagtggctctcctatacgaagagcccttcaccgctgagatctaccggcagaaagcctccgggtcccacaagaggagctgattgagctgcaacagctttgctgaaggcctggccagcctcctggcctgccccaagtggcaggccctgcgcagggcgagaatggtgcctgctgctcagggctcgcccccggcgtgggctgccccagtgccttggaacctgctgccttggggaccctggacgtgccgacatatggccattgagctccaacccacacattcccattcaccaataaaggcaccctgacccc

SEQ ID NO: 94439 - DNA, 662 bp, Artificial Sequence
  derived and/or modified sequence
ggtgcctcctgaggcggcccccggatgaagagatctgggaacccgggagccgaggtaacgaacagctcggtggcagggcctgactgctgcggaggcctcggcaatattgattttagacaggcagacttctgcgttatgacccggctgctgggctacgtggaccccctggatcccagctttgtggctgccgtcatcaccatcaccttcaatccgctctactggaatgtggttgcacgatgggaacacaagacccgcaagctgagcagggccttcggatccccctacctggcctgctactctctaagcgtcaccatcctgctcctgaacttcctgcgctcgcactgcttcacgcaggccatgctgagccagcccaggatggagagcctggacacccccgcggcctacagcctgggcctcgcgctcctgggactgggcgtcgtgctcgtgctctccagcttctttgcactggggttcgctggaactttcctaggtgattacttcgggatcctcaaggaggcgagagtgaccgtgttccccttcaacatcctggacaaccccatgtactggggaagcacagccaactacctgggctgggccatcatcctctgcccatgtggcagataccccttcccacagagggggccccgtgccatgagggaagc

SEQ ID NO: 94440 - DNA, 960 bp, Artificial Sequence
  derived and/or modified sequence
ggggcgcgtggctgcagcggggcccgcgtggtgcctcctgaggcggcccccggatgaagagatctgggaacccgggagccgaggcagacttctgcgttatgacccggctgctgggctacgtggaccccctggatcccagctttgtggctgccgtcatcaccatcaccttcaatccgctctactggaatgtggttgcacgatgggaacacaagacccgcaagctgagcagggccttcggatccccctacctggcctgctactctctaagcgtcaccatcctgctcctgaacttcctgcgctcgcactgcttcacgcaggccatgctgagccagcccaggatggagagcctggacacccccgcggcctacagcctgggcctcgcgctcctgggactgggcgtcgtgctcgtgctctccagcttctttgcactggggttcgctggaactttcctaggtgattacttcgggatcctcaaggaggcgagagtgaccgtgttccccttcaacatcctggacaaccccatgtactggggaagcacagccaactacctgggctgggccatcatcagcccagcacctgcgggagctgtgggatcagaggcacgccagccccacgggcctgctcctgacggtgctggtggccctcacctacatagtggctctcctatacgaagagcccttcaccgctgagatctaccggcagaaagcctccgggtcccacaagaggagctgattgagctgcaacagctttgctgaaggcctggccagcctcctggcctgccccaagtggcaggccctgcgcagggcgagaatggtgcctgctgctcagggctcgcccccggcgtgggctgccccagtgccttggaacctgctgccttggggaccctggacgtgccgacatatggccattgagctccaacccacacattcccattcaccaataaaggcaccctgaccccaa

SEQ ID NO: 94441 - DNA, 699 bp, Artificial Sequence
  derived and/or modified sequence
atgaagcggagtggcaaccccggtgccgaagttacgaatagtagcgtggcaggacctgattgttgtggtgggctcggcaatatcgatttcagacaggcagatttttgcgtgatgacacgcctcctggggtacgtggaccctctggatcccagttttgtggccgcagtgattacaatcacatttaacccactgtattggaacgtggtagcacgttgggagcacaaaaccagaaaactcagcagggctttcgggagcccatatctggcctgctattcactttctgtaaccatcctgctgctgaatttcctgcgcagccactgttttacccaggccatgctgagtcagccaagaatggaatcactggataccccagccgcatattccctgggactggctctccttggcctgggagtagtactcgttctgtcaagcttctttgccctgggctttgctggcacctttctgggtgattatttcggaattctgaaggaggccagggtcacagttttcccattcaacattttagacaatcctatgtactggggttcaactgctaattatctgggctgggccattattcccgctcctgcaggcgcagtgggctccgaagccaggcaaccacatggtcccgctccggacggagcaggaggccctcatctgcactctgggtcccctattcgtcgtgcactgcaccggtag

SEQ ID NO: 94442 - DNA, 642 bp, Artificial Sequence
  derived and/or modified sequence
atgaaaagatctggcaatcccggagctgaggtaacaaactcctcagttgcaggccctgactgttgtgggggtctgggtaacatcgactttagacaggccgacttctgtgtgatgaccaggctgctcggttatgtggatcccttggacccttcttttgtcgctgcagtgattacaatcacgttcaatcctctgtactggaatgtggttgcgagatgggaacacaaaacaaggaaactctctcgtgcttttggttccccttacctggcctgttattcactgagcgtgactattctcctactgaactttctacgctcccattgttttactcaggccatgctgtcccagccccgaatggagtcacttgacactcccgcagcctactctctcggactcgctttgttggggctgggtgtggtacttgtgctgagtagtttctttgcccttggattcgctgggaccttcctgggcgattatttcgggatcctcaaggaggcccgagtaactgtgttccctttcaacattctggacaaccccatgtattggggctccactgccaactatctgggatgggccatcattctgtgcccatgcggccgatatccctttccccagcgcggaccacgcgcaatgagagaggcttag

SEQ ID NO: 94443 - DNA, 636 bp, Artificial Sequence
  derived and/or modified sequence
atgaaacgtagcggaaatcctggggctgaggctgatttttgcgtgatgactcggctgctgggttacgtggatcccctggacccttctttcgtcgctgctgtgataacaatcactttcaatccattgtactggaatgtcgtggcgagatgggaacacaaaacgaggaaactgtcccgggcattcggctccccttatcttgcttgctattccctaagcgtgacgatcctgctcttaaatttcctcaggtcacattgcttcacacaggccatgctctcccagccaaggatggagagcctcgacaccccagcagcttacagtttgggactggctctgttgggtttaggagtggttctggtactctcttccttctttgcacttggatttgctgggacattcctgggagactattttggtatccttaaagaagctagagtgactgtcttcccatttaatatcctggataatcccatgtactggggatccacagcaaattacctgggttgggccattataagtccagccccagccggagccgtcgggagcgaggctcggcagccacatggcccagcgccagatggggctggcggaccccacctacattctggaagtcccatcaggagagcattgcaccggtag

SEQ ID NO: 94444 - protein, 397 aa, Artificial Sequence
  derived and/or modified sequence
MGNVNRQGQHCRDFIMVSQALRLLCLLLGLQGCLAADGDQCASSPCQNGGSCKDQLQSYICFCLPAFEGRNCETHKDDQLICVNENGGCEQYCSDHTGTKRSCRCHEGYSLLADGVSCTPTVEYPCGKIPILEKRNASKPQGRIVGGKVCPKGECPWQVLLLVNGAQLCGGTLINTIWVVSAAHCFDKIKNWRNLIAVLGEHDLSEHDGDEQSRRVAQVIIPSTYVPGTTNHDIALLRLHQPVVLTDHVVPLCLPERTFSERTLAFVRFSLVSGWGQLLDRGATALELMVLNVPRLMTQDCLQQSRKVGDSPNITEYMFCAGYSDGSKDSCKGDSGGPHATHYRGTWYLTGIVSWGQGCATVGHFGVYTRVSQYIEWLQKLMRSEPRPGVLLRAPFP

SEQ ID NO: 94445 - DNA, 1191 bp, Artificial Sequence
  derived and/or modified sequence
atgggcaacgtgaaccgccagggccagcactgccgcgacttcatcatggtgagccaggccctgcgcctgctgtgcctgctgctgggcctgcagggctgcctggccgccgacggcgaccagtgcgccagcagcccctgccagaacggcggcagctgcaaggaccagctgcagagctacatctgcttctgcctgcccgccttcgagggccgcaactgcgagacccacaaggacgaccagctgatctgcgtgaacgagaacggcggctgcgagcagtactgcagcgaccacaccggcaccaagcgcagctgccgctgccacgagggctacagcctgctggccgacggcgtgagctgcacccccaccgtggagtacccctgcggcaagatccccatcctggagaagcgcaacgccagcaagccccagggccgcatcgtgggcggcaaggtgtgccccaagggcgagtgcccctggcaggtgctgctgctggtgaacggcgcccagctgtgcggcggcaccctgatcaacaccatctgggtggtgagcgccgcccactgcttcgacaagatcaagaactggcgcaacctgatcgccgtgctgggcgagcacgacctgagcgagcacgacggcgacgagcagagccgccgcgtggcccaggtgatcatccccagcacctacgtgcccggcaccaccaaccacgacatcgccctgctgcgcctgcaccagcccgtggtgctgaccgaccacgtggtgcccctgtgcctgcccgagcgcaccttcagcgagcgcaccctggccttcgtgcgcttcagcctggtgagcggctggggccagctgctggaccgcggcgccaccgccctggagctgatggtgctgaacgtgccccgcctgatgacccaggactgcctgcagcagagccgcaaggtgggcgacagccccaacatcaccgagtacatgttctgcgccggctacagcgacggcagcaaggacagctgcaagggcgacagcggcggcccccacgccacccactaccgcggcacctggtacctgaccggcatcgtgagctggggccagggctgcgccaccgtgggccacttcggcgtgtacacccgcgtgagccagtacatcgagtggctgcagaagctgatgcgcagcgagccccgccccggcgtgctgctgcgcgcccccttcccc

SEQ ID NO: 94446 - DNA, 1194 bp, Artificial Sequence
  derived and/or modified sequence
atgggcaacgtgaacagacagggccagcactgcagagacttcatcatggtgagccaggccctgagactgctgtgcctgctgctgggcctgcagggctgcctggccgccgacggcgaccagtgcgccagcagcccctgccagaacggcggcagctgcaaggaccagctgcagagctacatctgcttctgcctgcccgccttcgagggcagaaactgcgagacccacaaggacgaccagctgatctgcgtgaacgagaacggcggctgcgagcagtactgcagcgaccacaccggcaccaagagaagctgcagatgccacgagggctacagcctgctggccgacggcgtgagctgcacccccaccgtggagtacccctgcggcaagatccccatcctggagaagagaaacgccagcaagccccagggcagaatcgtgggcggcaaggtgtgccccaagggcgagtgcccctggcaggtgctgctgctggtgaacggcgcccagctgtgcggcggcaccctgatcaacaccatctgggtggtgagcgccgcccactgcttcgacaagatcaagaactggagaaacctgatcgccgtgctgggcgagcacgacctgagcgagcacgacggcgacgagcagagcagaagagtggcccaggtgatcatccccagcacctacgtgcccggcaccaccaaccacgacatcgccctgctgagactgcaccagcccgtggtgctgaccgaccacgtggtgcccctgtgcctgcccgagagaaccttcagcgagagaaccctggccttcgtgagattcagcctggtgagcggctggggccagctgctggacagaggcgccaccgccctggagctgatggtgctgaacgtgcccagactgatgacccaggactgcctgcagcagagcagaaaggtgggcgacagccccaacatcaccgagtacatgttctgcgccggctacagcgacggcagcaaggacagctgcaagggcgacagcggcggcccccacgccacccactacagaggcacctggtacctgaccggcatcgtgagctggggccagggctgcgccaccgtgggccacttcggcgtgtacaccagagtgagccagtacatcgagtggctgcagaagctgatgagaagcgagcccagacccggcgtgctgctgagagcccccttcccctag

SEQ ID NO: 94447 - DNA, 1194 bp, Artificial Sequence
  derived and/or modified sequence
atgggcaatgtgaatcgccagggacaacattgtcgtgactttattatggtatctcaggccctgcgactgctttgcctgttgctgggcctgcagggatgcttagctgctgacggggatcaatgtgcatctagcccatgtcagaacggaggatcatgcaaggaccagctgcaatcatatatttgcttctgcctgcctgctttcgaaggacggaactgtgagacccacaaagatgatcaactaatctgcgttaatgagaacggaggttgcgagcagtattgtagtgatcatacaggaactaagcggtcatgccgctgtcatgaagggtactccctactcgcggacggggtgagctgtacgccgacagtggagtacccgtgtggcaagattcctatcttggagaagcgcaatgcttcgaagccccaagggagaatagtcggcggaaaagtctgtccaaaaggggaatgcccttggcaagttctcctgttggtaaatggagcccagctttgtgggggcactctcattaacaccatctgggtagtctctgcagcccattgtttcgacaaaatcaaaaactggaggaaccttatagcagttttaggcgagcacgacttgtctgagcatgacggtgacgaacagtctcggcgcgtggcccaggtgatcattccttcaacttacgttcccgggaccaccaaccatgatatcgctttgctgcgactccaccagcctgtcgtgctaaccgaccatgtcgtgcccctgtgcttgccggaaagaaccttctccgaaagaacacttgctttcgtgcggttcagcctggtctcagggtggggacaactgctcgatagaggagctacggcactcgagttgatggtgttgaacgttcctagactgatgacacaggactgcctgcagcagtcccgaaaggtgggcgacagtccaaatattacagaatatatgttttgcgcaggttacagcgacggaagcaaggacagctgtaagggggactcagggggccctcatgccacccactatcgggggacttggtacctgactgggatcgtgagttggggtcaaggctgcgccaccgtgggacatttcggggtctacactcgcgtgagccagtatatcgagtggctccagaagctgatgaggagcgagccaagaccaggcgtgctgctcagagcccccttcccatag

SEQ ID NO: 94448 - DNA, 1308 bp, Artificial Sequence
  derived and/or modified sequence
agtcccatggggaatgtcaacaggcaggggcagcactgcagagatttcatcatggtctcccaggccctcaggctcctctgccttctgcttgggcttcagggctgcctggctgcagatggggaccagtgtgcctcaagtccatgccagaatgggggctcctgcaaggaccagctccagtcctatatctgcttctgcctccctgccttcgagggccggaactgtgagacgcacaaggatgaccagctgatctgtgtgaacgagaacggcggctgtgagcagtactgcagtgaccacacgggcaccaagcgctcctgtcggtgccacgaggggtactctctgctggcagacggggtgtcctgcacacccacagttgaatatccatgtggaaaaatacctattctagaaaaaagaaatgccagcaaaccccaaggccgaattgtggggggcaaggtgtgccccaaaggggagtgtccatggcaggtcctgttgttggtgaatggagctcagttgtgtggggggaccctgatcaacaccatctgggtggtctccgcggcccactgtttcgacaaaatcaagaactggaggaacctgatcgcggtgctgggcgagcacgacctcagcgagcacgacggggatgagcagagccggcgggtggcgcaggtcatcatccccagcacgtacgtcccgggcaccaccaaccacgacatcgcgctgctccgcctgcaccagcccgtggtcctcactgaccatgtggtgcccctctgcctgcccgaacggacgttctctgagaggacgctggccttcgtgcgcttctcattggtcagcggctggggccagctgctggaccgtggcgccacggccctggagctcatggtcctcaacgtgccccggctgatgacccaggactgcctgcagcagtcacggaaggtgggagactccccaaatatcacggagtacatgttctgtgccggctactcggatggcagcaaggactcctgcaagggggacagtggaggcccacatgccacccactaccggggcacgtggtacctgacgggcatcgtcagctggggccagggctgcgcaaccgtgggccactttggggtgtacaccagggtctcccagtacatcgagtggctgcaaaagctcatgcgctcagagccacgcccaggagtcctcctgcgagccccatttccctagcccagcagccctggcctgtggagagaaagccaaggctgcgtcgaactgtcctggcaccaaatcccatatattcttctgcagttaatggggtagaggagggcatgggag

SEQ ID NO: 94449 - DNA, 1194 bp, Artificial Sequence
  derived and/or modified sequence
atgggaaatgtgaaccggcagggccagcactgccgggacttcatcatggtgtcccaggccctgcggctgctgtgcctgctgctgggcctgcagggctgcctggccgcagatggagaccagtgtgccagcagcccctgccagaatggaggcagctgcaaggaccagctgcagagctacatctgcttctgcctgcctgcctttgagggcaggaactgtgagacccacaaggatgaccagctgatctgtgtgaatgaaaatggaggctgtgagcagtactgcagcgaccacacaggcaccaagaggagctgccgctgccacgagggctacagcctgctggctgatggagtgtcctgcacccccaccgtggagtacccctgtgggaagatccccatcctggagaagagaaatgccagcaagccccagggccgcatcgtgggcggcaaggtgtgccccaagggggagtgcccctggcaggtgctgctgctggtgaatggagcccagctgtgtggcggcaccctcatcaacaccatctgggtggtgtctgctgcccactgctttgacaagatcaagaactggaggaacctgattgctgtgctgggggagcatgacctgtctgaacatgatggagatgagcagagccggcgggtggcccaggtgatcatccccagcacctacgtgcccggcaccaccaaccacgacatcgccctgctgcggctgcaccagcctgtggtgctgacagaccacgtggtgcccctgtgcctgcctgagaggaccttcagcgagaggaccctggcctttgtgcgcttcagcctggtgtctggctggggccagctgctggacagaggagccacagccctggagctgatggtgctgaatgtgccccggctgatgacccaggactgcctgcagcagagcaggaaggtgggggacagccccaacatcacagagtacatgttctgtgccggctacagtgatggcagcaaggacagctgcaagggggacagcggcggcccccacgccacccactaccggggcacctggtacctgaccggcatcgtgtcctggggccagggctgtgccaccgtgggccactttggagtgtacaccagggtgtcccagtacatcgagtggctgcagaagctgatgaggtctgagcccaggcctggggtgctgctgcgggcccccttcccctag

SEQ ID NO: 94450 - DNA, 1194 bp, Artificial Sequence
  derived and/or modified sequence
atgggcaacgtgaaccggcagggccagcactgccgggacttcatcatggtgagtcaggccctgcgcctactctgcctgctgcttggccttcagggctgtcttgcagcagacggagatcaatgtgcaagttcaccatgccaaaatggcggcagctgtaaggatcagctgcagagctacatctgcttctgtttacctgcctttgagggaaggaattgcgagacacacaaggatgatcagctgatatgtgtgaatgaaaacgggggttgcgagcagtactgcagcgatcacaccggcacaaaacgaagttgccgctgccacgagggctattctctgctggccgatggggttagctgcacaccaacagtcgagtatccctgtggtaaaatccctatactggagaaaagaaacgccagcaaaccgcagggccgaatcgtgggcggtaaggtctgccctaaaggcgaatgcccctggcaggtattgctcctagtcaatggtgcacaactatgcggaggaaccctaatcaacactatctgggtggtcagcgcagcacactgtttcgacaaaatcaaaaactggagaaatctgatcgccgtgctgggggagcacgatttaagcgaacacgacggcgatgagcaatccaggcgtgtcgctcaggtgattattccaagtacatatgttcctggtaccaccaatcacgatattgcactgctgcgactgcaccaacccgttgtgctcactgaccacgtcgtccccctttgcctgccggaacggacgttttcagaacggacgctagcctttgtcagatttagcttggtgagtggctggggtcaactgcttgatcgaggcgctactgctctcgaactgatggtattgaacgtacccagactcatgacacaggactgtctgcagcaatcacgcaaggtcggcgactctccaaatatcaccgagtacatgttctgtgccggatacagtgatgggtccaaagatagctgcaaaggtgacagcggggggcctcacgctacccattatcgcggtacgtggtatttaaccggaattgtgtcttggggtcagggttgcgctactgtggggcacttcggagtctacactcgagtgagccaatatatagaatggttgcagaagctcatgcgcagcgagcctcggcctggcgttctccttagggctccgtttccgtag

SEQ ID NO: 94451 - DNA, 1194 bp, Artificial Sequence
  derived and/or modified sequence
atgggaaatgtgaacaggcagggccagcattgccgggatttcatcatggtgtctcaggctctcagacttctttgtctacttctcgggttacagggatgtctcgctgcagacggtgatcaatgtgcttcatcaccatgccagaatggtgggtcctgtaaggatcagctccagtcctatatatgcttctgtctccccgcattcgagggcaggaactgtgaaacacacaaagatgatcaactcatctgtgtgaatgaaaacggcggttgtgaacagtattgctccgaccatacaggaaccaagagatcatgccgctgccacgaggggtattctctgcttgccgacggagtctcctgtacgcccactgttgaatacccctgcgggaagatccccatcctcgagaaacggaacgccagcaagccccagggccgaattgtcgggggaaaggtgtgccctaagggcgaatgcccatggcaagtcctgctgctcgtcaatggagcccagctgtgtgggggaactctgatcaacacaatctgggttgtgtctgccgctcactgcttcgacaagatcaagaattggcgtaacctgattgccgtgcttggggagcacgatttgtccgagcacgacggtgatgagcagtccagacgggtggctcaagtgatcattccctcaacatatgttccagggaccacaaaccatgacattgccctgcttaggttgcatcagcctgtcgtcttgaccgaccacgtggtgccactgtgtctgccagagcgtactttcagcgagcgaactctggccttcgttaggttctctctcgtcagtggttggggacagttgctagatcggggtgcaacagccctcgagctcatggtgctcaacgtgcctcgcttgatgacgcaggattgtttacagcaatctcgcaaagtgggcgacagtcccaacatcacagagtacatgttctgcgctgggtactctgacggctccaaggactcctgtaagggggattctggtggccctcacgccacccattaccgaggtacctggtacctgaccgggattgtgagctggggccaggggtgcgcgacggtgggccatttcggcgtctatacccgcgtctctcagtatatagaatggctgcagaagctgatgagaagtgagcctaggcctggtgtactgctgcgcgcaccttttccatag

SEQ ID NO: 94452 - DNA, 1194 bp, Artificial Sequence
  derived and/or modified sequence
atgggaaacgtgaacaggcagggtcagcattgtcgcgatttcatcatggtgtcacaggcactgcgcctgctgtgtctgttattgggactacagggctgcttagctgctgacggagatcaatgcgcttcctctccatgtcagaacggcggctcttgtaaagatcagctccagagttacatatgcttttgcctgcccgctttcgaaggccgtaactgcgaaacgcacaaggacgatcagctcatttgcgtcaatgagaatggggggtgcgagcaatattgtagcgaccacacaggaacgaaaagatcgtgcagatgccacgaaggctattcactgcttgctgatggcgtgtcctgcacccccacagtcgagtacccatgcgggaagatccccatattagaaaagagaaacgcttctaagccacaggggaggatagtgggcggtaaagtgtgtcccaaaggagagtgcccatggcaggtactgctgttggtgaacggggcccagctctgcgggggtactctgatcaacacaatttgggtggtgagtgcagcgcactgctttgataagataaagaattggagaaacctcatcgccgtgctgggcgagcatgatctcagtgaacacgatggtgacgagcagtccagaagagtcgcccaagttatcatacccagtacctacgtcccaggcacgaccaatcacgatatagcccttctcagactgcatcagccagttgtactcactgaccacgtagtcccactatgcctccctgagaggactttttcagagcgaacgctggcttttgttaggttctctctcgtctcagggtggggccagcttctggacagaggcgcgacggctcttgagctcatggtgctgaatgttccccgtcttatgacacaggattgcctgcaacagagtcggaaggtaggtgatagtccgaatattaccgagtacatgttctgtgctggctactcggatgggtcaaaggacagctgcaaaggggactccggcggcccccacgcgacccactaccgcgggacgtggtacctcaccgggatagtgtcatgggggcagggatgcgctactgtcggtcacttcggcgtttatacacgtgtgagtcagtatattgagtggcttcaaaaactcatgcgatcagaaccacgacccggggtcctgctgagagcaccttttccatag

SEQ ID NO: 94453 - DNA, 1194 bp, Artificial Sequence
  derived and/or modified sequence
atgggcaacgtgaatcggcagggacagcattgccgtgacttcataatggtatctcaggccttacggctcttatgtcttttacttggattgcagggctgccttgccgccgacggagaccagtgcgcttcttccccttgccagaatggcggatcatgcaaggatcaactgcagagttacatttgcttttgcctgcctgctttcgagggacggaactgtgaaactcataaggatgatcagcttatatgcgtgaatgaaaatggcggatgcgaacagtattgctcagatcatacaggaactaaacgatcctgtagatgtcacgaaggctactcactacttgctgatggcgttagctgcacccctactgtagaatatccatgtgggaaaatccccattttagagaagcgaaacgctagtaagcctcaaggtcggatcgtaggcggaaaagtttgtcccaagggcgagtgtccctggcaggtgctgctactggtgaacggcgctcaactgtgtgggggaaccctgatcaatactatctgggtggtatctgcagcccattgtttcgacaagattaaaaactggaggaacctgattgcagtgcttggagagcacgatcttagcgaacatgatggtgacgaacagagcagacgagtggcccaggtcattatccctagtacctatgtgcctggaactaccaatcacgatattgctcttctccggcttcatcagccagtggttctgaccgaccacgtggtgcccctgtgcctcccagaaaggaccttctcagaacgtaccctggctttcgtgcgtttctctctggtatcaggatggggacagctgcttgacaggggagcaaccgctctggagttaatggtccttaacgttccccgccttatgacccaggactgtctacagcagtctagaaaggtaggtgatagccccaatataaccgagtacatgttctgcgcaggatacagcgacggctccaaggatagctgcaagggcgatagtgggggtcctcacgccacgcattacaggggcacatggtacctcactggcatcgtctcatgggggcaaggttgtgcaacagtcgggcacttcggtgtgtacactagagtgagtcaatacatagaatggctgcagaaacttatgcgaagcgaacctcgtccgggggtcctcctcagggcaccatttccctag

SEQ ID NO: 94454 - RNA, 1194 nt, Artificial Sequence
  derived and/or modified sequence
augggaaacgugaacaggcagggucagcauugucgcgauuucaucauggugucacaggcacugcgccugcugugucuguuauugggacuacagggcugcuuagcugcugacggagaucaaugcgcuuccucuccaugucagaacggcggcucuuguaaagaucagcuccagaguuacauaugcuuuugccugcccgcuuucgaaggccguaacugcgaaacgcacaaggacgaucagcucauuugcgucaaugagaauggggggugcgagcaauauuguagcgaccacacaggaacgaaaagaucgugcagaugccacgaaggcuauucacugcuugcugauggcguguccugcacccccacagucgaguacccaugcgggaagauccccauauuagaaaagagaaacgcuucuaagccacaggggaggauagugggcgguaaagugugucccaaaggagagugcccauggcagguacugcuguuggugaacggggcccagcucugcggggguacucugaucaacacaauuuggguggugagugcagcgcacugcuuugauaagauaaagaauuggagaaaccucaucgccgugcugggcgagcaugaucucagugaacacgauggugacgagcaguccagaagagucgcccaaguuaucauacccaguaccuacgucccaggcacgaccaaucacgauauagcccuucucagacugcaucagccaguuguacucacugaccacguagucccacuaugccucccugagaggacuuuuucagagcgaacgcuggcuuuuguuagguucucucucgucucaggguggggccagcuucuggacagaggcgcgacggcucuugagcucauggugcugaauguuccccgucuuaugacacaggauugccugcaacagagucggaagguaggugauaguccgaauauuaccgaguacauguucugugcuggcuacucggaugggucaaaggacagcugcaaaggggacuccggcggcccccacgcgacccacuaccgcgggacgugguaccucaccgggauagugucaugggggcagggaugcgcuacugucggucacuucggcguuuauacacgugugagucaguauauugaguggcuucaaaaacucaugcgaucagaaccacgacccgggguccugcugagagcaccuuuuccauag

SEQ ID NO: 94455 - RNA, 1194 nt, Artificial Sequence
  derived and/or modified sequence
augggcaacgugaaucggcagggacagcauugccgugacuucauaaugguaucucaggccuuacggcucuuaugucuuuuacuuggauugcagggcugccuugccgccgacggagaccagugcgcuucuuccccuugccagaauggcggaucaugcaaggaucaacugcagaguuacauuugcuuuugccugccugcuuucgagggacggaacugugaaacucauaaggaugaucagcuuauaugcgugaaugaaaauggcggaugcgaacaguauugcucagaucauacaggaacuaaacgauccuguagaugucacgaaggcuacucacuacuugcugauggcguuagcugcaccccuacuguagaauauccaugugggaaaauccccauuuuagagaagcgaaacgcuaguaagccucaaggucggaucguaggcggaaaaguuugucccaagggcgagugucccuggcaggugcugcuacuggugaacggcgcucaacugugugggggaacccugaucaauacuaucugggugguaucugcagcccauuguuucgacaagauuaaaaacuggaggaaccugauugcagugcuuggagagcacgaucuuagcgaacaugauggugacgaacagagcagacgaguggcccaggucauuaucccuaguaccuaugugccuggaacuaccaaucacgauauugcucuucuccggcuucaucagccagugguucugaccgaccacguggugccccugugccucccagaaaggaccuucucagaacguacccuggcuuucgugcguuucucucugguaucaggauggggacagcugcuugacaggggagcaaccgcucuggaguuaaugguccuuaacguuccccgccuuaugacccaggacugucuacagcagucuagaaagguaggugauagccccaauauaaccgaguacauguucugcgcaggauacagcgacggcuccaaggauagcugcaagggcgauaguggggguccucacgccacgcauuacaggggcacaugguaccucacuggcaucgucucaugggggcaagguugugcaacagucgggcacuucgguguguacacuagagugagucaauacauagaauggcugcagaaacuuaugcgaagcgaaccucguccggggguccuccucagggcaccauuucccuag

SEQ ID NO: 94456 - protein, 189 aa, Artificial Sequence
  derived and/or modified sequence
MAAYSYRPGPGAGPGPAAGAALPDQSFLWNVFQRVDKDRSGVISDTELQQALSNGTWTPFNPVTVRSIISMFDRENKAGVNFSEFTGVWKYITDWQNVFRTYDRDNSGMIDKNELKQALSGYRLSDQFHDILIRKFDRQGRGQIAFDDFIQGCIVLQRLTDIFRRYDTDQDGWIQVSYEQYLSMVFSIV

SEQ ID NO: 94457 - DNA, 570 bp, Artificial Sequence
  derived and/or modified sequence
atggccgcctacagctacagacccggccccggcgccggccccggccccgccgccggcgccgccctgcccgaccagagcttcctgtggaacgtgttccagagagtggacaaggacagaagcggcgtgatcagcgacaccgagctgcagcaggccctgagcaacggcacctggacccccttcaaccccgtgaccgtgagaagcatcatcagcatgttcgacagagagaacaaggccggcgtgaacttcagcgagttcaccggcgtgtggaagtacatcaccgactggcagaacgtgttcagaacctacgacagagacaacagcggcatgatcgacaagaacgagctgaagcaggccctgagcggctacagactgagcgaccagttccacgacatcctgatcagaaagttcgacagacagggcagaggccagatcgccttcgacgacttcatccagggctgcatcgtgctgcagagactgaccgacatcttcagaagatacgacaccgaccaggacggctggatccaggtgagctacgagcagtacctgagcatggtgttcagcatcgtgtag

SEQ ID NO: 94458 - DNA, 570 bp, Artificial Sequence
  derived and/or modified sequence
atggccgcatactcatacaggcccggtcccggagcgggccctggcccggcagccggagcagctctgcccgaccaatcattcttgtggaacgtattccagagggtggacaaagacagatctggcgttatttctgatacagaactgcagcaggccttgagtaatggtacatggacgccatttaaccctgtgacagtgcgcagcatcatttcaatgttcgaccgggagaacaaggccggtgtgaatttcagtgagtttactggagtatggaagtatatcaccgattggcagaacgtgttcaggacctatgaccgagataattcgggaatgatcgataagaatgagctgaagcaagccctttctggttaccggttgtccgaccagtttcacgacatcctgatcaggaaattcgataggcagggcagaggccagattgcgtttgacgactttatccaggggtgtattgtactgcagcggctgacagacatcttcagacgctacgataccgatcaggacggctggatccaggtgagttacgagcagtatctgagcatggtgttctcaattgtctag

SEQ ID NO: 94459 - DNA, 570 bp, Artificial Sequence
  derived and/or modified sequence
atggccgcctacagctaccggcccggccctggggccggccctggccctgctgctggggccgccctgcctgaccagagcttcctgtggaatgtgttccagagggtggacaaggacagaagtggagtcatcagtgacacagagctgcagcaggccctgagcaatggcacctggacccccttcaaccctgtgacagtgcgcagcatcatctccatgtttgaccgggagaacaaggccggcgtgaacttcagcgagttcaccggggtgtggaagtacatcacagactggcagaatgtgttccgcacctatgaccgggacaacagcggcatgattgacaagaatgagctgaagcaggccctgagcggctaccgcctgagtgaccagttccatgacatcctgatcaggaagtttgaccggcagggccggggccagatcgcctttgatgacttcatccagggctgcatcgtgctgcagaggctgacagacatcttccgccgctatgacacagaccaggacggctggatccaggtgtcctatgagcagtacctgtccatggtgttcagcatcgtgtag

SEQ ID NO: 94460 - DNA, 570 bp, Artificial Sequence
  derived and/or modified sequence
atggccgcctacagctaccggcccggccccggcgccggccccggccctgccgcaggagctgctcttcccgaccagagctttttatggaacgtcttccagagagttgataaagatagatccggggtgatctccgacacagagctccagcaggccctgtccaatggcacttggacccccttcaaccccgtcaccgtcagaagcattatatcaatgtttgacagggaaaacaaggcaggagttaacttctccgaatttactggtgtttggaagtatattaccgactggcagaatgtgttcagaacttatgaccgtgataattctggtatgattgataagaatgagctgaaacaggcactgtcaggatatagactcagcgatcaatttcacgatattctcattagaaagttcgataggcagggacgcgggcagatcgccttcgatgactttatccagggctgcatcgttctgcagaggctgactgatatctttcggagatatgacaccgatcaagatggctggatacaagtgtcctatgagcagtacctgtccatggtgttctcgattgtctag

SEQ ID NO: 94461 - DNA, 1088 bp, Artificial Sequence
  derived and/or modified sequence
cggagtcggcctgagaggtctctcgtcgctgcaggcgcctcagcccagccgcgtgccttggcccatggccgcctactcttaccgccccggccctggggccggccctgggcctgctgcaggcgcggcgctgccggaccagagcttcctgtggaacgttttccagagggtcgataaagacaggagtggagtgatatcagacaccgagcttcagcaagctctctccaacggcacgtggactccctttaatccagtgactgtcaggtcgatcatatccatgtttgaccgtgagaacaaggccggcgtgaacttcagcgagttcacgggtgtgtggaagtacatcacggactggcagaacgtcttccgcacgtacgaccgggacaactccgggatgatcgataagaacgagctgaagcaggccctctcaggctaccggctctctgaccagttccacgacatcctcattcgaaagtttgacaggcagggacgggggcagattgccttcgacgacttcatccagggctgcatcgtcctgcagaggttgacggatatattcagacgttacgacacggatcaggacggctggattcaggtgtcgtacgaacagtacctgtccatggtcttcagtatcgtatgaccctggcctctcgtgaagagcagcacaacatggaaagagccaaaatgtcacagttcctatctgtgagggaatggagcacaggtgcagttagatgctgttcttcctttagattttgtcacgtggggacccagctgtacatatgtggataagctgattaatggttttgcaactgtaatagtagctgtatcgttctaatgcagacattggatttggtgactgtctcattgtgccatgaggtaaatgtaatgtttcaggcattctgcttgcaaaaaaatctatcatgtgcttttctagatgtctctggttctatagtgcaaatgcttttattagccaataggaattttaaaataacatggaacttacacaaaaggcttttcatgtgccttacttttttaaaaaggagtttattgtattcattggaatatgtgacgtaagcaataaagggaatgttaga

SEQ ID NO: 94462 - DNA, 570 bp, Artificial Sequence
  derived and/or modified sequence
atggcagcatatagctatcggccagggcctggcgctgggccaggccctgccgctggcgcagccctcccagaccaatctttcctctggaatgtttttcagcgggtcgacaaggatagaagtggcgtgatatcagacaccgagctgcaacaggctttgtctaatggaacgtggaccccatttaaccccgtgacagtcaggtccattattagcatgttcgaccgggaaaacaaagcgggagtgaatttcagcgagtttactggcgtgtggaagtacattaccgattggcagaatgtattccggacttacgatcgggataatagtggcatgatcgacaaaaatgaactcaaacaggcccttagcggctaccgactgagcgaccagttccacgatattctcattcggaaattcgaccgacagggccgaggccagatcgcgttcgatgacttcattcaggggtgcatcgtgctgcagagacttacagacattttccggaggtatgacacagatcaagacgggtggatccaggtctcttacgagcaatacctgtctatggtgttctccatcgtgtag

SEQ ID NO: 94463 - protein, 55 aa, Artificial Sequence
  derived and/or modified sequence
MAAYSYRPGPGAGPGPAAGAALPDQSFLWNVFQRVDKDRSGVISDTELQQALSNG

SEQ ID NO: 94464 - protein, 69 aa, Artificial Sequence
  derived and/or modified sequence
MAAYSYRPGPGAGPGPAAGAALPDQSFLWNVFQRVDKDRSGVISDTELQQALSNGTWTPFNPVTVRSII

SEQ ID NO: 94465 - protein, 73 aa, Artificial Sequence
  derived and/or modified sequence
MAAYSYRPGPGAGPGPAAGAALPDQSFLWNVFQRVDKDRSGVISDTELQQALSNGTWTPFNPVTVRSIICRGR

SEQ ID NO: 94466 - DNA, 210 bp, Artificial Sequence
  derived and/or modified sequence
atggccgcctacagctacagacccggccccggcgccggccccggccccgccgccggcgccgccctgcccgaccagagcttcctgtggaacgtgttccagagagtggacaaggacagaagcggcgtgatcagcgacaccgagctgcagcaggccctgagcaacggcacctggacccccttcaaccccgtgaccgtgagaagcatcatctag

SEQ ID NO: 94467 - DNA, 222 bp, Artificial Sequence
  derived and/or modified sequence
atggccgcctacagctacagacccggccccggcgccggccccggccccgccgccggcgccgccctgcccgaccagagcttcctgtggaacgtgttccagagagtggacaaggacagaagcggcgtgatcagcgacaccgagctgcagcaggccctgagcaacggcacctggacccccttcaaccccgtgaccgtgagaagcatcatctgcagaggcagatag

SEQ ID NO: 94468 - DNA, 168 bp, Artificial Sequence
  derived and/or modified sequence
atggccgcctacagctacagacccggccccggcgccggccccggccccgccgccggcgccgccctgcccgaccagagcttcctgtggaacgtgttccagagagtggacaaggacagaagcggcgtgatcagcgacaccgagctgcagcaggccctgagcaacggctag

SEQ ID NO: 94469 - DNA, 210 bp, Artificial Sequence
  derived and/or modified sequence
atggctgcatattcctatcgaccaggacctggggccggacccgggcctgctgccggcgcagcgctgcctgaccaatcttttctttggaatgtcttccagcgagtggacaaagacagaagtggggtcattagcgatacagagctgcaacaggctctttcaaatggaacttggactccctttaatccggtcacggtgcgcagtatcatatag

SEQ ID NO: 94470 - DNA, 222 bp, Artificial Sequence
  derived and/or modified sequence
atggccgcctacagctaccgacctggtcctggcgccggtccgggccccgcggcaggagctgctctgccagaccagtctttcctatggaacgtctttcagagagtcgataaagaccgctccggggtcatctctgatacagaattgcagcaggcactctcaaatgggacctggacccccttcaacccagtgacggtccggagcatcatctgtcgagggcgatag

SEQ ID NO: 94471 - DNA, 168 bp, Artificial Sequence
  derived and/or modified sequence
atggcggcctacagttaccgaccggggcctggcgccggtcccggaccagctgccggcgccgctctccctgatcagtctttcctctggaacgtgttccagcgtgtcgacaaagacaggtcgggggtgatcagcgatacggagctgcagcaggctttatcaaatgggtag

SEQ ID NO: 94472 - DNA, 210 bp, Artificial Sequence
  derived and/or modified sequence
atggccgcctacagctaccggcccggccctggggccggccctggccctgctgctggggccgccctgcctgaccagagcttcctgtggaatgtgttccagagggtggacaaggacagaagtggagtcatcagtgacacagagctgcagcaggccctgagcaatggcacctggacccccttcaaccctgtgacagtgcgcagcatcatctag

SEQ ID NO: 94473 - DNA, 222 bp, Artificial Sequence
  derived and/or modified sequence
atggccgcctacagctaccggcccggccctggggccggccctggccctgctgctggggccgccctgcctgaccagagcttcctgtggaatgtgttccagagggtggacaaggacagaagtggagtcatcagtgacacagagctgcagcaggccctgagcaatggcacctggacccccttcaaccctgtgacagtgcgcagcatcatctgccggggccgctag

SEQ ID NO: 94474 - DNA, 168 bp, Artificial Sequence
  derived and/or modified sequence
atggccgcctacagctaccggcccggccctggggccggccctggccctgctgctggggccgccctgcctgaccagagcttcctgtggaatgtgttccagagggtggacaaggacagaagtggagtcatcagtgacacagagctgcagcaggccctgagcaatggatag

SEQ ID NO: 94475 - DNA, 210 bp, Artificial Sequence
  derived and/or modified sequence
atggccgcctacagctaccggcccggccccggcgccggccccggccccgccgctggcgctgcgttacctgatcagagttttctctggaatgtgtttcagcgtgtggacaaagacagaagcggcgtgatttcagatacagagctgcagcaagctttatctaatgggacatggaccccattcaaccctgtgaccgtcaggagtatcatctag

SEQ ID NO: 94476 - DNA, 222 bp, Artificial Sequence
  derived and/or modified sequence
atggccgcctacagctaccggcccggccccggcgccggccccggccctgcagccggcgccgcccttccggatcagagctttctctggaacgtgttccaaagagttgataaggatagatctggggtgatatcagacaccgagctccagcaagccttgtctaatggtacatggacacctttcaacccagtgaccgtgcggagcataatatgtagaggccgatag

SEQ ID NO: 94477 - DNA, 168 bp, Artificial Sequence
  derived and/or modified sequence
atggccgcctacagctaccggcccggccccggcgccggccccggcccagccgctggcgccgccctgcccgatcaatcctttctttggaatgtgtttcagcgcgtggataaggacagatcaggcgtcatctccgatactgagctgcagcaagccctgtcgaatggctag

SEQ ID NO: 94478 - DNA, 672 bp, Artificial Sequence
  derived and/or modified sequence
gaggcggaagcggagtcggcctgagaggtctctcgtcgctgcaggcgcctcagcccagccgcgtgccttggcccatggccgcctactcttaccgccccggccctggggccggccctgggcctgctgcaggcgcggcgctgccggaccagagcttcctgtggaacgttttccagagggtcgataaagacaggagtggagtgatatcagacaccgagcttcagcaagctctctccaacggcacgtggactccctttaatccagtgactgtcaggtcgatcatataggttgacggatatattcagacgttacgacacggatcaggacggctggattcaggtgtcgtacgaacagtacctgtccatggtcttcagtatcgtatgaccctggcctctcgtgaagagcagcacaacatggaaagagccaaaatgtcacagttcctatctgtgagggaatggagcacaggtgcagttagatgctgttcttcctttagattttgtcacgtggggacccagctgtacatatgtggataagctgattaatggttttgcaactgtaatagtagctgtatcgttctaatgcagacattggatttggtgactgtctcattgtgccatgaggtaaatgtaatgtttcaggcattctgcttgcaaaaaaatctatcatgtgcttttc

SEQ ID NO: 94479 - DNA, 458 bp, Artificial Sequence
  derived and/or modified sequence
agaggtctctcgtcgctgcaggcgcctcagcccagccgcgtgccttggcccatggccgcctactcttaccgccccggccctggggccggccctgggcctgctgcaggcgcggcgctgccggaccagagcttcctgtggaacgttttccagagggtcgataaagacaggagtggagtgatatcagacaccgagcttcagcaagctctctccaacggcacgtggactccctttaatccagtgactgtcaggtcgatcatatgccgaggacgatgatcccgccgggggagtgcacgtacgcgggccggaagcggaggaggcccctgcagaaacagaggcccgccgtgggggcagagaagtccaacccctccaagcgacaccgggaccgcctcaacgccgagttggaccacctggccagcctgctgccgttcccgcctgacatcatctccaagctggacaag

SEQ ID NO: 94480 - DNA, 1156 bp, Artificial Sequence
  derived and/or modified sequence
cggagtcggcctgagaggtctctcgtcgctgcaggcgcctcagcccagccgcgtgccttggcccatggccgcctactcttaccgccccggccctggggccggccctgggcctgctgcaggcgcggcgctgccggaccagagcttcctgtggaacgttttccagagggtcgataaagacaggagtggagtgatatcagacaccgagcttcagcaagctctctccaacggatgaagccccacccgcccttcaggatgccagccttggcaacattgtgagaccctgtttctacaaaaagtaaatgagtgtagtggtgcacgcctgtattcccagctacttgggaggctgagatgggaagatcacttgagcctgggaggttgaggctgcattgagctgagatcaagccacggcactccagcctgggagacagagcgaaaccccatctcaaaaaaacaaagaaagtggatgcgcgctgctcctgccattggatcatcgcagcatttttcttttctctgatatgcacctttttcctcatcgtgggggctcacgttttcatagttccctctcactactaggttgtgagctgcgtgaaggaaggttcatagttgtgttgtatgtacaggcacacaaaatttgtccttggataaacacatatcctcttccttcttctctctgaatttctttattttaagaaaaaaattagagatggagtctcactgtcttgctcaggctggtctcaaactcctaggctcaagtgatcctcctgcctcagcctatactaatatgaattcctatactaatatgattgaaattagtttgatttctataataattgtgctcccagattgggcttctgttttgatagtagaactaaattattaggctatttcaagaaattaatatattactggtagaaaaactgaagctacaaaatggcctggtttctcacttcagttaaatttgtgcttctgagtgcttgtattctaggtgaaaccacactgagaaggtatttgtggcccatacactgattccttcatgagacttgtttgcacaggagagctgctaaaaattactgctctcagggaggtctgtggtgaacaggtatgaagaagaagactgttctctgcccttctttttgcaataaaatgttccaaacta

SEQ ID NO: 94481 - DNA, 210 bp, Artificial Sequence
  derived and/or modified sequence
atggccgcttactcctaccgtcccggacctggtgccggaccagggcctgccgctggtgccgctttacctgaccagtcctttctgtggaatgtttttcaaagagtggataaggacagaagcggagttatcagcgacacggagctgcagcaagctctgtctaatggcacttggacaccatttaatccagtgacagtcaggagcatcatttag

SEQ ID NO: 94482 - DNA, 222 bp, Artificial Sequence
  derived and/or modified sequence
atggcagcgtattcctatcgaccaggtccgggagccggaccgggtcccgctgccggagcggcactgccggatcaaagtttcctctggaacgtgtttcagcgcgtcgataaagatcgctccggggtgatttcagatactgaacttcagcaggctctgtccaacggcacgtggaccccgttcaaccccgtgactgtccgatccattatttgccgagggcgatag

SEQ ID NO: 94483 - DNA, 168 bp, Artificial Sequence
  derived and/or modified sequence
atggcagcatactcttacaggccagggcctggagctggtccgggaccagccgctggcgcagctctgccagatcagtcttttctatggaacgtattccagcgcgttgataaagatcgatccggtgtgatcagcgacaccgaactgcagcaggccctttcaaatggctag

SEQ ID NO: 94484 - protein, 933 aa, Artificial Sequence [sequence omitted]

SEQ ID NO: 94485 - protein, 928 aa, Artificial Sequence
  derived and/or modified sequence
MAVRFQVADMEELTIWEQHTATLSKDPRRGFGIAISGGRDRPGGSMVVSDVVPGGPAEGRLQTGDHIVMVNGVSMENATSAFAIQILKTCTKMANITVKRPRRIHLPATKASPSSPGRQDSDEDDGPQRVEEVDQGRGYDGDSSSGSGRSWDERSRRPRPGRRGRAGSHGRRSPGGGSEANGLALVSGFKRLPRQDVQMKPVKSVLVKRRDSEEFGVKLGSQIFIKHITDSGLAARHRGLQEGDLILQINGVSSQNLSLNDTRRLIEKSEGKLSLLVLRDRGQFLVNIPPAVSDSDSSPLEDISDLASELSQAPPSHIPPPPRHAQRSPEASQTDSPVESPRLRRESSVDSRTISEPDEQRSELPRESSYDIYRVPSSQSMEDRGYSPDTRVVRFLKGKSIGLRLAGGNDVGIFVSGVQAGSPADGQGIQEGDQILQVNDVPFQNLTREEAVQFLLGLPPGEEMELVTQRKQDIFWKMVQSRVGDSFYIRTHFELEPSPPSGLGFTRGDVFHVLDTLHPGPGQSHARGGHWLAVRMGRDLREQERGIIPNQSRAEQLASLEAAQRAVGVGPGSSAGSNARAEFWRLRGLRRGAKKTTQRSREDLSALTRQGRYPPYERVVLREASFKRPVVILGPVADIAMQKLTAEMPDQFEIAETVSRTDSPSKIIKLDTVRVIAEKDKHALLDVTPSAIERLNYVQYYPIVVFFIPESRPALKALRQWLAPASRRSTRRLYAQAQKLRKHSSHLFTATIPLNGTSDTWYQELKAIIREQQTRPIWTAEDQLDGSLEDNLDLPHHGLADSSADLSCDSRVNSDYETDGEGGAYTDGEGYTDGEGGPYTDVDDEPPAPALARSSEPVQADESQSPRDRGRISAHQGAQVDSRHPQGQWRQDSMRTYEREALKKKFMRVHDAESSDEDGYDWGPATDL

SEQ ID NO: 94486 - protein, 952 aa, Artificial Sequence
  derived and/or modified sequence
MNLCGLMPIFPAPLDQVADMEELTIWEQHTATLSKDPRRGFGIAISGGRDRPGGSMVVSDVVPGGPAEGRLQTGDHIVMVNGVSMENATSAFAIQILKTCTKMANITVKRPRRIHLPATKASPSSPGRQDSDEDDGPQRVEEVDQGRGYDGDSSSGSGRSWDERSRRPRPGRRGRAGSHGRRSPGGGSEANGLALVSGFKRLPRQDVQMKPVKSVLVKRRDSEEFGVKLGSQIFIKHITDSGLAARHRGLQEGDLILQINGVSSQNLSLNDTRRLIEKSEGKLSLLVLRDRGQFLVNIPPAVSDSDSSPLEEGVTMADEMSSPPADISDLASELSQAPPSHIPPPPRHAQRSPEASQTDSPVESPRLRRESSVDSRTISEPDEQRSELPRESSYDIYRVPSSQSMEDRGYSPDTRVVRFLKGKSIGLRLAGGNDVGIFVSGVQAGSPADGQGIQEGDQILQVNDVPFQNLTREEAVQFLLGLPPGEEMELVTQRKQDIFWKMVQSRVGDSFYIRTHFELEPSPPSGLGFTRGDVFHVLDTLHPGPGQSHARGGHWLAVRMGRDLREQERGIIPNQSRAEQLASLEAAQRAVGVGPGSSAGSNARAEFWRLRGLRRGAKKTTQRSREDLSALTRQGRYPPYERVVLREASFKRPVVILGPVADIAMQKLTAEMPDQFEIAETVSRTDSPSKIIKLDTVRVIAEKDKHALLDVTPSAIERLNYVQYYPIVVFFIPESRPALKALRQWLAPASRRSTRRLYAQAQKLRKHSSHLFTATIPLNGTSDTWYQELKAIIREQQTRPIWTAEDQLDGSLEDNLDLPHHGLADSSADLSCDSRVNSDYETDGEGGAYTDGEGYTDGEGGPYTDVDDEPPAPALARSSEPVQADESQSPRDRGRISAHQGAQVDSRHPQGQWRQDSMRTYEREALKKKFMRVHDAESSDEDGYDWGPATDL

SEQ ID NO: 94487 - protein, 883 aa, Artificial Sequence
  derived and/or modified sequence
MVVSDVVPGGPAEGRLQTGDHIVMVNGVSMENATSAFAIQILKTCTKMANITVKRPRRIHLPATKASPSSPGRQDSDEDDGPQRVEEVDQGRGYDGDSSSGSGRSWDERSRRPRPGRRGRAGSHGRRSPGGGSEANGLALVSGFKRLPRQDVQMKPVKSVLVKRRDSEEFGVKLGSQIFIKHITDSGLAARHRGLQEGDLILQINGVSSQNLSLNDTRRLIEKSEGKLSLLVLRDRGQFLVNIPPAVSDSDSSPLEDISDLASELSQAPPSHIPPPPRHAQRSPEASQTDSPVESPRLRRESSVDSRTISEPDEQRSELPRESSYDIYRVPSSQSMEDRGYSPDTRVVRFLKGKSIGLRLAGGNDVGIFVSGVQAGSPADGQGIQEGDQILQVNDVPFQNLTREEAVQFLLGLPPGEEMELVTQRKQDIFWKMVQSRVGDSFYIRTHFELEPSPPSGLGFTRGDVFHVLDTLHPGPGQSHARGGHWLAVRMGRDLREQERGIIPNQSRAEQLASLEAAQRAVGVGPGSSAGSNARAEFWRLRGLRRGAKKTTQRSREDLSALTRQGRYPPYERVVLREASFKRPVVILGPVADIAMQKLTAEMPDQFEIAETVSRTDSPSKIIKLDTVRVIAEKDKHALLDVTPSAIERLNYVQYYPIVVFFIPESRPALKALRQWLAPASRRSTRRLYAQAQKLRKHSSHLFTATIPLNGTSDTWYQELKAIIREQQTRPIWTAEDQLDGSLEDNLDLPHHGLADSSADLSCDSRVNSDYETDGEGGAYTDGEGYTDGEGGPYTDVDDEPPAPALARSSEPVQADESQSPRDRGRISAHQGAQVDSRHPQGQWRQDSMRTYEREALKKKFMRVHDAESSDEDGYDWGPATDL

SEQ ID NO: 94488 - protein, 919 aa, Artificial Sequence
  derived and/or modified sequence
MEELTIWEQHTATLSKDPRRGFGIAISGGRDRPGGSMVVSDVVPGGPAEGRLQTGDHIVMVNGVSMENATSAFAIQILKTCTKMANITVKRPRRIHLPATKASPSSPGRQDSDEDDGPQRVEEVDQGRGYDGDSSSGSGRSWDERSRRPRPGRRGRAGSHGRRSPGGGSEANGLALVSGFKRLPRQDVQMKPVKSVLVKRRDSEEFGVKLGSQIFIKHITDSGLAARHRGLQEGDLILQINGVSSQNLSLNDTRRLIEKSEGKLSLLVLRDRGQFLVNIPPAVSDSDSSPLEDISDLASELSQAPPSHIPPPPRHAQRSPEASQTDSPVESPRLRRESSVDSRTISEPDEQRSELPRESSYDIYRVPSSQSMEDRGYSPDTRVVRFLKGKSIGLRLAGGNDVGIFVSGVQAGSPADGQGIQEGDQILQVNDVPFQNLTREEAVQFLLGLPPGEEMELVTQRKQDIFWKMVQSRVGDSFYIRTHFELEPSPPSGLGFTRGDVFHVLDTLHPGPGQSHARGGHWLAVRMGRDLREQERGIIPNQSRAEQLASLEAAQRAVGVGPGSSAGSNARAEFWRLRGLRRGAKKTTQRSREDLSALTRQGRYPPYERVVLREASFKRPVVILGPVADIAMQKLTAEMPDQFEIAETVSRTDSPSKIIKLDTVRVIAEKDKHALLDVTPSAIERLNYVQYYPIVVFFIPESRPALKALRQWLAPASRRSTRRLYAQAQKLRKHSSHLFTATIPLNGTSDTWYQELKAIIREQQTRPIWTAEDQLDGSLEDNLDLPHHGLADSSADLSCDSRVNSDYETDGEGGAYTDGEGYTDGEGGPYTDVDDEPPAPALARSSEPVQADESQSPRDRGRISAHQGAQVDSRHPQGQWRQDSMRTYEREALKKKFMRVHDAESSDEDGYDWGPATDL

SEQ ID NO: 94489 - DNA, 2787 bp, Artificial Sequence
  derived and/or modified sequence
atggccgtgagattccaggtggccgacatggaggagctgaccatctgggagcagcacaccgccaccctgagcaaggaccccagaagaggcttcggcatcgccatcagcggcggcagagacagacccggcggcagcatggtggtgagcgacgtggtgcccggcggccccgccgagggcagactgcagaccggcgaccacatcgtgatggtgaacggcgtgagcatggagaacgccaccagcgccttcgccatccagatcctgaagacctgcaccaagatggccaacatcaccgtgaagagacccagaagaatccacctgcccgccaccaaggccagccccagcagccccggcagacaggacagcgacgaggacgacggcccccagagagtggaggaggtggaccagggcagaggctacgacggcgacagcagcagcggcagcggcagaagctgggacgagagaagcagaagacccagacccggcagaagaggcagagccggcagccacggcagaagaagccccggcggcggcagcgaggccaacggcctggccctggtgagcggcttcaagagactgcccagacaggacgtgcagatgaagcccgtgaagagcgtgctggtgaagagaagagacagcgaggagttcggcgtgaagctgggcagccagatcttcatcaagcacatcaccgacagcggcctggccgccagacacagaggcctgcaggagggcgacctgatcctgcagatcaacggcgtgagcagccagaacctgagcctgaacgacaccagaagactgatcgagaagagcgagggcaagctgagcctgctggtgctgagagacagaggccagttcctggtgaacatcccccccgccgtgagcgacagcgacagcagccccctggaggacatcagcgacctggccagcgagctgagccaggccccccccagccacatcccccccccccccagacacgcccagagaagccccgaggccagccagaccgacagccccgtggagagccccagactgagaagagagagcagcgtggacagcagaaccatcagcgagcccgacgagcagagaagcgagctgcccagagagagcagctacgacatctacagagtgcccagcagccagagcatggaggacagaggctacagccccgacaccagagtggtgagattcctgaagggcaagagcatcggcctgagactggccggcggcaacgacgtgggcatcttcgtgagcggcgtgcaggccggcagccccgccgacggccagggcatccaggagggcgaccagatcctgcaggtgaacgacgtgcccttccagaacctgaccagagaggaggccgtgcagttcctgctgggcctgccccccggcgaggagatggagctggtgacccagagaaagcaggacatcttctggaagatggtgcagagcagagtgggcgacagcttctacatcagaacccacttcgagctggagcccagcccccccagcggcctgggcttcaccagaggcgacgtgttccacgtgctggacaccctgcaccccggccccggccagagccacgccagaggcggccactggctggccgtgagaatgggcagagacctgagagagcaggagagaggcatcatccccaaccagagcagagccgagcagctggccagcctggaggccgcccagagagccgtgggcgtgggccccggcagcagcgccggcagcaacgccagagccgagttctggagactgagaggcctgagaagaggcgccaagaagaccacccagagaagcagagaggacctgagcgccctgaccagacagggcagataccccccctacgagagagtggtgctgagagaggccagcttcaagagacccgtggtgatcctgggccccgtggccgacatcgccatgcagaagctgaccgccgagatgcccgaccagttcgagatcgccgagaccgtgagcagaaccgacagccccagcaagatcatcaagctggacaccgtgagagtgatcgccgagaaggacaagcacgccctgctggacgtgacccccagcgccatcgagagactgaactacgtgcagtactaccccatcgtggtgttcttcatccccgagagcagacccgccctgaaggccctgagacagtggctggcccccgccagcagaagaagcaccagaagactgtacgcccaggcccagaagctgagaaagcacagcagccacctgttcaccgccaccatccccctgaacggcaccagcgacacctggtaccaggagctgaaggccatcatcagagagcagcagaccagacccatctggaccgccgaggaccagctggacggcagcctggaggacaacctggacctgccccaccacggcctggccgacagcagcgccgacctgagctgcgacagcagagtgaacagcgactacgagaccgacggcgagggcggcgcctacaccgacggcgagggctacaccgacggcgagggcggcccctacaccgacgtggacgacgagccccccgcccccgccctggccagaagcagcgagcccgtgcaggccgacgagagccagagccccagagacagaggcagaatcagcgcccaccagggcgcccaggtggacagcagacacccccagggccagtggagacaggacagcatgagaacctacgagagagaggccctgaagaagaagttcatgagagtgcacgacgccgagagcagcgacgaggacggctacgactggggccccgccaccgacctgtag

SEQ ID NO: 94490 - DNA, 2859 bp, Artificial Sequence
  derived and/or modified sequence
atgaacctgtgcggcctgatgcccatcttccccgcccccctggaccaggtggccgacatggaggagctgaccatctgggagcagcacaccgccaccctgagcaaggaccccagaagaggcttcggcatcgccatcagcggcggcagagacagacccggcggcagcatggtggtgagcgacgtggtgcccggcggccccgccgagggcagactgcagaccggcgaccacatcgtgatggtgaacggcgtgagcatggagaacgccaccagcgccttcgccatccagatcctgaagacctgcaccaagatggccaacatcaccgtgaagagacccagaagaatccacctgcccgccaccaaggccagccccagcagccccggcagacaggacagcgacgaggacgacggcccccagagagtggaggaggtggaccagggcagaggctacgacggcgacagcagcagcggcagcggcagaagctgggacgagagaagcagaagacccagacccggcagaagaggcagagccggcagccacggcagaagaagccccggcggcggcagcgaggccaacggcctggccctggtgagcggcttcaagagactgcccagacaggacgtgcagatgaagcccgtgaagagcgtgctggtgaagagaagagacagcgaggagttcggcgtgaagctgggcagccagatcttcatcaagcacatcaccgacagcggcctggccgccagacacagaggcctgcaggagggcgacctgatcctgcagatcaacggcgtgagcagccagaacctgagcctgaacgacaccagaagactgatcgagaagagcgagggcaagctgagcctgctggtgctgagagacagaggccagttcctggtgaacatcccccccgccgtgagcgacagcgacagcagccccctggaggagggcgtgaccatggccgacgagatgagcagcccccccgccgacatcagcgacctggccagcgagctgagccaggccccccccagccacatcccccccccccccagacacgcccagagaagccccgaggccagccagaccgacagccccgtggagagccccagactgagaagagagagcagcgtggacagcagaaccatcagcgagcccgacgagcagagaagcgagctgcccagagagagcagctacgacatctacagagtgcccagcagccagagcatggaggacagaggctacagccccgacaccagagtggtgagattcctgaagggcaagagcatcggcctgagactggccggcggcaacgacgtgggcatcttcgtgagcggcgtgcaggccggcagccccgccgacggccagggcatccaggagggcgaccagatcctgcaggtgaacgacgtgcccttccagaacctgaccagagaggaggccgtgcagttcctgctgggcctgccccccggcgaggagatggagctggtgacccagagaaagcaggacatcttctggaagatggtgcagagcagagtgggcgacagcttctacatcagaacccacttcgagctggagcccagcccccccagcggcctgggcttcaccagaggcgacgtgttccacgtgctggacaccctgcaccccggccccggccagagccacgccagaggcggccactggctggccgtgagaatgggcagagacctgagagagcaggagagaggcatcatccccaaccagagcagagccgagcagctggccagcctggaggccgcccagagagccgtgggcgtgggccccggcagcagcgccggcagcaacgccagagccgagttctggagactgagaggcctgagaagaggcgccaagaagaccacccagagaagcagagaggacctgagcgccctgaccagacagggcagataccccccctacgagagagtggtgctgagagaggccagcttcaagagacccgtggtgatcctgggccccgtggccgacatcgccatgcagaagctgaccgccgagatgcccgaccagttcgagatcgccgagaccgtgagcagaaccgacagccccagcaagatcatcaagctggacaccgtgagagtgatcgccgagaaggacaagcacgccctgctggacgtgacccccagcgccatcgagagactgaactacgtgcagtactaccccatcgtggtgttcttcatccccgagagcagacccgccctgaaggccctgagacagtggctggcccccgccagcagaagaagcaccagaagactgtacgcccaggcccagaagctgagaaagcacagcagccacctgttcaccgccaccatccccctgaacggcaccagcgacacctggtaccaggagctgaaggccatcatcagagagcagcagaccagacccatctggaccgccgaggaccagctggacggcagcctggaggacaacctggacctgccccaccacggcctggccgacagcagcgccgacctgagctgcgacagcagagtgaacagcgactacgagaccgacggcgagggcggcgcctacaccgacggcgagggctacaccgacggcgagggcggcccctacaccgacgtggacgacgagccccccgcccccgccctggccagaagcagcgagcccgtgcaggccgacgagagccagagccccagagacagaggcagaatcagcgcccaccagggcgcccaggtggacagcagacacccccagggccagtggagacaggacagcatgagaacctacgagagagaggccctgaagaagaagttcatgagagtgcacgacgccgagagcagcgacgaggacggctacgactggggccccgccaccgacctgtag

SEQ ID NO: 94491 - DNA, 2802 bp, Artificial Sequence
  derived and/or modified sequence
atggaggagctgaccatctgggagcagcacaccgccaccctgagcaaggaccccagaagaggcttcggcatcgccatcagcggcggcagagacagacccggcggcagcatggtggtgagcgacgtggtgcccggcggccccgccgagggcagactgcagaccggcgaccacatcgtgatggtgaacggcgtgagcatggagaacgccaccagcgccttcgccatccagatcctgaagacctgcaccaagatggccaacatcaccgtgaagagacccagaagaatccacctgcccgccaccaaggccagccccagcagccccggcagacaggacagcgacgaggacgacggcccccagagagtggaggaggtggaccagggcagaggctacgacggcgacagcagcagcggcagcggcagaagctgggacgagagaagcagaagacccagacccggcagaagaggcagagccggcagccacggcagaagaagccccggcggcggcagcgaggccaacggcctggccctggtgagcggcttcaagagactgcccagacaggacgtgcagatgaagcccgtgaagagcgtgctggtgaagagaagagacagcgaggagttcggcgtgaagctgggcagccagatcttcatcaagcacatcaccgacagcggcctggccgccagacacagaggcctgcaggagggcgacctgatcctgcagatcaacggcgtgagcagccagaacctgagcctgaacgacaccagaagactgatcgagaagagcgagggcaagctgagcctgctggtgctgagagacagaggccagttcctggtgaacatcccccccgccgtgagcgacagcgacagcagccccctggaggagggcgtgaccatggccgacgagatgagcagcccccccgccgacatcagcgacctggccagcgagctgagccaggccccccccagccacatcccccccccccccagacacgcccagagaagccccgaggccagccagaccgacagccccgtggagagccccagactgagaagagagagcagcgtggacagcagaaccatcagcgagcccgacgagcagagaagcgagctgcccagagagagcagctacgacatctacagagtgcccagcagccagagcatggaggacagaggctacagccccgacaccagagtggtgagattcctgaagggcaagagcatcggcctgagactggccggcggcaacgacgtgggcatcttcgtgagcggcgtgcaggccggcagccccgccgacggccagggcatccaggagggcgaccagatcctgcaggtgaacgacgtgcccttccagaacctgaccagagaggaggccgtgcagttcctgctgggcctgccccccggcgaggagatggagctggtgacccagagaaagcaggacatcttctggaagatggtgcagagcagagtgggcgacagcttctacatcagaacccacttcgagctggagcccagcccccccagcggcctgggcttcaccagaggcgacgtgttccacgtgctggacaccctgcaccccggccccggccagagccacgccagaggcggccactggctggccgtgagaatgggcagagacctgagagagcaggagagaggcatcatccccaaccagagcagagccgagcagctggccagcctggaggccgcccagagagccgtgggcgtgggccccggcagcagcgccggcagcaacgccagagccgagttctggagactgagaggcctgagaagaggcgccaagaagaccacccagagaagcagagaggacctgagcgccctgaccagacagggcagataccccccctacgagagagtggtgctgagagaggccagcttcaagagacccgtggtgatcctgggccccgtggccgacatcgccatgcagaagctgaccgccgagatgcccgaccagttcgagatcgccgagaccgtgagcagaaccgacagccccagcaagatcatcaagctggacaccgtgagagtgatcgccgagaaggacaagcacgccctgctggacgtgacccccagcgccatcgagagactgaactacgtgcagtactaccccatcgtggtgttcttcatccccgagagcagacccgccctgaaggccctgagacagtggctggcccccgccagcagaagaagcaccagaagactgtacgcccaggcccagaagctgagaaagcacagcagccacctgttcaccgccaccatccccctgaacggcaccagcgacacctggtaccaggagctgaaggccatcatcagagagcagcagaccagacccatctggaccgccgaggaccagctggacggcagcctggaggacaacctggacctgccccaccacggcctggccgacagcagcgccgacctgagctgcgacagcagagtgaacagcgactacgagaccgacggcgagggcggcgcctacaccgacggcgagggctacaccgacggcgagggcggcccctacaccgacgtggacgacgagccccccgcccccgccctggccagaagcagcgagcccgtgcaggccgacgagagccagagccccagagacagaggcagaatcagcgcccaccagggcgcccaggtggacagcagacacccccagggccagtggagacaggacagcatgagaacctacgagagagaggccctgaagaagaagttcatgagagtgcacgacgccgagagcagcgacgaggacggctacgactggggccccgccaccgacctgtag

SEQ ID NO: 94492 - DNA, 2652 bp, Artificial Sequence
  derived and/or modified sequence
atggtggtgagcgacgtggtgcccggcggccccgccgagggcagactgcagaccggcgaccacatcgtgatggtgaacggcgtgagcatggagaacgccaccagcgccttcgccatccagatcctgaagacctgcaccaagatggccaacatcaccgtgaagagacccagaagaatccacctgcccgccaccaaggccagccccagcagccccggcagacaggacagcgacgaggacgacggcccccagagagtggaggaggtggaccagggcagaggctacgacggcgacagcagcagcggcagcggcagaagctgggacgagagaagcagaagacccagacccggcagaagaggcagagccggcagccacggcagaagaagccccggcggcggcagcgaggccaacggcctggccctggtgagcggcttcaagagactgcccagacaggacgtgcagatgaagcccgtgaagagcgtgctggtgaagagaagagacagcgaggagttcggcgtgaagctgggcagccagatcttcatcaagcacatcaccgacagcggcctggccgccagacacagaggcctgcaggagggcgacctgatcctgcagatcaacggcgtgagcagccagaacctgagcctgaacgacaccagaagactgatcgagaagagcgagggcaagctgagcctgctggtgctgagagacagaggccagttcctggtgaacatcccccccgccgtgagcgacagcgacagcagccccctggaggacatcagcgacctggccagcgagctgagccaggccccccccagccacatcccccccccccccagacacgcccagagaagccccgaggccagccagaccgacagccccgtggagagccccagactgagaagagagagcagcgtggacagcagaaccatcagcgagcccgacgagcagagaagcgagctgcccagagagagcagctacgacatctacagagtgcccagcagccagagcatggaggacagaggctacagccccgacaccagagtggtgagattcctgaagggcaagagcatcggcctgagactggccggcggcaacgacgtgggcatcttcgtgagcggcgtgcaggccggcagccccgccgacggccagggcatccaggagggcgaccagatcctgcaggtgaacgacgtgcccttccagaacctgaccagagaggaggccgtgcagttcctgctgggcctgccccccggcgaggagatggagctggtgacccagagaaagcaggacatcttctggaagatggtgcagagcagagtgggcgacagcttctacatcagaacccacttcgagctggagcccagcccccccagcggcctgggcttcaccagaggcgacgtgttccacgtgctggacaccctgcaccccggccccggccagagccacgccagaggcggccactggctggccgtgagaatgggcagagacctgagagagcaggagagaggcatcatccccaaccagagcagagccgagcagctggccagcctggaggccgcccagagagccgtgggcgtgggccccggcagcagcgccggcagcaacgccagagccgagttctggagactgagaggcctgagaagaggcgccaagaagaccacccagagaagcagagaggacctgagcgccctgaccagacagggcagataccccccctacgagagagtggtgctgagagaggccagcttcaagagacccgtggtgatcctgggccccgtggccgacatcgccatgcagaagctgaccgccgagatgcccgaccagttcgagatcgccgagaccgtgagcagaaccgacagccccagcaagatcatcaagctggacaccgtgagagtgatcgccgagaaggacaagcacgccctgctggacgtgacccccagcgccatcgagagactgaactacgtgcagtactaccccatcgtggtgttcttcatccccgagagcagacccgccctgaaggccctgagacagtggctggcccccgccagcagaagaagcaccagaagactgtacgcccaggcccagaagctgagaaagcacagcagccacctgttcaccgccaccatccccctgaacggcaccagcgacacctggtaccaggagctgaaggccatcatcagagagcagcagaccagacccatctggaccgccgaggaccagctggacggcagcctggaggacaacctggacctgccccaccacggcctggccgacagcagcgccgacctgagctgcgacagcagagtgaacagcgactacgagaccgacggcgagggcggcgcctacaccgacggcgagggctacaccgacggcgagggcggcccctacaccgacgtggacgacgagccccccgcccccgccctggccagaagcagcgagcccgtgcaggccgacgagagccagagccccagagacagaggcagaatcagcgcccaccagggcgcccaggtggacagcagacacccccagggccagtggagacaggacagcatgagaacctacgagagagaggccctgaagaagaagttcatgagagtgcacgacgccgagagcagcgacgaggacggctacgactggggccccgccaccgacctgtag

SEQ ID NO: 94493 - DNA, 2760 bp, Artificial Sequence
  derived and/or modified sequence
atggaggagctgaccatctgggagcagcacaccgccaccctgagcaaggaccccagaagaggcttcggcatcgccatcagcggcggcagagacagacccggcggcagcatggtggtgagcgacgtggtgcccggcggccccgccgagggcagactgcagaccggcgaccacatcgtgatggtgaacggcgtgagcatggagaacgccaccagcgccttcgccatccagatcctgaagacctgcaccaagatggccaacatcaccgtgaagagacccagaagaatccacctgcccgccaccaaggccagccccagcagccccggcagacaggacagcgacgaggacgacggcccccagagagtggaggaggtggaccagggcagaggctacgacggcgacagcagcagcggcagcggcagaagctgggacgagagaagcagaagacccagacccggcagaagaggcagagccggcagccacggcagaagaagccccggcggcggcagcgaggccaacggcctggccctggtgagcggcttcaagagactgcccagacaggacgtgcagatgaagcccgtgaagagcgtgctggtgaagagaagagacagcgaggagttcggcgtgaagctgggcagccagatcttcatcaagcacatcaccgacagcggcctggccgccagacacagaggcctgcaggagggcgacctgatcctgcagatcaacggcgtgagcagccagaacctgagcctgaacgacaccagaagactgatcgagaagagcgagggcaagctgagcctgctggtgctgagagacagaggccagttcctggtgaacatcccccccgccgtgagcgacagcgacagcagccccctggaggacatcagcgacctggccagcgagctgagccaggccccccccagccacatcccccccccccccagacacgcccagagaagccccgaggccagccagaccgacagccccgtggagagccccagactgagaagagagagcagcgtggacagcagaaccatcagcgagcccgacgagcagagaagcgagctgcccagagagagcagctacgacatctacagagtgcccagcagccagagcatggaggacagaggctacagccccgacaccagagtggtgagattcctgaagggcaagagcatcggcctgagactggccggcggcaacgacgtgggcatcttcgtgagcggcgtgcaggccggcagccccgccgacggccagggcatccaggagggcgaccagatcctgcaggtgaacgacgtgcccttccagaacctgaccagagaggaggccgtgcagttcctgctgggcctgccccccggcgaggagatggagctggtgacccagagaaagcaggacatcttctggaagatggtgcagagcagagtgggcgacagcttctacatcagaacccacttcgagctggagcccagcccccccagcggcctgggcttcaccagaggcgacgtgttccacgtgctggacaccctgcaccccggccccggccagagccacgccagaggcggccactggctggccgtgagaatgggcagagacctgagagagcaggagagaggcatcatccccaaccagagcagagccgagcagctggccagcctggaggccgcccagagagccgtgggcgtgggccccggcagcagcgccggcagcaacgccagagccgagttctggagactgagaggcctgagaagaggcgccaagaagaccacccagagaagcagagaggacctgagcgccctgaccagacagggcagataccccccctacgagagagtggtgctgagagaggccagcttcaagagacccgtggtgatcctgggccccgtggccgacatcgccatgcagaagctgaccgccgagatgcccgaccagttcgagatcgccgagaccgtgagcagaaccgacagccccagcaagatcatcaagctggacaccgtgagagtgatcgccgagaaggacaagcacgccctgctggacgtgacccccagcgccatcgagagactgaactacgtgcagtactaccccatcgtggtgttcttcatccccgagagcagacccgccctgaaggccctgagacagtggctggcccccgccagcagaagaagcaccagaagactgtacgcccaggcccagaagctgagaaagcacagcagccacctgttcaccgccaccatccccctgaacggcaccagcgacacctggtaccaggagctgaaggccatcatcagagagcagcagaccagacccatctggaccgccgaggaccagctggacggcagcctggaggacaacctggacctgccccaccacggcctggccgacagcagcgccgacctgagctgcgacagcagagtgaacagcgactacgagaccgacggcgagggcggcgcctacaccgacggcgagggctacaccgacggcgagggcggcccctacaccgacgtggacgacgagccccccgcccccgccctggccagaagcagcgagcccgtgcaggccgacgagagccagagccccagagacagaggcagaatcagcgcccaccagggcgcccaggtggacagcagacacccccagggccagtggagacaggacagcatgagaacctacgagagagaggccctgaagaagaagttcatgagagtgcacgacgccgagagcagcgacgaggacggctacgactggggccccgccaccgacctgtag

SEQ ID NO: 94494 - DNA, 2787 bp, Artificial Sequence
  derived and/or modified sequence
atggctgtaagatttcaggtagctgatatggaggaacttaccatctgggaacagcacactgccacattgtccaaagatcccagacgtggatttggaatcgctatttccggcggacgtgatagacccgggggatccatggtggtctctgacgtggtgccgggtgggccggctgaaggcaggctgcagacaggcgaccacatcgtcatggtaaacggagtctcaatggagaacgcaacaagcgcctttgccattcagatactcaagacatgtactaaaatggccaacatcaccgttaaacgccccaggagaatccacctgcccgctaccaaagcaagcccatcctcaccgggacgccaggacagcgacgaggacgacggcccacagagagtcgaagaggtggatcagggcagaggttacgacggagattcgtctagtggcagtgggcggtcctgggatgagcgcagtcggaggcctagaccggggaggagaggaagagccgggtcacatggccgccggtcccccggcggcggcagcgaagcaaacggtctggcactggtaagcggattcaaacgccttccccgtcaggacgtccagatgaagcccgtcaagagcgttcttgtgaaaaggcgtgattctgaggaattcggggtcaagcttgggagccaaatctttatcaaacacattacggactccggcctggctgcaagacataggggtctgcaggaaggtgatttaattctgcagatcaatggcgtttcaagtcagaatctttcattgaatgacacccgacgtctgattgaaaagtccgaggggaaactgtcccttctggtattacgggataggggacaattccttgtgaacatcccacccgcagtgtctgacagtgattctagccctctggaggacatctctgacttagcctccgaactgtctcaggctcctccctcgcatatcccaccacccccgcgacatgcccagcgaagcccggaggctagtcaaacagattcacccgttgagagcccccgcctacgcagggagagctccgtggatagcaggaccatttcagagccggatgaacaaagaagcgagctgccacgggaatcgagctatgatatctatcgcgtaccttcgagccagtccatggaggaccgcggttactcccccgatacacgcgtggtcagatttctgaaagggaagagcatcggactgaggttggctggcggcaacgacgtgggcatcttcgtctctggcgttcaggctggatccccagctgatggccaggggatccaagagggagatcagatcctccaggttaatgacgtgcctttccaaaacctgactagagaggaggccgtacagttcctcctcggactcccccctggcgaggagatggagctcgtcactcagcgcaaacaggacatcttctggaagatggttcagtctcgcgtaggtgatagcttctatatccgcacccacttcgaactagagccaagcccgcccagcgggctcggattcacgcgtggagatgtctttcacgtgttagatacattgcaccctggcccaggccaatcacatgcgagaggaggtcattggctggctgtgcgcatgggaagggacctgcgcgagcaggagagggggatcattcccaatcaatcccgggctgagcagctggcgtctctggaggctgcacaacgggcggttggcgtgggccctggctcctctgccggatctaacgcacgagccgagttttggcgacttagaggcctgagacgaggcgccaagaaaaccacgcagcggagcagggaggacctgtccgcactgactcgccagggccggtaccccccatacgaaagggtggtgctcagggaggcctccttcaagcgacctgttgtgattttgggtcctgttgctgacatcgccatgcagaaactcacagctgagatgcccgaccagttcgagatagctgaaacagtgtctcggacagattcccccagcaaaataatcaagctggacactgttcgcgtcatcgccgagaaagataaacatgctctgttggacgttacacctagcgctatcgagaggctgaattacgtacagtactatcctatagtggtgttttttatacctgagagcagacctgctttgaaagctctgcgccagtggctggcccccgccagtcgccgatccactaggcgcctgtatgctcaggcacagaaactgcggaaacattcatcacacttattcactgctaccatcccattgaacggcacttctgatacatggtaccaggagctgaaggcaattatacgtgagcagcaaactaggccaatctggactgccgaggaccagcttgatggaagcctcgaagacaatctggatttgccccaccatgggctggctgatagctccgccgacctctcctgcgattcccgtgtaaattcagactacgagactgatggagaggggggcgcatatacggatggtgaaggttacactgacggcgagggagggccttatactgatgtggatgatgagcctcccgctccagcccttgcaagatcatctgagcccgtgcaggcagatgaaagtcagtctcctcgggatagaggccgcatcagtgcccaccaaggcgcccaagtggactccaggcacccacagggccagtggcggcaggattctatgcgcacctatgaaagagaggcattaaagaagaagtttatgcgagtgcatgacgctgaatctagtgacgaggatggttacgattggggcccggctaccgatctgtag

SEQ ID NO: 94495 - DNA, 2859 bp, Artificial Sequence
  derived and/or modified sequence
atgaatctttgtggtctgatgccaatatttcccgcaccactggatcaagtggctgacatggaggaactgactatttgggagcagcacaccgcaacccttagcaaagatccaagaaggggttttggcatagccattagtgggggccgcgaccgtcccggggggagtatggtcgtcagcgacgtcgtgccgggcggaccagccgagggccggcttcagacaggggaccatatagtgatggtgaatggcgtcagtatggagaacgccaccagtgccttcgccatccagatcctgaaaacctgtacaaagatggcgaacatcaccgtgaagcgtccacgacgtatccacctccccgccaccaaggcctctccttcttcacccgggcgccaggactccgacgaggatgatggcccccaacgggtggaggaggtcgatcaggggcggggttacgacggggatagttccagcggttccggccgttcttgggatgagcgctctcggcgtcctcgccccgggcggaggggccgggcaggttcgcatggccgtcgcagtcccggcggcgggagcgaggccaacggcctggctttggtctcaggcttcaaaagattgcctagacaagatgttcagatgaaacccgtgaagtcagtgctggtcaaaagaagagacagtgaagagtttggcgtaaagctgggcagccaaatctttatcaagcacataaccgatagcggactggcagcccgtcaccgcggcctgcaggagggagacctcatcttgcaaattaatggtgtctctagtcagaacctgtctctgaatgatacccgacgtcttattgagaaatcagaggggaagctgagcctccttgtgctccgcgatagaggtcagttcctggtgaatattccacccgctgtgtccgattcggactcctcaccactcgaagagggcgtcaccatggcggacgagatgtccagcccgcccgctgacatcagcgacctggcttcggaactgtctcaggcgccaccttctcatatcccacctccacctcggcacgcccagcgcagccctgaggccagccaaactgattcccccgtggagtccccccggctgaggcgagagagctccgttgacagcaggaccatatctgaacccgacgagcagaggagcgagctgccaagggaatcgtcatacgacatttacagggtgccctcaagtcagagtatggaggacagaggctatagtcctgacacacgagtggtgaggttcctgaagggcaaaagtatcggccttcgcctggccggaggcaatgacgtgggcatttttgtgagcggggttcaagcaggtagtccagccgacggtcaaggtatccaagaaggggaccagatcctccaggtgaacgacgtgccatttcagaaccttacacgtgaagaggccgtgcagttcctgctcggacttccacctggcgaggaaatggaactggtcacgcaacggaagcaggacatcttttggaagatggttcaatcaagagttggcgactccttctacattcgtacacacttcgagctcgaaccctcaccacctagtggattgggctttacgagaggggacgtcttccatgtgctggataccctgcatccaggtccggggcaaagccacgcccggggcggccactggctcgccgtccggatgggccgggacttacgagaacaggagagaggtatcatccccaaccagagccgcgcagaacaactggcctccctggaggcagcccagcgggccgtgggggtgggcccaggcagctccgcagggagcaatgcccgcgctgaattctggaggctacggggtcttcgccggggggcgaaaaagactactcaacgttctcgagaggacctgtccgcactaactaggcagggcagatacccaccttatgaacgtgtggttcttcgagaggcgtcctttaagcggcctgtggtcatattggggcccgtcgccgatatcgccatgcagaagcttaccgccgagatgcccgatcaattcgagattgcagaaactgtgtctaggacagactccccctcaaaaattatcaaattggatactgtccgggtaatcgcagaaaaggacaaacacgcgctgctcgatgtaacaccctccgcaatcgagcggctgaactacgtccagtactatcctattgtggtgttttttattcctgagtcacggcccgcactgaaagctttaagacaatggctggcaccagcctctaggcgcagtacccgcaggttgtacgctcaggcccagaagttgcgcaagcacagcagccaccttttcacagcaactatcccactcaatggcacgagcgatacgtggtaccaggaactaaaggctatcatccgcgagcagcagacccgtccaatttggaccgctgaagatcagttggatggcagcctcgaggataatctcgacctgccccaccacggattggccgattctagcgctgacctatcatgtgacagtcgggtcaattcagattatgagacagacggagagggcggtgcatacacagatggcgagggatacactgacggtgagggaggtccatacacagatgttgacgatgaaccaccagcacccgcattggctcggagctcggaacctgttcaagcagatgagagccaaagtccacgtgatcgtgggcggatctctgctcaccagggcgcacaggtagactcaaggcatccacaggggcagtggcggcaagactctatgagaacctacgaaagggaggccctgaaaaagaagttcatgcgtgtacacgacgctgaatcctcagatgaggacggttatgactgggggcccgcaactgatttatag

SEQ ID NO: 94496 - DNA, 2802 bp, Artificial Sequence
  derived and/or modified sequence
atggaagaactgaccatttgggaacagcataccgcaactctgagcaaggacccacgacggggtttcggtattgccatctccggtggccgtgaccgtcctggcggctccatggtggtctcggatgtcgttcctggcgggcccgccgagggccgcctgcaaacgggtgaccacatcgtgatggtcaacggagtttccatggaaaatgctacctcggcctttgctatccagatactgaaaacatgtacaaagatggcaaacattaccgtgaaacggcctagacgcatccacttgcccgctactaaagcctctccttcctcacctggccggcaggactccgacgaggacgatgggccccagcgagtcgaggaagtcgatcaagggagagggtacgatggcgattcttcaagcggctccggaagatcatgggacgaaaggtcccgccgacccagacccggccggcgaggtagggccggatcgcatggtcgcagatctcccggcggaggtagtgaggccaacggcttagcccttgtgtctggtttcaagagactgccgagacaggacgtgcagatgaagccagtgaaaagcgtgctcgtgaagagacgcgattccgaggaattcggagtgaagctcgggtcccagattttcattaaacacatcacagattctggcctggctgctagacacaggggtctacaagaaggcgatctgatcctccagatcaacggcgtgtcttcgcaaaatctgagtctcaatgatactcggagactgatcgaaaagagcgagggcaaactctctctgcttgttctcagagaccgaggtcaattccttgtaaatattcctccggcggtttccgattctgacagcagtcctttggaggagggcgtcaccatggcagacgagatgtctagccccccagccgacattagtgacttagcttccgaattgagtcaagcaccgccaagccatatcccaccccccccccgccatgcacagagatctcctgaggcgtcccagacagatagtcccgtggagagtccaaggttgcgcagggaaagctctgttgattcccgtactatcagcgaacccgatgagcaaaggtccgagctgccaagagaaagtagctatgacatctaccgtgtgccctcatctcagtctatggaggacagaggatattctccggacactcgcgtggtgcgctttttaaaaggtaagagtatcgggctgcggctggctggcgggaacgatgtgggaatctttgtgtccggagtgcaggccggctcccccgctgatggccagggcatccaggagggcgatcagattctgcaggttaacgacgtgcctttccagaatctgactagagaggaggctgtccagtttttgctggggctccctcccggggaggagatggaactggtaactcaaagaaagcaggatattttttggaaaatggtccagagccgcgtgggggatagtttctatataaggactcactttgagcttgaacctagtcccccctcaggcctgggcttcactcggggcgatgtattccatgtgttggataccctgcaccccgggcctgggcagagccatgcaagaggggggcattggctcgccgtccggatggggagagatctgagagagcaggagagaggcattataccaaatcagtctcgcgccgaacagttggcatcactcgaggcagctcaaagggcggtcggggttggcccaggcagcagcgcgggcagcaatgcccgcgccgaattttggcggctgagagggctgcggcggggggctaagaagacgacccaacggtctcgagaggatctaagtgccctgacacgccaggggagatatccgccatacgagagggtggtcctcagagaagcatccttcaagcgcccagtggtgattctggggccagtggccgatatcgcgatgcagaagctaacagcagaaatgccggaccagttcgagatcgccgaaaccgtcagccgaactgatagcccatcgaaaatcattaaactggatactgtgagagtaattgcggaaaaggacaaacatgcgttgttagatgtgactcccagtgctattgagcgccttaattatgtgcagtattatcctattgtagtgttcttcatacccgaaagtcgacccgccctgaaggccctccgacagtggttagcccctgcgagtcgtagatccacaaggcggttgtacgcgcaagctcagaagttgagaaagcactcttctcacctgttcaccgccacaatcccactgaatggtacttccgatacctggtatcaggaattaaaggccattattagagaacagcaaacacggcctatctggaccgctgaggaccagttggatggtagcctggaagacaaccttgacttgccacaccatgggttggccgattcaagcgcagacctaagctgtgattcccgggttaactccgactatgagactgacggagagggcggcgcctacaccgacggtgagggttataccgatggagaagggggaccctacacagacgtggacgatgaaccacctgcccctgcgttggcacgaagcagtgagcccgttcaagccgacgagtcacagtcccccagagacaggggccggatttccgcccaccagggggctcaggttgattccaggcacccacaggggcagtggaggcaagattctatgcgaacctatgagcgagaggctttgaaaaaaaagttcatgcgcgtgcatgatgccgagagttcagatgaagacggttatgactggggaccggctacagacctgtag

SEQ ID NO: 94497 - DNA, 2652 bp, Artificial Sequence
  derived and/or modified sequence
atggtcgtcagcgacgtggtgcctggaggtcccgcagaaggccggctacagacgggcgaccacatcgtgatggtcaacggggtttctatggaaaacgctacatcagccttcgctattcagatactcaagacctgtacaaagatggctaacattacagtgaagcgcccacggagaatacatctgccagctacaaaggccagccccagcagccctggccgacaggacagcgatgaggatgacgggccacagagggtcgaagaggtggatcagggacgcggctatgatggagactcttcctcagggagcggccgatcttgggatgagcgctcgcgtaggcctaggcccggtcggcgcggacgcgctggcagccatggcaggcgcagccctggcggaggtagcgaggccaacggtctggcactggtgtccggattcaaacgcctgcctcgccaggatgtgcaaatgaaaccggtgaagtccgtgctggttaagcggcgtgatagtgaagagtttggcgtcaagctggggtctcagatctttatcaagcacataaccgattctggcctcgccgctcgccaccgtggcctccaggagggcgacctcattctgcagataaacggcgtgtcatctcaaaatctgtccctcaacgatacacggaggctgattgaaaagtctgaaggaaaactgagcctgctggtacttagagaccggggtcagttcctcgtgaatatacccccagccgtttccgactcagattcctctccccttgaagacatcagcgacctggcctccgaactaagccaggctccaccttctcacatacccccgccccccagacatgcccaacgctctcctgaagctagccagaccgatagtcctgtggagtccccgcgcttgcgccgggagtccagcgtcgatagtaggacaatttctgaacccgacgaacagcgcagcgagctgccgcgagagtcatcctacgacatctatagagtcccttctagtcaatcaatggaagatcggggatacagccccgacactagggtggtcaggtttctcaagggcaagagcatcggcttgaggcttgctggaggcaatgacgtgggcatcttcgtgtcgggcgtccaggccggctcacctgctgacgggcagggtatacaggagggcgatcagatcctgcaggtcaacgatgtaccctttcagaacttgacgcgcgaggaagctgtgcagttcctgctgggcttaccccccggggaggagatggaactggtgacccagaggaaacaagacattttctggaagatggtgcaatccagagtgggcgattcattttacatccgtacccactttgagcttgagccttcaccacccagtggcttaggttttacccgaggggacgtatttcacgtgctggatactctacaccctggcccaggacagagccacgcccgcggcggccactggcttgccgtcaggatgggtcgggatcttagagaacaggaacgcggcatcattcctaaccagtctcgggccgagcaactggcttccctcgaggccgcgcagagagctgtgggggtcggtcccggttcttccgcaggctccaatgcccgcgctgagttctggagactgcggggcctgagacgcggtgccaagaagacgactcaacggtcccgagaggacctcagcgccctgactcgtcaaggtagataccccccttatgagagggtcgtgctgcgggaggcctcctttaaacgacctgtcgtgattctggggccagtcgctgatatcgcaatgcagaaactcactgccgagatgccggaccagtttgagatagccgaaaccgtgagcagaacagacagcccctcgaagatcataaagctcgatactgtgagggtgatcgctgaaaaggacaaacacgctctgttggacgtcactccttccgccatcgaaaggttaaactatgtccagtactacccaatcgtcgtcttctttatcccagaaagccgccccgccctcaaagctctccgccagtggctagcacccgctagccgaagaagcacaagaaggttgtacgctcaggctcagaagctgagaaagcactcctctcacttattcaccgctaccatccccttaaatggtacctcggacacctggtatcaggagctgaaggctattattcgggagcaacaaacaaggcccatctggaccgccgaagatcagttggacggttctcttgaagataatctcgacttgcctcatcatgggctggccgattccagcgccgaccttagttgcgattcacgcgtcaatagtgactacgagaccgatggggagggaggggcatatactgacggggagggctacaccgatggggagggcggaccttatactgacgtggatgatgaaccaccggcacccgccttggcacgatcttccgagcctgttcaggccgacgaatcccaatctccgagagatcgggggcgaatctctgcacaccagggtgctcaggttgactcacgccacccccaggggcagtggaggcaggatagcatgcgtacatacgagagggaagccttgaaaaaaaagttcatgcgagtgcacgacgcagagagcagtgatgaggacggctatgattgggggccagccacagacctctag

SEQ ID NO: 94498 - DNA, 2760 bp, Artificial Sequence
  derived and/or modified sequence
atggaggagctgaccatctgggaacagcataccgccacgctctcaaaagacccacgtcgaggcttcggaatcgctatctcaggtggccgtgatcgccccggggggagtatggtcgtaagtgacgtagtgcccggcgggcctgccgagggtcggctgcagacaggggatcacatagtaatggtaaatggtgtctctatggaaaacgcaacatccgccttcgcaattcagatcctcaaaacatgcactaagatggccaatatcacagtgaagagacctcgacgcatccatctgcctgctaccaaggcgtccccttcttctccaggtagacaggactcggacgaggacgacggtccccagcgcgtggaggaagtggatcaggggcgaggatacgatggtgacagcagcagtggctcaggccgctcttgggatgaacgcagtcgtcgccctaggccgggaaggcgcgggagggcaggcagtcatggtcggaggtcacccggcggcggaagcgaggcaaacggactcgcccttgtgagcggattcaaaagattaccaagacaggatgtgcaaatgaagcccgtgaagtctgtcctggttaaaagacgggatagcgaagaattcggagtgaagctaggctctcagatttttatcaagcacattaccgactcagggctcgcggcgcgacacagaggcctccaagaaggtgatctgatcttacaaatcaacggcgtcagctctcaaaacctctctctcaatgacaccagaagacttatcgaaaagtctgagggaaagcttagcctgctcgtgctcagggataggggccagttcttagtgaacattccaccagcagtgtccgacagcgactcctcacctctcgaggacataagtgacttggcatccgaactgtcccaggcccccccaagccatattcctccacccccccgacatgcgcagcggtccccggaagctagccagacggattctccggtagagagcccccgattacgccgcgagtcttcagtggattccagaactatctctgaacctgacgagcagcgcagcgagctgccccgggaatcaagctatgacatctatcgcgtgcctagtagccagtctatggaggaccgtgggtactctcccgacacccgcgtcgtccgattcctgaagggaaagagtatcgggctgcgcctggcagggggaaatgacgtggggatatttgttagtggtgtgcaggctggctctccggccgatggacaaggaattcaggaaggggaccagattctgcaggtgaatgacgtcccttttcagaacctcactagagaggaggctgttcagtttctgctcgggctgcctcctggcgaagaaatggagctagtgacccaaagaaaacaagacatcttttggaaaatggtccagagccgggtcggggattctttttacatcagaacccactttgagctcgaaccttcgccaccttctggcctcggttttactcgaggagacgtgttccacgtcctggatacactccatccaggacctgggcagtctcatgccaggggtggccattggttggctgtccgcatgggaagggatctgagggaacaagagcgcggcattattcccaatcagtccagagccgagcagctagcttctctagaagcggctcagcgcgctgttggagtagggccagggagcagtgccggaagtaatgcacgcgcagaattttggcgcttgcggggactgaggcgtggcgcaaagaagaccactcagcggagccgcgaagacctcagcgcactcaccagacagggccgctatccgccctacgagcgagtggtcctgagagaagcttctttcaaacgtcccgttgtgatcctcggtcccgttgccgacatcgctatgcagaaattgacagcggagatgccagaccagttcgaaatcgccgaaactgtgagccggacagatagtcccagcaaaataatcaagttagatactgtacgagtgatcgcagaaaaggacaagcacgccctgctggacgtgactccaagcgcaatcgagcggctgaattacgtacagtactaccccatcgtggtttttttcatccctgaaagtcgcccggccctgaaagccctcaggcagtggctcgccccggcaagcagacgctccacgagaagattatacgctcaggcccaaaagctgagaaagcactcatctcatctcttcacagccactattccactaaacgggacctctgatacctggtatcaggagctcaaggccatcattcgagaacagcagacacggcctatctggactgcagaagatcagcttgatgggtcacttgaggacaacttagacttgccccaccacggccttgctgattcttccgctgatctatcatgtgattcaagggtcaactccgactacgagaccgacggggagggcggcgcttataccgatggggaaggatacacagatggcgagggcgggccatatacagacgttgatgatgaacctcccgcacccgccctggcccgctcatccgaacccgtccaggcagatgagagccagagccctagggatcggggtcgaatctcagcacatcagggcgcccaggtggacagccgccacccacaaggccagtggaggcaagatagcatgcgcacttacgagcgggaggccctgaagaagaaattcatgcgggtgcacgacgcagaatcgagcgacgaggatggttacgattggggccctgcgacggatctttag

SEQ ID NO: 94499 - DNA, 2787 bp, Artificial Sequence
  derived and/or modified sequence
atggctgtgcgcttccaggtggccgacatggaggagctgaccatctgggagcagcacacagccaccctgagcaaggacccccggcggggctttggaattgccatcagcggcggccgggacaggcctgggggctccatggtggtgtctgatgtggtgcctgggggccctgctgagggccgcctgcagacaggagaccacatcgtgatggtgaatggagtgtccatggagaatgccaccagcgcctttgccatccagatcctgaagacctgcaccaagatggccaacatcaccgtgaagaggccccggcgcatccacctgcctgccaccaaggccagccccagcagccctggccggcaggacagtgatgaagatgatggcccccagagggtggaggaggtggaccagggccggggctatgatggagacagcagcagcggcagcggccgctcctgggatgagaggagccggcggccccggcccggccggcggggccgggccggcagccatggaagaagaagccctgggggcggcagcgaggccaacggcctggccctggtgtctggcttcaagaggctgccccggcaggatgtgcagatgaagcctgtgaagtctgtgctggtgaagagaagagacagcgaggagtttggagtgaagctgggcagccagatcttcatcaagcacatcacagattctggcctggccgcccggcaccggggcctgcaggagggggacctgatcctgcagatcaacggggtgagcagccagaacctgagcctgaatgacaccaggaggctcatcgagaagtctgagggcaagctgagcctgctggtgctgcgggaccggggccagttcctggtgaacatccccccagctgtgtctgacagcgacagcagccccctggaggacatcagtgacctggccagcgagctgagccaggccccacccagccacatccccccaccacccaggcatgcccagaggagccctgaggccagccagacagacagccctgtggagagcccccggctgcggcgggagagctctgtggacagcaggaccatcagcgagccagatgagcagaggtctgagctgccccgggagagcagctatgacatctacagagtgcccagcagccagagcatggaggaccggggctacagcccagacaccagggtggtgcgcttcctgaagggcaagagcatcggcctgcggctggccggcggcaatgatgtgggcatctttgtgtctggagtgcaggccggcagccctgcagatggccagggcatccaggagggggaccagatcctgcaggtgaatgatgtgcccttccagaacctgacccgggaggaggccgtgcagttcctgctgggcctgcccccaggagaggagatggagctggtgacccagaggaagcaggacatcttctggaagatggtgcagagccgggtgggggacagcttctacatccgcacccactttgagctggagcccagccccccatctggcctgggcttcaccagaggagatgtgttccacgtgctggacaccctgcaccctggccctggccagagccacgcccggggcggccactggctggccgtgaggatgggccgggacctgcgggagcaggagcggggcatcatccccaaccagagcagagctgagcagctggccagcctggaggccgcccagagagctgtgggcgtgggccctggcagcagcgctggcagcaatgcccgggcagagttctggaggctgcggggcctgcggcggggggccaagaagaccacccagaggagccgggaggacctgagcgccctgacccggcagggccgctacccaccctatgaaagagtggtgctgcgggaggccagcttcaagaggcctgtggtgatcctgggccctgtggccgacatcgccatgcagaagctgacagctgagatgccagaccagtttgaaattgctgagaccgtgtccaggacagacagccccagcaagatcatcaagctggacacagtgcgggtgattgctgagaaggacaagcacgccctgctggatgtgacccccagcgccatcgagcggctgaactacgtgcagtactaccccatcgtggtgttcttcatccctgagagcaggcctgccctgaaggccctgcggcagtggctggccccagccagcagaagaagcacccggcggctgtatgcccaggcccagaagctgaggaagcacagcagccacctgttcaccgccaccatccccctgaatggcaccagtgacacctggtaccaggagctgaaggccatcatccgggagcagcagacccggcccatctggacagctgaggaccagctggatggcagcctggaggacaacctggacctgccccaccacggcctggccgacagcagcgctgacctgagctgtgacagccgggtgaacagcgactatgaaacagatggagagggcggggcctacacagatggagagggctacacagatggagagggcggcccctacacagatgtggatgatgagcccccagccccagccctggcccggagcagcgagcctgtgcaggctgatgagagccagagcccccgggaccggggccgcatcagcgcccaccagggcgcccaggtggacagccgccacccccagggccagtggaggcaggacagcatgaggacctatgagcgggaggccctgaagaagaagttcatgagggtgcatgatgctgagagcagtgatgaagatggctatgactggggccctgccacagacctgtag
